United States Patent Application Publication US 2009/0018031 A1 - sequence listing, part 4

SEQ ID NO: 1855 - DNA, 6000 bp, Homo sapiens
gggtggggcctgaggtgtcctgtctcctgcagcgcgagatggtctactgcctggagcagggcctcatccaccgctgtgccagccagtgcgtcgtggccttgtccatctgcagcgtggagatgcctgacatcatcatcaaggcgctgcctgttctggtggtgaagctcacgcacatctcagccacagccagcatggccgtcccactgctggagttcctgtccagtgagtccccgccctgcctgcgcatgcacccgagaggttcgggctgtgtaacctgtgcgggcttctctggtgccctctctcaggactccttggggaacctgggtgtctcgccttctgctgcctcagggcctgggcgtctctgcccggctgccatgagtgctctccttcctggctttgaggggcggctcctctcacccctctagtgtccatgtgaacgctcctccttgaagaagcctcttcccccccgagcagtggccctcccctggttttgggcctcctctctgtccaacagagcacacgccgcttcaggggggctttgttcgcttcccccagactgtgacttcaggagctcaggtgcctgtcccttcccctcaccgcctgtgcgcatctgggcaggccctcaatgttgagatggcagaagggcactgctgggcccgcacttggtgtagaggctggagagaagatcgtgtgtgctttgtgggccacatgcaggtcctgtcggtctttctgttttgttgataaccctttagaagtgtagaagcctggccaggcgcggtggctcaggcctgtcatcccagcactgtgggaggccgaggcgggtggatcacctgaggtcaggagttcgagaccagcctggccaacctggcgaaaccctgtctctactaagaatacaaaaattagccgggtgtggtggcgggtgcctgtagtcccagctactcaggaggctaaggcaggaggcaggagaatctcatgaacccaggaggtggagcttctagtgagctgagatcacgccaccgcactccagcctgggcaacagagcgagacaccgtctcaaaaaaaaaaaagagagaagtgaggccgggcacggtggctcacgcctgtaatcccagcactttcggaggccgaggcaggcggatcatgaggtcaggagatcgagaccatctggcgaacacggtgaaaccccgtctctaataaaaatacaaaaaaactagccaggcgtggtggcgggcgcctgtagtcccagctacttgggaggctgaggcaggagaatggcgtgaacccagggggtggagcttgcagtgagccgggatcgcgccactgcactccagcctgggcgacagagccagactcatctcaaaaaaaaaaaaaaaaaaaaaaaaagaggtgcggaagcctttcctcacggatcacacaaatggtaggcgacagctcgaattggcccagaagctgtggttggctggccatgggaccgagagttgaggccagggtcgggaaagccacgtccgtgtggccgtggccttctctcctctgcagcaccccatcgctgccgtgggcagagcagccgtgttggccttcagaggcgctgcacgggaccccggctcccctgaccaccctctccattaccgcagctctggccaggctgccgcacctctacaggaactttgccgcggagcagtatgccagtgtgttcgccatctccctgccgtacaccaacccctccaagtgagtggtcgccccaggccctgtgcctcccagccgtggcccccgctaggccttgcggcagaaagccccggcagcctttgtccccaaggcctgagcgcctcggttttttgcacttcatgccctggggatgtttccctgctgccaggatggagtgccagcccccttctcatctcaggtttaatcagtacatcgtgtgtctggcccatcacgtcatagccatgtggttcatcaggtgccgcctgcccttccggaaggattttgtccctttcatcactaaggtgggctcagggccggtgaaggctgtgtctctcggtaggccagggcttgctttgcccttggctgtccatggtcgggcagagtgacaggcaggtggagggcagtgggagggtgtttggggctgtgcctgtggcgctgggggctctgctgggcagcctgcagggctttgatgcgcggcaggcattgaggggtgggagctgggtgccgccgccttgcccctagcctgcagcttgtccctggccagggggcacccggcaggcctggtgagggcctccagcccccattgccacccctcactgtctgggtgtgctcactctgccagggcctgcggtccaatgtcctcttgtcttttgatgacacccccgagaaggacagcttcagggcccggagtactagtctcaacgagagacccaagaggtacggcctgcgggggtgtgcctggagtcggtgtggggtggggaaggacatggggctgtggcctgcctgacggtgcctccaagtcagtgagtggaaatgggtcctgtgtgccctggagtatgtgaggcagggcaggacctgcaagggccgctaacacccctcagcccctcagcaggttggccgtggtggcctgggtccgggctgcgtgtgccacgggcacctacttgtggaattgggggttggggtgcaagctttaggcgcctgagcccctcgaaggagccggccttgtctggggctgccccctcctctgcagcccccagcctgctgctagccggggactctgcttcatcaccgccgccttgccggaccgcaaagagctgagccagcctctgtgttcttgtttgcatttcatttgaacggctttctcctcctgtcccccaccttcctgcccgagctattttggctttccctagatgggaatacggcattttccagcgtgacctcaactcggaagctgttgtctccagcccctgggggccgggggccaagctcggccattacggccagagactactttctggggtcttggtctcttttcctagtgaccttcagggcctggccactgaggcctcagtgccgcctcggtcagagctgggcggtgcctgccttccgcgggtgggtgggattgcctggccagcacagcctggaatctgccgtgggggtgacccacacacgtttaatttgcactgacgttgtttgttttggtgtcatgcgtgaagccttacttgttctcagtcatgtttaccagacgtattatcatgcatttttgttttctgtctcttccccgctaactgccctttggcatggctctttttgctcatctcacccgcgggatctctccatcctgaccctgtggcctgggacctttcctcctcacccctccactggcttgttctccccttcccgggagctgggctctctggggcgttggggctccttcctcacccgatagtctgaggatagccagaccccccaaacaaggcttgaataactctccacccgtgaaagaattcaaggagagctctgcagccgaggccttccggtgccgcagcatcagtgtgtctgaacatgtggtccgcaggtagcgggactgtcgggtggggggcacggaccctggagcttggccccgtgagcacctgggtggcagtgcatggggctgcttgcatgacctcatcgtctgcccgtgtcctccctggccagcccagggggagccggtgacgaggggtggaaaggttgcattctgtccccaggccccgtatgagcacgggctggttgcacgcatccccaggccccctcggggtgccgctccgagagagccaggcgtgccgggcagcagcctccccaggctgtccccaagggccgcagtgtgggttgggggagacaccactcctggttttggccttttcgtattctctagaatggacgtttttcttcgggctttcttctcaacaaggtttattttttgttgtagctgaaagggaacaaggggcatttgtggagggtgctggggtggggcagcctgggagggcctgggtgggggctaggatcctgcagggcatgggcatgggcctgggccccaggccatggtcttagttctccccgcagtgtctgggtgcaggtgtgggctctcgggctctcggctgtcacctgcctgtgggtcatcgctgctggcactggcagaggggatacctgtctcctcctggaagcccgttgcaggccaaggggtcccatggccctcagtccatccacctcctcacctcaggccggcctctgctgggtgggacttggccaggggttggggtggtagaggtgctcggtgaggcttaaagccattttctagcacattctgtatcatgagcaaaatattgcctaggggctatgaaatttgtatcagaatgaactcccataagcctcttccctgtcactgggtgtggagctcaggcagccgctcgcctgcctgagggtgacggtggaaggccacatggggatcccagacctctgtgtgcttgccggaggcagcctgcgggcagaatgcaatctgggcctgtctgtgtggcctccgcctctctgcatgactacaccgtttcgccaggaggccgtaacctagtgctcccgtgggcttcggtgagggggatgtcggtctctagcctcctgagtctgctccgaccagtaggcctggtcttccccacccagcgtctccccgttctctgggacaatgtggtccacgtgattctcaagctgaggctcgctgggccgcccacgccctgttggggtctttccgagcgaggtcctcagccgtgcatgcgttgagctttggcccttggtgataggtggctcggcccgccctacctggcaccctgaccctggtcacggcctctccctccagcaggatacagacgtccctcaccagtgccagcttggggtctgcagatgagaactccgtggcccaggctgacgatagcctgaaaaacctccacctggagctcacggaaacctgtctggacatgatggctcgatacgtcttctccaacttcacggctgtcccgaagaggtccaggcggcactacagggctgggcgggcctgcgggagctccacgggcaagctgggtttcacgctccctgtcttctaggtctcctgtgggcgagttcctcctagcgggtggcaggaccaaaacctggctggttgggaacaagcttgtcactgtgacgacaagcgtgggaaccgggacccggtcgttactaggcctggactcgggggagctgcagtccggcccggagtcgaggtgactgcaccttcctttcctccgcgcctgccagcctcgacaccggctgtcccgagcccaggcccacgtggcaccctcgtaccagcctggggactaagtccaccctgtgcgtgggattctcttctcagctccagccccggggtgcatgtgagacagaccaaggaggcgccggccaagctggagtcccaggctgggcagcaggtgtcccgtggggcccgggatcgggtccgttccatgtcgggtgagccttggccccagccacctccacacaggcaccggggctccctcagttgctgctggtcccagtgttcaggaaggccccgagcccaggggccggggtggctggcttcaggcccggcccacgtcctgactctggggtgagccttccacagctcaccccagagccgtggagtggtggagtgtggcccgcttgctgcagaggggcctgctctgggtgctggtgtttcctgcgggttttcagctcggctcagtcctggagcccttctctgctccagcgagccgtggtctgactgcaggacaggttctgggtccctccctgtggccctgggttcactgaggccagcactgtggtgggccgtgccccaagggcagagctgccaccgtctctggctgcctgtggcactagcttgccaggctcggggggagcattcagcttgaggctggtggttttgcatcaggtaagtggtggtcaccagtcctctgccctcttcttcagggg

SEQ ID NO: 1856 - DNA, 6000 bp, Homo sapiens
ttggtatcaggaatggcctgatcaggccaccaacgccttcctgtctgcatgagcctttgacacccccagccctgtctcaggccccaccctctccccagcatggaggagtgtgaggccctgtgcagccggcggccatcatggtgcaggggcagttcaagtgcctgggcagcccccagcacctcaagagcaagttcagcagtggctactccctgcgggccaaggtgcagagtgaagggcagcaggaggtgctggaggagttcaaggccttcgtggacctgacctttccaggtgtgtgccggccccggcagcccccactgggtgggccctgggcccctgcctaggcatttcccatctgccgtgaggagagtctgtgcctcgcccctcccacgtcccatctccctgatccctgggatgaggaccccaatgccgagcacccaggcaccctccctgatcctccagcccagccgtcacagcaacgccatctctccttcgtgcaggcagcgttcttgaagacaagcaccaaggcatggtccattaccatctgctgggccgcgacctcagctgggcgaagttgagcgcacatttttgacgtgacccactttctggggtaactctgtctctctctctctctctccctgtctttctctcctccccatcctcctgaagtcatgttcagtgctgcccctgtcctctgccatctccatggcaacgttcacgtggatttcatagaacagaaggtgtttctgctggaagggactttgaagattggctcctcctgcccacttatttcatggagaggagagcaggcccagagagggaacaccagatgcctggggacacacagcaagccagggaccccaccaggcctctggccttctgacaccactcccacccaagagcacagacagctgagatccatagcactgacttctcaggaggtgttctggagcagctgagagagggatgggcctctttggggccttgtcacagtcccggaggccagcccttcccaccctctctcctcccccgtgtgcatctgtgggacagcctggccacagcagcctcttccctcccctcaggtgtttggcactctggagcaagccaagaagtacatgctggacaactactcagcagtcaggtcaccatggaggacgtcttcctgagcttcgcatgccctgtgcccctggtccaaagcgaagaccaacgagagcaagcagagcaggtgggctcctcatcgtgctcgctgcctccttccctgcctccctctcggctttcctctcagtctccctccctgcctccctctcagcttttctctcggcctccctccctgcctcctccctcagagcctgtcctgctgtaataaggacagaccagtgccaggttggcccaggtgtgcatggccttccctgggtttccagggcgtacagaggcagctctcgacctagctagctcagcacagggctgtccccctaactgcagtgcacggagcagagtggggcccactggagaacttaagaggcccgctggagaacccaggtgcgtttccttagaaagggatgcccaagtcccacctgagtagcctgtggtcttattgagacctggctgtggaagcagcctcagaacatcttgcatgtcctttccaagggcggtggccatggggtgactacagtactaaccatgacccgaccaggtgccaactctgtggttggtcccctgcaggcattgcgtcatttgatcacatcaccctcaggcccggccttaaggggtctgtcctggtcatccccttgctcatgggcaagaagtctgcagggcagagggaaatgctcacccaaagcttgcgctcttccttctctagaatcccctgcccagatggtttgtccatccagtgcactccctcccagggcaggccatgccgcccaacgcaccctgagatgcgagatgcagcaaagcagtggctctgcagaacttcgggtagagtttggatgggtgcgtggaggtttccacacatgtgtgcagatcccttggaaagcaggatagagccagaaacagagaggagggtgcccgtaggccgctgggggctggctcccatggtcacatgcaagagtgaagcttcatggagaccatgattctaaactcacacctggcctcacaggtggtaatgtcactgttcttctgaaggaaggaggaaataaatattgacaagtttgctagcctaagtcgggatgtcacaatatttaaatatttggatgtgtgggctttcatcctcttccctggctcctgcaaatttagggctgcatgtgatcctatatccacccatgaagtggacagcgccccacctcccacatgggtagactggcttagaggcagccagtaacttcccacatcaacagacaggggagccagggttgcactggggcagaggttctcgcagtggggtcccagcagtagcagcaccatcaggaaacttgttagaaatgtaggttcttgggccccacccaaaacttactgaatcagaaatgcctggggcagggccagcaatccatgttgcaagaagccctacagcaggtactctggcgcagctccagcatgagaaccactgagcagaggccccatgggcgccagaccatcacactgtccagatgcagatggatgtggccacatgcctttgtcatgtacactcacctctcttctgagacgggctccatcccgtggcctttctctctctgtggagttcactctgccccttgccacaggcccctcagctcctctctgggaagtgcagatgctggtctctgccccttctcagccaggactcaggaaagggtcatgcacaggccttgcctatggttcctgcaccccttgcccagaacaacggcgttgcacacccatggtcgccaacccaccctcctcagtcctcgtttcaggtgactgctccctgtgatgaaagccactccctgggctcccatatccagctctcattcctcccatgcccctctctgcctccactgaaggcccatcttcttctctgaatgtgggatttctcaggctcccaagctacttcactttcccttctctcccctgcccctcactacccataacgttttcaaccgacacctcattccaccaggaatttccctgagctcctaacagtttagacttttccaacaaggtctcaccttcctgaagcccagtgggaaacgggcccacaccctggaggagccacttatcaccccagggcagccctggaggctcccactgccagtgcagggtgtggggcgagagcaggcatggctgcagtcaagacaactcctgctccctgaaaaagaaatttgcctgtccatgttgaaaggagagtgatcaggacacaaagcacaggatagagctaaacaacaacctagggaccaaggatgctgttctagattctagaggcagctggtgtggctaatgtgctcatggctggctctagttgattaatcccttcaagatgctatggaagctaaccctgaaagtgcacctctgccctagggggagacaggtaacagtgacaaagtaggaaacagtaacccaggaggacaaaagtgagataaggggataataaatctgggggctgagaacatgggacatctggggagcaggccccaaactcgctcagcctgtcctctcttcaccctccttcacccgcttcctgattccgggacagggaatattcccaacttccagaccctctctggggccacggactcttctgtaccctgtgctgtgatcacctgtttactctgtctcttgccccaggccggctgaagcctgcacgccagggctcctgtctgtgtgcccagggcaggcccagtacttgaaggagttctatggggacccggaaggatggaagggtgcagactgagggaagcgtgagggaggggtgggcagccttggcccaggcccctgccttccccaggaaaagccccctctgtcctccaccagacagtcaggaggctgcgagtcttccccttgacagcctgtgccgtaaaaggggtgcggtgtggctgactcctgaaggacagctcagatgggcactgcccaagacaagagtgagcagatacgacacttcccgcggcgagcagctccaggtagcagccgaggaggccagacagggggcagcatctggccaaagtgatggggagggcttgccccggggctggagcactgaggcgtccagggtgcgccacgtttcgcgggaagaaggggtcagcgttccgcgggggagacttcccagcgtcagctccgacctcctctttctctaccacgatcccggccagcatccccgcccagcagcggctcagccacaaacccaagggtctccacctgaagcaggcggcggaagggaaggccgtgcaagctgggggtgagggtcgcgggcccaggagcgaccccgggacccgggcagggcacggcctcgtcttagaagcgccacgtcgaggctgtcccaggctggatcacggccgcgactgcgagggacgccaaggagtcctctttcccctggccgcaggcgtgcgccttcgcagcccatctggcaccgcagatgccggtcgccggggtcagcggcgaagcccgaacccatgcggccgggaggggacgcccacaaacccctgcccgccggccgggaagcgctcctacgggaccccagccccgttggggaggcggggcggccacgcgggttccaccaatcagcggccaatgttcgaattcgcgtcctggcgcggccaatggcgggtcccggagcaggcggggagggcgtggagggcggtaaatgaggcgagcacagggcgggacatgggcggggccggcggcggcccccccgggcaggccaatgggagggccgggtgcgtttgaaaactggggtgggcggcggggcggggtctgcgcctgcgcgagggctacgcgcgctccggccggggcgcgggcgcgctctcaggcgggctccggcggcagcgacgcgagcgcggcgatggggagcggcggcggtgagtgcggggcgatgtccgctggtttctgccccacaccccttctgcctgccctgcggggcggacggtgggtcccgcgggaggggaggccctggcggcctgaagagggctggctcgagctctttaacccggggcggatgtcgcgtcccgcgcagggagccccggcggccgggcgcgcggtttaaatgcccggcgggcgcccgagcccctcggagccttcccccgcggcgacgttttccggccctttcctggggcaacgatcgggtcccggggcagcgatccggcgatcgggtcccggggcggcgatcgggtctcggggagccaaacaccagcgcctcctggtcggggaaagggctgcggagcgcgtgggggcgaagcgatcccgcagcccggccgggccctgaccgagcctcagtccagcggggccgtggacctagctctgtggaaagcagcgttcggccccgcgcgcgttgaggcacaggaaacacgaactgtggtttcagctattatcatagtatctgtcctggagccggagaatgaggaatattttatggagaggtctatagaatctttgagaattcgtcgccctggaatacgtttggcttttgcagctgatttaattgctaacaggaagaccccggtcaagagaggggagccgggagcaatcgctaggaagtcctagcaaggcggggagggatttgggcccacagaggggagtggcgcttcctttcaggactggaaggaaggatggatagaaaggtagatttgtagatggggaggcaggatcctgaggttcctgtctgagggcttctgtttccctgtgaaataagggctaaggtcatctgcttagagtgaggaaggggttgctggagtaggagttggaaaatccggctgtgggaagaggagagagcacatctgagaagcatgtccgggctgcctgcctggtgggtggaatgcccgtctcacctttaatgattgcatc

SEQ ID NO: 1857 - DNA, 6000 bp, Homo sapiens
ggctcatgcctgtaatcccagcacgttgggaggccgaggtggggtgatcacctgaggccggtagttcaagaccagcctgaccacatggagaaaacctgtctctactaaaaatacaaaattagccgggcgtggtggcacatgcctgtaatcccagctactctggaggctgaggcaggataattgcttgaacccgggaggtggaggttgcggtgagccgagatcgcaccactgcactccagcctgggcaacaggagtgaaactccgtcttaaaacaaaacaaaacaaaaccaaaccttatgcaattcctttggtgtagtgtcagaaaaataaaagccttatgcaagtgtggccaggcacagtgctcatgcctataattccagtacttcaggaggccgaggcaggaggattgtttgagcccaggagctcgagaccagcctgggcaacataatgagacccccgtctctacaagaaattaaaaattagccagggttgggtggtgcacccccgtggttccagctacttgggaggctgaggtgggagaatcacttgagcttgggaggttgaggctgcagtgaatcgtgatcatactattgcctgggcaacagagtgagaccctgtctcaaaaataatcaaaacacaggctgggcgcggtggctcacgcctgtaatcccagcactttgggaggccgaggcgggtggatcaccaggtcaagcgattgagaccatcctggccaacgtggtgaaactctgtctctactaaaaataaaaaaatcagctgggcatagtggtgtgcgcctgtaatcccagctactcgggaggctgaggccggagaatcgcttaacccgggaggtggaggttgcagtgagccgagatcgcgccactgtactccagcctggcaacagagcaaggctccgtctgaaaataaataaataaataaataaataaaataaaaaaccttattcaagtgtgaaacatagcatgcaaagattagcacacatgagatgtgaatgtgccgtgcagctatcgtacttatgagacaaacccctatgcacccagcacctgggtcaagaagtagaacatagccagttccgcagaagcacccatcacagtccccttcctcccattaggatagccacgtttgcacttgtggtcgtcattccctcgctttttttcttttgagacggagtcttgctcttgtcgcccaggctggagtgcagtcgcgccatctcggctcactgcaacctccgcctcccgggttcaagcgattctcctgcctcagcctcctgtgtaactgggattacaggcgcccgacaccacgcctggctaatttttgtgtttttagtagaatcggcgtttcaccatgttagccaggctggtctcaaactcctgacctcaggtgatccgctcgtctcggccacccaaagtgctaggattacaggcgtgagccaccgcgcccggcctcgcctttccttttgtggccgaaaccgcatgagtgagtcttccttggagagtctgggcggagccgcgggtgctgtggcggcgacgggacacacgggggcgcgcgcggcccgcgcctggtcgcgcgggtgggactcgcgggaaccgggtgcctgggcggcggctgggaggattcctcctggaaggaggtcggcaaagcgctttggtccggaaccctgtgggcccgtgcctcggtccctgtgaccccaaggtggttagaggagtccgggcttctttcctcctggggcctctttttggcccagactgcagcgttgaaaactgcaacagactgtacagatgagggggtcttactattttattattattattattattattattattattattattattattaatttgagaccgagtctcgctctgtcgcccaggctggagtgcagtggcgccatctcggcacactgcagcatccacctcctgggctcaagcgatcctcccacctcaccctcttgactagctgggagcacaggtacacaccaccatgcccagctaatttttgaatgttttgtagagacagggttttgccatattgcccaggctggtctctaacttctgagctcaagtgacctgcccgcctcagcctgccaaattgctgggattacaggcgtgaccacctcgcccagcctgttattctgaaacaatgagtaagcccctactgtgtgttcggctctgtgctaagcacttcacaggcattttctcatgtggtgctcatactccccgaggaaggaggaactactattattatcactttatattttttacagggtctcactctgttgcccaggctcactgcagcctttttttttttttttttttttgagacagagtctcgctcttgtcacccaggttggagtgcagtggtgcgatgtgggctcactgcaacctctgcctcccaggttcaagcaattctgcctcagcctcccgagtagctgggattacaagcgcctgccatcacacccagctaatttttgtatttttagtagagaaggggtttcaccatattggccagcctggtctcgaactcctgagctcaagtgatccacctgcctcagcctcccaaactgctggggttaccagcatgagccactgcacccggccctcactgcggcctttaactccagggatcaagtgatcctcctactccagcctcctgaggagctgggactacaggtgtgtaccactgtgcctcactgctttatttcttctttcttttctttttttctctccctttctttccttccttcctttcctttcctttctttctttctctttttctttccctttcttcccttccttttctttcttttttctttcttgagacagggccttgctatgttgcctagtctagaaaactattatttttatccccattttacacacgcagaaactggggcaggcaggatcgcagccctagtttccctcacaccacgcacttatctgctccatctacttatttccatttacatatatttatattacagcctttcctcacacagtgaaatttacatcggaagcatgtgtttccatgcttttttttttttttttttaattatcattgtgaatcagactttaaaaaatgggcggttggaaggggacctgttggggagatggggctggcagaggtagccctaggcagctggggaggggcctgtgtgtgccccaggcctcctgggggccagtctggagtcatcaacaaggatcctgcctgagtcactggggcacagccgccagagatgcgaaggacaaggaaaggtgcaggcaggtgggctgccgcccccagccaggatcccagcctctcctcccccacactgctgctccatgcacagaacgtttacagagggtgcaggaactgaatgggtgggaagctttgcagtccatgacctgtcagagacttggggaggatggagggtttgggggactggttctggaggccagggctagaaggagcaggtagtcaacaagtaaactcacaaacaaaagatagaacatcggacagagatcagggcaatagcaaaaataaggcggaaggagaggtgagagtgagaaggccagcgtttgggggagggttggccggaagcgtactcctcccacccagttaaacagataaagagcccctcggtgagggaaggaacaatccctagcccgacttgctccgcgagggcccctgctaatcactttaggggatcatcccagcgtcctcagctgtttttttttttccaggagaggagactaatccgaagctcagaaaggctcagtgcattcccaaggtcgttcagccaggagagcgctgaagggatctgagctgagagcaagtctcaaactcagagaatggaggagctgccccggaagtggctgctcgaggctgcagtgaactatgatcctgcggccaatcgcggtggctcacgcctgtaatcccagccttctgggaggccgaggcgggcggatcgcttgaggtcagaagttcgacactagcttggccaacatggtaaaacaccgtctctacaaaaaaatgcaaaaattagttgggtgtggtggcgcgcgcctgtggtcccagctactcaggaggctgaggtgggaggaacgcttgagcgggggaggcggaagttacagtgagtcgagatcgccccactgcactccagcctggacaacagaatgagaccctgtctaaaaataaaatacatgagccgagtgcggtggcgcgcgcctgtgatctcacatactcggcaggctgaggttgggagaaccgcctgaacctggggactgcaccactgcattccagccttggtgacagtgagaccctgtctaaaaaaaaaaaaaaaagtatctgaggcctgttggcagggaagctgcaggcaggcgaggtcaggccaagcagagtcctgcctatctggagagcttcctggaagaggcggctttttctggctcccgaagccgtgcgctaggggttgggggtcgtgcgtctggcctcccaccgcgaccctggttcagaacacggccggagtgagaaggggggtgccgggacccaggaggccgtagggacttcctggtcctacccggagtaaccctggggctacgcctgctccgagcaccgggatggcggtcccttttatggacccaaacactacgccagcccagcgagggcggtgggtgtcgggtgcgaggcctggagggcagtgggcgtcccagggactgggcggctgaagccccgcgcagcgactcagaaccaggccgccacccacgccccgggccagcgcggagaatcctgtgcgcctgcgcagtgagcggcggggcggctcggcggcgcgcacgcagcacgaggggcggagcctcggagcccgggcacccctgacgggctgcactggggagggggaggagcctcgaggccggtttggaatttttggcgcgagcagctccgcgcgcgttcacgggccgttccccctcacgggagtcctccgcccgggcgtccggaacagtcgacggcagactccggcccgctgagccacccgaggggtcccgtggcctccgcggacccggaatctgggccctcgcggacccgcgccccgcccagtcgccccaggtgagcccagaccccgccgtgaggggcctcggcgtggccacctcgccgctcccctccgcctcgccaggtctgcgttacccctgcccctcaggcctccccggcggcccgctcgcgtcccctcaggcccgcccccgcgagcccctgcctcccgtcctccccaattcctggttcccttgcctcgagccccttcccagcggcggtcccgccctactcgcccctcccggagaccccgcctgctgtccatcaaccccgcgccgccgccctccccgtgacagtccttcctccgtgacagcccctgccccgggacagcctctcttcttctgcaacagcccctcttccctcgtgacagcccgtccactgctctgttcgccagggcttccccacacccacggagtgaagtcagccgcggccctgcctgggaggaacttaccgtctaccgggaaaggtggccagcagatgtgtcgggcctggtgagagggtgaggcgagacggcccgatcgcccagggccccggaagctgcggaggtcacccccgcctggccttagctcagggacaccctggattcacgtgggagcccctgctcctgcctcccccgtcccaccactgaggctgttgggccaggccagtcatgctagaacgtaagtcgtagggcagggacggtgggagaactgggttaagatgcacaggcccaggtccccgagtgtgccagggttgggcctggaggctgtgcttgtgaccagtgacctccaggatcccaacaccctggctcctgacttggagaaaccctgggctgggactctgaggtagttagagtcagaggaagagtctccacaagatggagggcagcctgccagccaggcccaggtagcatcgctcccctcacccctgtactccctcaggtactgg

SEQ ID NO: 1858 - DNA, 6000 bp, Homo sapiens
acaagcatgagccaccatgtctagcctaattcatatatatatatatatatttttgtgtgtggagatggggtttcaccatgttgcccaggctggtctcaaacttagtttttccttgtaatttggggcatggcagttgcactcagtggtaaaccctgaaagctttcccacttagaaaaaattgttccatttttaaatagttaataaaggtgtgtttctaaacatagagataacactggaaaatttgaaactgtaatttcattccttgagagggttctaacttcctttactagcagctgtgaaccatgtaggatgtgagaaattacaccctaatcatctatttcctagccatgaacagttcaacctcggaaaattctaagcccaggctcattagtagccagtaaaatctggatgttatgtgagtcatgaataagaccagagtagaatgaacaagtaaaggtttactgtgtatgtatgaagatagggtagaaatatatcggttttatttttattttttgagacagggtgtcactctctcgcccaggctggagtgcagtggtgtagtcaggtctcattgcaaccttgaccctcccaggctcagcccccggagcagctgggactgcaggcgcatgccgccattcccgacagttttttgttttttgttttttgtttttctttttttggtacaggtggggttttgccatgttgcccaggctggtctcaaactcttgccatcctcccaccttggactcccagaggtttaggactacaggtgtgagccaccatgcccaacccatttgcaacttacaatccattgtaagttgaggagccatctgtattgtaaatctaatagttggtgccaggaactaagtggtcaggtgtaagtactgttttgttttgaaaagctgttacagttagtgatacacttgagagtggtgaggaagcccaccacacccgtcattttcctgccttaagatacgcagtacatcataactgtgtgtccgtcagagcttagtttacttgtacactgattttcagcagggactatctgaggaaggggaagatggcacttgcataacttggaaatgcctgcagttgattctgatgtgcctgtatgttagatggtagtgattacaggatctgtttcctaaggcttttggtgggaatgagctagcagtcggcacttagggctcaataaaaattagttaaagcaaattgctaccccctccatcccccactccctacacaatatggatttgtgagtacttttatccttgtctggcccataatagatactcaatacatatatatatgtattcatttttattaatttttttttttttgagacggagtttcattcttgtccaagctggagtgcagtgacgtgatcttggctcactgcaacctccacctcccgggttcaagcgattctcctgccttggcctcccgagtagctgggattacaggtgtatgccacacccagctaattgttttgtattttcagtagagacagggttttgccatgttggccgggttggtcttgaactcccgaactcaaatgatccccccgcttccgcctcccaaagtgttgggattacaggtgtgagccaccgtgcctggctgatactcaatacatattgataggattgagttggagtagttacatagcagatggagacacatttgttgaatacgccaggagttctttaactgacactaaacaaattattctcccatttcctcccataaactcctcaacaatcctctcaggtagatggtatatcatttccacaatttcagtggaataagtgcaggcacagcttgtaataagccaggagttaaacctaggagtcagctcagttccaggctctgagaagtaccccatgcagtcacctccttcttagggtggcctgtgaacttgatactctcagtactacctggcttcctctgaaaactgagtaatttttccttaccttatccttaaacttttcttgaaaatggaaaagcaaaaaaaagttaatctgtattgtgttgaagtacagtttctgcctccttccaaaccaggttcaaatgcgtttcccccctgtttgttaatgtcctgctcatcccacagcttggggtcatcttagaccttttactctccctttctcccaactcctgtcaggtgtagcccccatcccctcctagttgtattgcttggttgtctccatggcatgctttcttgcagtggtgatgtgggtcttcctgcctgtggggtcttgcccactctagttcatgtagtttaagctgcaagaaaaagatcttcctaagtgacagtctgagcctgtcacttaaaaaaaaaaagaaaacaatttggttgtcctttacctatcagggacaggaaattactttactcaacatttgatgctattgaaggttgggcccaaaacactttctcttgactcttacaggtattgatcctttccgggcaatgattttacaggttacaaattcattattttttcatacttgctgtgcatgattcatatgatttaattctttagtatcgttttctgtcgtggagattctttaaagcaggggcacgttcatattggagtataatttaggtttgtctgtatctgacaaactaaaatccaaaaagcagacttagatatttggttattagtatgtatttctcctacatctcttccagtaatgtcataagtaaatttgcagtgtggcaactggaaactggattgttgcttggttttagagttctagtataggaaaaaactggcatcattggaatcaccttttctgcagatatttttaatggcttatatatgtttcaggactttatacacatgtcatttatcttataggtatctaatttattcagggattttgataacatgagtatggaatattaaaaagggctaatcacaggctggatgcggtggctcaagcctgtaatcccagcactttgggaggccgaggtgggcagaacacctgaggtcgtagttcaaaaccagcctgaccaacgtggcgaaaccccatctctactaaaaatacaaaattagccgggcatggtggcatgcacctgtgatcccaggtactcaggaggctgaggcaggagaatcgcttgaaccggggagatggaggttgcggtaagccaagatcgtgccattgcactccaactccagcctgggcaacaagagtgaaactcagtctcaaaaaaaaaaaaaaaaaaaaagggctaatcacagctttcttgggctgggttacctagagagaatcacgggaagtagatgtgtatttgttgagcacatctctaatttgatctgtgctgagctgcaaattactttgacagtatctgtgaagaaaaggtttataaagcaaatcaaaagaataagcatgtttttatgaatacattgaaactactgaaaatgtttcaaaattggctgtaattagtagaattttgaaaagtaggttaagcagagacttctaacttgaaggcctgagttagctgccattgatctggggttattgattgaggcttgtgtcgtgttattgaacttctgtttttactgcatattaaaagataagtgaaatggatggataagtatcaatttttaatagaacttctttctgttaaacagcacctgtggaatcctctcaagaggaacagtcattgtgtgaaggtaatgatgtactctttgaaagtctacttgagaaaacattaggttgtctatatggtgtgtaaagctagatactgtttggtaaatatatattatatttcaatctcttgtctaggttcaaattcagctgttagcatggaactttcagaacctattggtaagaaaatttctgaccatattaatacagtaatatgaaactctttcactctcaagatttaaggtgcattatgtaagttacgattattgtaatgcctacatttaagacacattgagtctttgctattagtatttagaaagtagaacaaactaggcactaacactgccttgataaacttaatgattgcaaataaaattgagtggaggaatggtcaagtcaatttaaatacctgtacctgttctgttttctttttttgagacggagtcttgctctgtcgcccaggctggagtgtagtggtgcaatcttgggtcactgcaacctccgcctcccaggttcaagcgcttctcctgcctcagcttcttgagtagctgggattacaggcgcacaccaccacaactggcaaatttttgtatttttagtagaggcggggtttcaccatgttgatcaggatggtctcgaactcctgacctcgtgatccacccacctcggcctccgaaagtgctgggattacaggtgtgagccaccatgctcggccacacgttctgttttcttggtgaaaaatgttcttcctttttataactttattcttaagggtttcacgttctcagcgtgattaaagttgatgccaaagttttattagtttaagaggaaaaagaaaatatttcctaaatcctttcatatttctcgtgtgtcacgattttaaactttcctttttttcttactatcagggtgtctcaacactggaataactaggctgttgggaatgttagaactcttgtttgcattttgtttgccattatgaaaatgaagctttgctaaaatagcaatctcagcctgtgagtcagtgccctctgatgtgataccagcagtgagtctgccttgaaagctgtcacccatttctgctatgaaagaggttttcctgcttatgtgtcactaggcattaggaaatggaactacatatgcaaacttccatttgttgttttaaagctagtgtattttaaagtatagattgtaagtctttttcagaatactaagttaaaatgtctttcttcagtagaaaatggagagacagaaatgtctccagaagaatcatgggagcacaaagaagaaataagtgaagcagagccagggggtggttccttgggagatggaaggccgccagaggaaagtgcccatgaaatgatggaggaggaagaggaaatcccaaaacctaagtctgtggttgcaccgccaggtgctcctaagaaagagcatgtaaatgtagtattcattgggcacgtaggtaagctgctctcatagcaattaaagttactggatacataaaacatagaacatcctttttagctacctggagatgtttagtgaaactgaaggaaattaattgaaaatgtcttgatttttaacttgctgattttttttagctggcaaaaaattgcaagtacttttttcctgaagtttaggcaaatgaataattctgtaacggcatagatgctggaagaaaaacttcagtatattgtacgtaacatataattagtctattgaccattgatggtagttcagcatagtattatatatcagtatcttagaaaatgtgcccttttttatgtgaacctcagttaacttgttaattttaatgggattgaccttaccagataattttgtgtgaagcaggaaatcaataatttggagtaacttctggatgcttgccaggttgctggtttagcaaaaaacaaaagaacaaatttatttaatttactcagatattctctaattatctggcctatccccagaattgtgagaaaaaaaatacagaattatgtgtctttcatttcagctatctctgccttccccccagatatgaaacactgtaccccttcttttagtagcaagaactcttttgaaagtgtaaaggagcggctgggcactgtggctggcgcctgtaatcccagcactttgggaggccaaggcgggcacatcacgaggtcaggagttcaagaccagcctggccaacatggtgaaaccccgtctctactaaaaatacaaaaattagccaggtgtggtggcatgagcctgtaatcccagctactccggaggctgaggcaggagaattgcttgaacccagaaggtggaggttgcagtgaggtgagatcgcaccactgcactccagct

SEQ ID NO: 1859 - DNA, 6000 bp, Homo sapiens
tgttcctctgtatcctttgtaatgtcctttatgggtaactgtaagtaaagtgtttccttgagttcttttttttgagacggagtcttgctctgttgcccaggctagagtgtggtggagcacttggctcactacaacctctgcctcccatgttcgagcgattctcctgccttcagcttcctgagtagctgggaatacaggcacccaccaccacaaccggctaatttttgtatttttttggtagagacagggtttcaccatgttggccaggctggtctcaaactcctgacctcaggtgattcgcctgcctcggcctcccaaagtgctgggattacaggcatgagccaccgtgtttgccctgtttccttgagttctgtgagccactctggcaaattccctgaacccatggagggggtcatgggaacccccaattcatagccagttggtcagaagcacaggtcacaatgtggaacctgttattggcattggaagtgggggcagtcttgtgggactgatcccttaacttgtgggatctgtcctaactctggttaatgtcagaattgagtgaaatgattgcttatcctgttggtgtctgttgaagaattggttggtggtgggtagaaactccctcacttactggtggagtacaactggcccttaaacaatgtgagcctgaactgcgagggtcccacttacacatggattttttttttcaatcaaatgaggatcaaaaagacgggattctcaggatgcaggaactcaagtgtagggagggctgacctttcatacacacagtatagattgtgggattttagtatggttggatttttgtatctgaagggctcctggaactaatccccttcctctacccagagaggactgtactctgtgttgagcggtgacttgtgtgtgagagtaggaaaaactctgatttttcctaagttttctaaattattagtcctggggtggggtgtggtggctcatgcctgtaatcctagcacgttgggaggctgaggcaggaggatcacttgaggtcagtagttccagatcagcctgggcaatatggtgaaaccctgtctctactaaaaatagaaaaattaccagggggttggggagggggggtggcgggcacctataatcccagctactcaggaggctgaggcaggagaattgcttgaacttgggaggtagaggttgcagtgcgtgaagattgctccactgcactccagcctgggcaacagagcaagactccatctcaaaaaataaaattaaattaaattaaaatagctaagtgcggtggctcacatctgtaatcctagcactttaggagcccaaggcaggcagatcacttgagatcaggagtttgaaaccagcctggccaacaaggtgaaaccctgtctctactaaaaaaaaatacaggccaggcgtggtggctcacgcctgtaatcccaacagtttgggaggccaaggagggcagatcacaaggtcaagaaattgagaccatcctggccaacatggtgaaaccccgtctctgttaaaaatacaaaaattagctgggcgtggtggtgcacacctgtaatcccagctactcaggaggctgaggtgggagaatcgcttgaacctgggaggtggaagttgcagtgagctgagatcataccactgcactctagcctgggcgacagagcgagactctgtctcaagagtctcaagttatttaaaaaataaataaataaataaaattattagccctatgtgtcagcagtcttaaatgagtatcaaaggacagtatcatcccagctaaattgattaagcaccttttatacaccgggcattacactaggcagtggaaatgtaaagaagattaaggtaagaccctgccctcaagtcgcacaacttacacacaacttagcacaactaacaagaaagacttttcccttttccgctggagctctgtttggcaggtcaaagctttggaaaaccaatggagtggattttttcctgaatatccataattatcctattcagagacaaggaaattaatgacatcaactgcttttctaagcagcagtctgagcagtttctgcctttgtccctagaaaaagtaccaggcagaaggaaactctgctaattcaattagatgtgaagaactaacctatgagaaagtgatcattcagtgctgtaggagtgctacatggaggagagtagtattcaaagacaaaatgcttagagaaggatgtgtagttcattatttgagtcagctgattgtgttgacattttcttaggggtgggtgggtggggagtgaaaatctggaaagagaaggcatttcatttagaacacattgtattttttcttgtgaatataagatgaaaatcttttattcaatagcaatacaggtctcgcataaatgaagttctaattttcataacagttgttaagttctctgtaaatctgacagtcacttaataccaactttaaaatggacattgttaagtatgattcagtgaggtcttcaggtataataataggctataaccaaaacttcctattaagcagaggcaaactctgccgggtgtggtggctcacaccgataagcccagcactttgggaagctgaggcaggtggatcgctttttttgtttgttttttgagacagagtctcgctttgtcgctcaagctggagtgcagtggcgcgatctcggctcactgcaggctccgcctcctggtttcacgccattctcctgcctcagcctcctgagtagctggcaatacagacgcccgcacaccacgcccggctaattttttgtattttcagtagagacagggtttcaccgtgttagccaggatggtctcaatctcctgatctcgtgatccgcccaccttggcctcccaaagtgctgggattacaggcgtgagccaccgcgcccggcctaacttgtatttttagtagagacgggggttccaccacgttggccaggctggtctcgaactcctgacctcacgtgatccatctgcctcggcctcccaaattgctgagattacaggtgtgagccactgcgcctggccggtatgtgtttttttaatccctaaagcttggtagtttaatattaaattcaaattactgtagcctaggactcttttgaaaaatacttgacagcttcgtttttgacctatctcattaggctgagttctcttttatctttacaatacagatgtttaaaattaaaatacagatcggccgggcgcggtggctcacgcctgtaatcccagcactttgggaggccgagacgagcggatcacgaggtcaggagatccagaccatcctgtctaacacggtgtaaacctcgtctctaataacaatacaaaaaaaattagccgggcgtgatggcgggcgcctctagtcccagctactccggagactgaggcaggagaatgttgtgaacccgggaggcgggcttgcagcgagccgacatcgcgccactgcactccagcctgggctacagagcaagactccgtctcaaaaaaaagaaaaaagaaaattaaaatacagatctagatctggattttgttaggttttttttttttttaacaacctaaggttgttcagaaacatctattctatgtatgtgcttctttagtctgtaatttctaggcagattagttgcaccctgtctagactcctttcagaaaaatactaacaatatgtttttctctgtcttgggctccacatgggtgaattacaggaaagcttaacaggtactcagagcaacattttttcctacttcatgaagggcctaaatgcgaactcttaagtatttctcgtttgcttttgttcttttcccaggtttacctaatctgtaagtgtaagatgcagtcgatgaaaagtactatgggaattcttgagcaaatcagaccattcaaaaggaaaccacttcacgtaatggtgcataaggaagctagactcaccaaaataaccctgttaggtaagccggatacaccatggaatacggcaatcctctgtttaatttgcaaaccctttggcggggaggaggaaaggatggaaaaatttgggtgaaggctttatatgactagtcaaacaaacggtgagtcattgaaattttccagttaacaatcccttctgcctgggcagagcctgggccccagcgctttatgagccacactgcagttttaagccggaatatctcacggttttattgtttcttccacgaaatgattacataaaatgaaatcagctttgcaatctgcaccggctttgaaatgaagggcaaaatctggctgggggtgaggagaaagaaggtggagagagaataaggtacggagactgtgaggcagagaacgcaggaaaggtggtgaaaagagagtacaagaattttcgggagctgagtgtatttttcttccccatgttatagatgctgtccgttttcccccagcctgtgtccagcaggccagagtggacccctcctatgggctaaaatactctcggtcttcggcccagcacagagctgcaccaaccagggcctgccgctgcccccccaccaggtgacaggtggggccgccgagcggccaccagacctccgcctcctcgcgttgcctgccgggagccggagccgcttccggttgcgccctgtccctgaacttcgactcccgtcggcccccgggaaaaccgcagcggggtagcgcgggcgctgccggaacttgtagttccacctcccgccgcgctaaatagccggaaacgggggcggccagaacagagaactaccgaggcgaaggtacgggtggcggcgaggggtcaatccgcgccgggggtggggttggctgtgaggccgtcggaggtggttgggtgggaggagatccgctcacacacacgaggaggagggttgagctgccgccgccgccgcctctgtcgtcgtcgcgagtgtggagtcgggactggagctgctgccgcggcgacgccggggatctttgtcgctagctcccggcccttctgccccgccgccttccctcagtcagcgttgcccactcctctccggccgggcgcccctgcctccatttcccgctctctgtccaccacacacacggcccccccgatcatggatccgggcagtggcggcggcggcggcggcggcggcggcggcgggagcagcagcggcagcagcagcagcgactcggcgcctgactgctgggaccaggcggacatggaagcccccgggccgggcccttgcggcggcggcggctccctggcggcggcggccgaggcccagcgggagaacctcagcgcggccttcagccggcaactcaacgtcaacgccaagcccttcgtgcccaacgtccacgccgccgagttcgtgccgtccttcctgcggggcccggcagcgccgccacccccagttggcggcgccgccaataaccacggagccggcagcggcgcgggaggccgtgcgggtaaaggcccgggacgcgggaggaagtccggccgggcgccggagcccacatggcgtaggggtgcggtccgggggcgcgcggccctggggcccggtcggcacgtggggcgctgacagtggcgccgtctgcctgggtggggcgccccgagcccgggagccggccttcgcggggcggcccgcggcggtggccgggcggggagcggacagcgggcagcgcgcccaaagacccggacccgagtgccgcccctccgcgcccctgccctgctctggagtccgcagttacccacttgagatgggaaccgtatggaacggagtgggggccgcggcggatccctgccacgaggcgcagaatgaggacagatggagccaggagtcatttgggtgggcgtttagagatcccaggagttggggaggacgaatggccgagttttcctttcaccttaggcccagccgagagagcgtcttctgctgcgttttctactattgaaactgtaattacggtttaaactgtccgtggcccccaaccgtcctgaaggaatcccaa

SEQ ID NO: 1860 - DNA, 6000 bp, Homo sapiens
ttacaggcatgagccacagcgcccagctggctattatatctttaacacatctccaagctttcctcatccgcattttgaacagggagggcttcagcaggtaatagcatctggcctacatgtattttgtttcttttgtatatgttttgttttggtttttgtttctgtttttttttttttttttttttttttttgacacgaaatctcactctgttactcaggctggagcgctgtggggtgatgtcaacttactgcaaactccatctcccaggttcaagcgattctcctgcctcagccttccaagtagctgggattacaggcgtgtgccaccacgcccagctaatttttgtatttttagtagagacagggttttgccatgttgaccaggctgttctcgaactcctgacctcaggtgatctgcctgcctcggcctcccaaagtgctgggcatcagccaccgcaccctgcctaatgatgcaactcttgatgggctcctagaagacgactggtcaccagaaaggccaagtcatgattagaagcttggaacttttagccccacatccaacctctcggtgggcagaggggctgaaggttgagttaatcagcaacgggcaatgatacaatcagtcatggctatgtagggaagcctccatagaaacccagaaggacagggttcagagagcttctgggttgctgaacacgtggaggacccttgaggatggcacacctggagacagaataggaactgtatgccccttcccagccctgtgcatctcttccacgtggctgttcctctgtatcctttgtaatgtcctttatgggtaactgtaagtaaagtgtttccttgagttcttttttttgagacggagtcttgctctgttgcccaggctagagtgtggtggagcacttggctcactacaacctctgcctcccatgttcgagcgattctcctgccttcagcttcctgagtagctgggaatacaggcacccaccaccacaaccggctaatttttgtatttttttggtagagacagggtttcaccatgttggccaggctggtctcaaactcctgacctcaggtgattcgcctgcctcggcctcccaaagtgctgggattacaggcatgagccaccgtgtttgccctgtttccttgagttctgtgagccactctggcaaattccctgaacccatggagggggtcatgggaacccccaattcatagccagttggtcagaagcacaggtcacaatgtggaacctgttattggcattggaagtgggggcagtcttgtgggactgatcccttaacttgtgggatctgtcctaactctggttaatgtcagaattgagtgaaatgattgcttatcctgttggtgtctgttgaagaattggttggtggtgggtagaaactccctcacttactggtggagtacaactggcccttaaacaatgtgagcctgaactgcgagggtcccacttacacatggattttttttttcaatcaaatgaggatcaaaaagacgggattctcaggatgcaggaactcaagtgtagggagggctgacctttcatacacacagtatagattgtgggattttagtatggttggatttttgtatctgaagggctcctggaactaatccccttcctctacccagagaggactgtactctgtgttgagcggtgacttgtgtgtgagagtaggaaaaactctgatttttcctaagttttctaaattattagtcctggggtggggtgtggtggctcatgcctgtaatcctagcacgttgggaggctgaggcaggaggatcacttgaggtcagtagttccagatcagcctgggcaatatggtgaaaccctgtctctactaaaaatagaaaaattaccagggggttggggagggggggtggcgggcacctataatcccagctactcaggaggctgaggcaggagaattgcttgaacttgggaggtagaggttgcagtgcgtgaagattgctccactgcactccagcctgggcaacagagcaagactccatctcaaaaaataaaattaaattaaattaaaatagctaagtgcggtggctcacatctgtaatcctagcactttaggagcccaaggcaggcagatcacttgagatcaggagtttgaaaccagcctggccaacaaggtgaaaccctgtctctactaaaaaaaaatacaggccaggcgtggtggctcacgcctgtaatcccaacagtttgggaggccaaggagggcagatcacaaggtcaagaaattgagaccatcctggccaacatggtgaaaccccgtctctgttaaaaatacaaaaattagctgggcgtggtggtgcacacctgtaatcccagctactcaggaggctgaggtgggagaatcgcttgaacctgggaggtggaagttgcagtgagctgagatcataccactgcactctagcctgggcgacagagcgagactctgtctcaagagtctcaagttatttaaaaaataaataaataaataaaattattagccctatgtgtcagcagtcttaaatgagtatcaaaggacagtatcatcccagctaaattgattaagcaccttttatacaccgggcattacactaggcagtggaaatgtaaagaagattaaggtaagaccctgccctcaagtcgcacaacttacacacaacttagcacaactaacaagaaagacttttcccttttccgctggagctctgtttggcaggtcaaagctttggaaaaccaatggagtggattttttcctgaatatccataattatcctattcagagacaaggaaattaatgacatcaactgcttttctaagcagcagtctgagcagtttctgcctttgtccctagaaaaagtaccaggcagaaggaaactctgctaattcaattagatgtgaagaactaacctatgagaaagtgatcattcagtgctgtaggagtgctacatggaggagagtagtattcaaagacaaaatgcttagagaaggatgtgtagttcattatttgagtcagctgattgtgttgacattttcttaggggtgggtgggtggggagtgaaaatctggaaagagaaggcatttcatttagaacacattgtattttttcttgtgaatataagatgaaaatcttttattcaatagcaatacaggtctcgcataaatgaagttctaattttcataacagttgttaagttctctgtaaatctgacagtcacttaataccaactttaaaatggacattgttaagtatgattcagtgaggtcttcaggtataataataggctataaccaaaacttcctattaagcagaggcaaactctgccgggtgtggtggctcacaccgataagcccagcactttgggaagctgaggcaggtggatcgctttttttgtttgttttttgagacagagtctcgctttgtcgctcaagctggagtgcagtggcgcgatctcggctcactgcaggctccgcctcctggtttcacgccattctcctgcctcagcctcctgagtagctggcaatacagacgcccgcacaccacgcccggctaattttttgtattttcagtagagacagggtttcaccgtgttagccaggatggtctcaatctcctgatctcgtgatccgcccaccttggcctcccaaagtgctgggattacaggcgtgagccaccgcgcccggcctaacttgtatttttagtagagacgggggttccaccacgttggccaggctggtctcgaactcctgacctcacgtgatccatctgcctcggcctcccaaattgctgagattacaggtgtgagccactgcgcctggccggtatgtgtttttttaatccctaaagcttggtagtttaatattaaattcaaattactgtagcctaggactcttttgaaaaatacttgacagcttcgtttttgacctatctcattaggctgagttctcttttatctttacaatacagatgtttaaaattaaaatacagatcggccgggcgcggtggctcacgcctgtaatcccagcactttgggaggccgagacgagcggatcacgaggtcaggagatccagaccatcctgtctaacacggtgtaaacctcgtctctaataacaatacaaaaaaaattagccgggcgtgatggcgggcgcctctagtcccagctactccggagactgaggcaggagaatgttgtgaacccgggaggcgggcttgcagcgagccgacatcgcgccactgcactccagcctgggctacagagcaagactccgtctcaaaaaaaagaaaaaagaaaattaaaatacagatctagatctggattttgttaggttttttttttttttaacaacctaaggttgttcagaaacatctattctatgtatgtgcttctttagtctgtaatttctaggcagattagttgcaccctgtctagactcctttcagaaaaatactaacaatatgtttttctctgtcttgggctccacatgggtgaattacaggaaagcttaacaggtactcagagcaacattttttcctacttcatgaagggcctaaatgcgaactcttaagtatttctcgtttgcttttgttcttttcccaggtttacctaatctgtaagtgtaagatgcagtcgatgaaaagtactatgggaattcttgagcaaatcagaccattcaaaaggaaaccacttcacgtaatggtgcataaggaagctagactcaccaaaataaccctgttaggtaagccggatacaccatggaatacggcaatcctctgtttaatttgcaaaccctttggcggggaggaggaaaggatggaaaaatttgggtgaaggctttatatgactagtcaaacaaacggtgagtcattgaaattttccagttaacaatcccttctgcctgggcagagcctgggccccagcgctttatgagccacactgcagttttaagccggaatatctcacggttttattgtttcttccacgaaatgattacataaaatgaaatcagctttgcaatctgcaccggctttgaaatgaagggcaaaatctggctgggggtgaggagaaagaaggtggagagagaataaggtacggagactgtgaggcagagaacgcaggaaaggtggtgaaaagagagtacaagaattttcgggagctgagtgtatttttcttccccatgttatagatgctgtccgttttcccccagcctgtgtccagcaggccagagtggacccctcctatgggctaaaatactctcggtcttcggcccagcacagagctgcaccaaccagggcctgccgctgcccccccaccaggtgacaggtggggccgccgagcggccaccagacctccgcctcctcgcgttgcctgccgggagccggagccgcttccggttgcgccctgtccctgaacttcgactcccgtcggcccccgggaaaaccgcagcggggtagcgcgggcgctgccggaacttgtagttccacctcccgccgcgctaaatagccggaaacgggggcggccagaacagagaactaccgaggcgaaggtacgggtggcggcgaggggtcaatccgcgccgggggtggggttggctgtgaggccgtcggaggtggttgggtgggaggagatccgctcacacacacgaggaggagggttgagctgccgccgccgccgcctctgtcgtcgtcgcgagtgtggagtcgggactggagctgctgccgcggcgacgccggggatctttgtcgctagctcccggcccttctgccccgccgccttccctcagtcagcgttgcccactcctctccggccgggcgcccctgcctccatttcccgctctctgtccaccacacacacggcccccccgatcatggatccgggcagtggcggcggcggcggcggcggcggcggcggcgggagcagcagcggcagcagcagcagcgactcggcgcctgactgctgggaccaggcggacatggaag

SEQ ID NO: 1861 - DNA, 6000 bp, Homo sapiens
ggctataaaccttggttgggtaagtaacccaaggtaaatgagatcatctctgtaaaactcttagccttgtgcctggcacatagtaaatgcttaataagggttcactgttagtattactgttactgataacatacaaatagattgtattaatggaccataattgcaactgtataaaacaaattccatgtttggccaggcgcagtggctcaagcctgtaatcccatcacttcgggaggccgaggtgggcagatcacgaggtcaggagatcaagaccatcctggctaacacagtgaaaccccatctctactaaaaatacaaaaaaattagccaggcatggtggcgggtgcctgtattcccagctacttgggaggctgaggcaggagaatggcgcgaacccagggggcggagcttgcagtgagctgtaattgtgccactgcactccagcctgggcgacagagcgagactccgtctcaaaaaaaaaaaaaaaaaccacaacaacaacaacaaaaattccatgttgacaaggatgggaatatgagaacatggaaacagctatgaaaagacataagagaattaggaggattttctttaatatatcattttttaaaaaaaaacttgcttgtatttgtttattttttaaatagagacagggttttaccatgttgcccagactagtcttgaactcctgggctcaagcgatcttggcctccctaagtgctgggattacagtcatgagccactgtgccccgccattttttaataaacctttctaatggaacaagtaaaacacatgcagtggatgctcagcaggccttgagtgtgtgaatgaaaaatatttgaacttgtttttactggttgatttcattgcttaaaaaacataccttagctggacgcagtggcgtgcgcctgtagtcccagctactcatctcttaaaaaaaaagttttatgcttgttaatttcataaatgctagagggatcaccctaatcaaataaagctactcaaaaataaaatatgaaaggtgttagtgggatacagctttctagttttttgccactagtggataggttggaatttaaattcttcggatattggaaccagaacaggctgtaactgattatttttgctgtgattcgtgcttactggagcctcgggaaagagggagacaacatgtaaagagaagcaatctgtttggaaaatgaaaatacagttaaattgctaatgaacccttgtcaaaatcaaatgtctccccttagaggctgatgattgtctagtctaatatgcattttttttgagtgggtcaattggactctaagaccaacaagataaaaaggcagccttgcatgtcacttggaccacagctgtctggccatgcagcatgccttcactgctgctgaagaaaagcagctgcttgttgagaatctcaaattctcagatcctaattgcctggccctgactctaagctgaaacctgctactgtctgccttgagctgttttagcctcaacacgagctatgctgaactgaaagcaggcacaggctcaatgaccaggactcagacgttggggccgttggagattaaggaccccctccgtggagcgctaaactatgaaaacgtcctggaacctggctgaaaagggcttattctctaatgggaccatctaagatcaagctgctgataggctctttgtctctaatacagaggctaattgcattcctaacttctaatatttgccaaacgctccaagctggggaagggcacatcgcaaggactatgacctctcctcctgcttttgacagaccagactcaaaccttctctggggcttctctcactgctgttgacttgttgcattcagcttttgggattagttgcagcttgcaacagtggactgacagcctgactctacttccctcacttttctcccagcacacacagcttagtaaggtaggtggattattaaaacgtagctgtccccagaaaggtattaggcttttctagtctgctcattgaataatcaggacaaaaggggtagaagattatgtaaacacattttgaaatttttaaaaattcagggtttcatcctttattagtttgctaaggataccataacaaagtaccacaaactgagtgacttacacaatagaaacttattttcctgcagttctggaggctgaaagtccaggacaaggtgtcgacagctttagattcttctgaggcctctctgcttggcttgcagatggctgccttcttactgtgtccttgtatggtccctctgtctgggtgtctgtgtcctaatcttctcttttaataaggataccactcaggttggattagggcccatcctaacaatcccattttaacttagttacctcttcagggcctatcttcaaatatactcacattttgaggtacaggtagatggttagggcttcagcatgaatttttgtggggacataattcaaccctccacacataattaccaatttctgaatgtctttctggttaagttgcataaaaacgtttatctacttgaactctaggatgatagttaaaaaaaaaaatgttggccaggcgcagtgatggatgcatatgatcccagcactttgggaggccgaggtgggcagattgcttgagttcaggagttcaagaccagcctggcaacatggtgaaatcctgtgtctacaaaaaatgcaaaaattagctggacatgatggcatgtgcctttggttccagctacttaggaggctgaggtaggaggatggcttgagcccaggaggcggaggttgcagtgagccaaaatcgtgccaccgcactctagcctgggcaacagagccagaccatatctcaaaaaaaaaaaaaaaaaagtttatctacaaaaatgcttttgtgcctcttacatacaacccttccagaggaaaggcctagctgagagtaagagatggttgaaaaaatgcaatgttatgattgctgaacagggcacgactgtttttgtaatattggagaaaataattaaagcctggcacctggggaggcttgatccctggaagcctcctcttgctgaaggaaaattcccagtgctgcctttccatgtgctgtgagtgctttgagttcagactgacaacagagtgggtctagcttctatgctttccatgaagatctcccacaaatgtcatccatgctcatgagatggatcaacttgtatcctgaacaagcaaaactgtttgggactcactgccttcaggcagtcccttggaagccaaggactctgggaacttttcagatgggactggaaacacttgggcaggagttcccctggtaggaggtctgttcacctgtacagcctaatggatgtcctgcttgaggtgccctaatattgcaaattctttgtttacaggggtaccacctgtgcccctgggactgtgcttctgtacatgaccacaactctcatgatgtcccctcagccctggaaagcatttgggttagcttccgcttactggtcagagttatactgtgcctgaattgatgcctcaggtcaggttgaaaaaaaaaaaaaaggttcagacagcaattaagggctgggcacggtggctcatgcctgtaatcccggcactttgggaggctgaggtgggcagatcacctgaggtcaggagtttgagaccagcctgaccgacatggtgaaaagtaaaaatacaaaaataaaaaaattagctgggtgtggtggtgtgcacctgtagtccctacaaaaataaaaaaattagctgggtgtggtggtgtgcacctgtagtcccagctactcgggaggctgaggcaggagaatcgcttgaacccaggaggtggaggctgcagtgagccaagatcacgccactgcactccagcctgggtgacagagcaagactccatctcaacaacaacaacaaaaaggaattaaggaggaagccacctggcttcctaagatagactttatggttaatgggatttattttagctggttaagtccaggacccctaccaggaagaactgaggtccatatttgaggttggtctcacccttttgcatgtggtcctactaataataattttgctgtaaagaagcctcaataaggagatggactgtgtgaaaagagatgagaaagcaggcctgtttgcaaggctggcccttggctggcatctgaaagcttggatttcaggagggttctcattactccctaaatgataagagtggctcactgtgcctaaactgttcgtacaaacaatgtgggttatgcccaacatctgctttccttctgggagtcagattttcatatgtgttaggcagaggatgaggtgagcagctcccaatgagaaccctgaacactgagtctgtaatgagcttcccttgtatacaacattgcacatgggttgtcacaactgattgctggaggaattgtgtcctatgtgactctgctgggagaggactgtgggaggcttacacctggtttccctggactttgtccatgcgcttttttcctttgctgattttgcttcctagcctttcgctgtagtaaaacatagccatgagtatgactacaggctgagtctgtgaatctcctagtacatcatcagactaggaggtggtggtgttggcaccccccagcacagggcacaagggagacttgcagggtgtttgtcatgttccctttctcaatctgggtgtggtttacagatttgttcagtttgtgaaaattcactgagctctatgaacaattataatatgtacatttttttctgtaagtgtattaaatttcaataaaaagaattcacactataggggtacaaaataacttaatttttcaaagtcttccttttattcagccaacattttagtaagtacccttttttttttaccaagcactgctctgggagcttgggacatggggtagaaaggacggcatcattgtcctcattgtccttcagcttagctgcaaggcaggtgaaggatgcttatagtatggttgatttttgctgggctctatgaaggatcagagggtgctaaggaggcacagagaaagagcttttaacgtgggtattttactgttccagggttgccactcaagtacctacagaacaaacgggtgtagctgtaaactgtggcaaactgaaagcatgtaggcacagagtaagtagctagagctgatttttttcaggaaaggccacaaatcccaacttttatgagctcctcttttaaatgctgtaaatgttttacaatggcggggcgcggtggctcacgcctgtaatcccagcatttgggaggccgaggggcagatcacttgaggtcaggagttcaagaccagcctggccaacatggtgaaacctcttctctactaaaattacaaaaattagccgggcatggtggtgcatgcttgtaattccagctgctagggaggccgaggcgggaggattgcttgaacccgggaagcagaggttgcagtgagctgagatcgtgccactgcactccagcctgggcgacagagcaagattccgtcacacacacaaaaaaaaggcgtggggggaggccaaacaaaaccccgcaagacacatttggctatgacctgccagtttgctaggcattcttccaaccttccctccctctgaccaagaaactgagtgtccactattttaggccctgggaaattcagtagcgaggaggccagacagcttcgttgcatcatggggggctctggtactgtgcttctccaacttcaggatgtgtaggaatcacctgagcagtcttgttgagaggcggacactgactcgggaggtctggggtagggcctgaacgtttgcctttgcggttctaacaagctctcaggtgatggcgatgctactgttccctggccccgaggtagaggaagatttaagtaaaagcttcctggaggaggcgcaagtgaaccgcaggagctttcccggacgcccgagaaagggagaaaccccgaaggaattcctcctctctcggggctgggtctc

SEQ ID NO: 1862 - DNA, 6000 bp, Homo sapiens
atgcattttttttgagtgggtcaattggactctaagaccaacaagataaaaaggcagccttgcatgtcacttggaccacagctgtctggccatgcagcatgccttcactgctgctgaagaaaagcagctgcttgttgagaatctcaaattctcagatcctaattgcctggccctgactctaagctgaaacctgctactgtctgccttgagctgttttagcctcaacacgagctatgctgaactgaaagcaggcacaggctcaatgaccaggactcagacgttggggccgttggagattaaggaccccctccgtggagcgctaaactatgaaaacgtcctggaacctggctgaaaagggcttattctctaatgggaccatctaagatcaagctgctgataggctctttgtctctaatacagaggctaattgcattcctaacttctaatatttgccaaacgctccaagctggggaagggcacatcgcaaggactatgacctctcctcctgcttttgacagaccagactcaaaccttctctggggcttctctcactgctgttgacttgttgcattcagcttttgggattagttgcagcttgcaacagtggactgacagcctgactctacttccctcacttttctcccagcacacacagcttagtaaggtaggtggattattaaaacgtagctgtccccagaaaggtattaggcttttctagtctgctcattgaataatcaggacaaaaggggtagaagattatgtaaacacattttgaaatttttaaaaattcagggtttcatcctttattagtttgctaaggataccataacaaagtaccacaaactgagtgacttacacaatagaaacttattttcctgcagttctggaggctgaaagtccaggacaaggtgtcgacagctttagattcttctgaggcctctctgcttggcttgcagatggctgccttcttactgtgtccttgtatggtccctctgtctgggtgtctgtgtcctaatcttctcttttaataaggataccactcaggttggattagggcccatcctaacaatcccattttaacttagttacctcttcagggcctatcttcaaatatactcacattttgaggtacaggtagatggttagggcttcagcatgaatttttgtggggacataattcaaccctccacacataattaccaatttctgaatgtctttctggttaagttgcataaaaacgtttatctacttgaactctaggatgatagttaaaaaaaaaaatgttggccaggcgcagtgatggatgcatatgatcccagcactttgggaggccgaggtgggcagattgcttgagttcaggagttcaagaccagcctggcaacatggtgaaatcctgtgtctacaaaaaatgcaaaaattagctggacatgatggcatgtgcctttggttccagctacttaggaggctgaggtaggaggatggcttgagcccaggaggcggaggttgcagtgagccaaaatcgtgccaccgcactctagcctgggcaacagagccagaccatatctcaaaaaaaaaaaaaaaaaagtttatctacaaaaatgcttttgtgcctcttacatacaacccttccagaggaaaggcctagctgagagtaagagatggttgaaaaaatgcaatgttatgattgctgaacagggcacgactgtttttgtaatattggagaaaataattaaagcctggcacctggggaggcttgatccctggaagcctcctcttgctgaaggaaaattcccagtgctgcctttccatgtgctgtgagtgctttgagttcagactgacaacagagtgggtctagcttctatgctttccatgaagatctcccacaaatgtcatccatgctcatgagatggatcaacttgtatcctgaacaagcaaaactgtttgggactcactgccttcaggcagtcccttggaagccaaggactctgggaacttttcagatgggactggaaacacttgggcaggagttcccctggtaggaggtctgttcacctgtacagcctaatggatgtcctgcttgaggtgccctaatattgcaaattctttgtttacaggggtaccacctgtgcccctgggactgtgcttctgtacatgaccacaactctcatgatgtcccctcagccctggaaagcatttgggttagcttccgcttactggtcagagttatactgtgcctgaattgatgcctcaggtcaggttgaaaaaaaaaaaaaaggttcagacagcaattaagggctgggcacggtggctcatgcctgtaatcccggcactttgggaggctgaggtgggcagatcacctgaggtcaggagtttgagaccagcctgaccgacatggtgaaaagtaaaaatacaaaaataaaaaaattagctgggtgtggtggtgtgcacctgtagtccctacaaaaataaaaaaattagctgggtgtggtggtgtgcacctgtagtcccagctactcgggaggctgaggcaggagaatcgcttgaacccaggaggtggaggctgcagtgagccaagatcacgccactgcactccagcctgggtgacagagcaagactccatctcaacaacaacaacaaaaaggaattaaggaggaagccacctggcttcctaagatagactttatggttaatgggatttattttagctggttaagtccaggacccctaccaggaagaactgaggtccatatttgaggttggtctcacccttttgcatgtggtcctactaataataattttgctgtaaagaagcctcaataaggagatggactgtgtgaaaagagatgagaaagcaggcctgtttgcaaggctggcccttggctggcatctgaaagcttggatttcaggagggttctcattactccctaaatgataagagtggctcactgtgcctaaactgttcgtacaaacaatgtgggttatgcccaacatctgctttccttctgggagtcagattttcatatgtgttaggcagaggatgaggtgagcagctcccaatgagaaccctgaacactgagtctgtaatgagcttcccttgtatacaacattgcacatgggttgtcacaactgattgctggaggaattgtgtcctatgtgactctgctgggagaggactgtgggaggcttacacctggtttccctggactttgtccatgcgcttttttcctttgctgattttgcttcctagcctttcgctgtagtaaaacatagccatgagtatgactacaggctgagtctgtgaatctcctagtacatcatcagactaggaggtggtggtgttggcaccccccagcacagggcacaagggagacttgcagggtgtttgtcatgttccctttctcaatctgggtgtggtttacagatttgttcagtttgtgaaaattcactgagctctatgaacaattataatatgtacatttttttctgtaagtgtattaaatttcaataaaaagaattcacactataggggtacaaaataacttaatttttcaaagtcttccttttattcagccaacattttagtaagtacccttttttttttaccaagcactgctctgggagcttgggacatggggtagaaaggacggcatcattgtcctcattgtccttcagcttagctgcaaggcaggtgaaggatgcttatagtatggttgatttttgctgggctctatgaaggatcagagggtgctaaggaggcacagagaaagagcttttaacgtgggtattttactgttccagggttgccactcaagtacctacagaacaaacgggtgtagctgtaaactgtggcaaactgaaagcatgtaggcacagagtaagtagctagagctgatttttttcaggaaaggccacaaatcccaacttttatgagctcctcttttaaatgctgtaaatgttttacaatggcggggcgcggtggctcacgcctgtaatcccagcatttgggaggccgaggggcagatcacttgaggtcaggagttcaagaccagcctggccaacatggtgaaacctcttctctactaaaattacaaaaattagccgggcatggtggtgcatgcttgtaattccagctgctagggaggccgaggcgggaggattgcttgaacccgggaagcagaggttgcagtgagctgagatcgtgccactgcactccagcctgggcgacagagcaagattccgtcacacacacaaaaaaaaggcgtggggggaggccaaacaaaaccccgcaagacacatttggctatgacctgccagtttgctaggcattcttccaaccttccctccctctgaccaagaaactgagtgtccactattttaggccctgggaaattcagtagcgaggaggccagacagcttcgttgcatcatggggggctctggtactgtgcttctccaacttcaggatgtgtaggaatcacctgagcagtcttgttgagaggcggacactgactcgggaggtctggggtagggcctgaacgtttgcctttgcggttctaacaagctctcaggtgatggcgatgctactgttccctggccccgaggtagaggaagatttaagtaaaagcttcctggaggaggcgcaagtgaaccgcaggagctttcccggacgcccgagaaagggagaaaccccgaaggaattcctcctctctcggggctgggtctccgcatccacgccgggtttggtttcccaggctatcccacgtgttcgggcgtccgtgtcaatcaggttttccccggctgggtccgggtttaaaggctgctgctgcgcagggcgctcccatggtgccgcgcggcgggcgggtttggattttaaatccccgcggccaatcagtggcgcgcaggcttttgtaacgttcccagcgccgcgtttgaattcggggaggagcggagcggtgcggaggctctgctcggatcgaggtctgcagcgcagcttcgggagcatgagtgctgcagtgactgcagggaagctggcacgggcaccggccgaccctgggaaagccggggtccccggagttgcagctcccggagctccggcggcggctccaccggcgaaagagatcccggaggtcctagtggacccacgcagccggcggcgctatgtgcggggccgctttttgggcaagggcggctttgccaagtgcttcgagatctcggacgcggacaccaaggaggtgttcgcgggcaagattgtgcctaagtctctgctgctcaagccgcaccagagggagaagatgtccatggaaatatccattcaccgcagcctcgcccaccagcacgtcgtaggattccacggctttttcgaggacaacgacttcgtgttcgtggtgttggagctctgccgccggagggtgagtgtcgctgctggggaactggaactgcctgcggggcagttggagcgcccagacctggagctgctggaaagagtacccagcaagggagagcctgggacttggagctgctagagaagggtgctgggagcctcccgcttacgtatggaaagtgtctttggtaagggcttcttggctctgggagctgctagaggagggggttccagtgaagtggagtctgagtcatgttgctgatagggaagtcagcttctggacgcgaggtgctggggggaggggtgctggtaatggacgctagggccctggagtacccagggaggagtcccaggttagtgatgccgcgccctgggagcttctggggtggagctgggtcagtgggggggtagttggagccagacttcgggccttccgggggagatacgagtcaggaaagggatctggtgctggggactcggagcttccggagtggggctgagagaggacccccaggtaaggggggaagctagtaggagaaggggtgctgcgaatggttgtggacagtgttaaggcagggtccagatgccgctgtgctggagaaggaatggggtgggggcata

SEQ ID NO: 1863 - DNA, 6000 bp, Homo sapiens
caatacactatctcttctcactgtactctgagactcatccttaattctttcctgtgccagatccaagaaccttatcttgaggtctggatggggatccctttgtcagcaacaggaaggagggatgactaagaaggacacaggggaatttttatatgtcactatacatttgccaaaatccacagaatgcacaacacaaaaggtaacccctaatatgaactgtggactttagttaataatgtatcaatactgactcatcaatcctaacaaatatatgacatcaatgcaaaatgttaacaatagtggaaactgtatgaggggagaggggcatatgggaaccctatactttccactcaatttttctgtgaacctgaaactgctctaaaaaagagtatattatgtaccgacaaaaaataaacattaaaaaaaattaaaataaggctgggcacggtgactcacgcctgtaatcccagcactttgggaggccgaggcaggtggatcacttgaggtcaggagtttgagaccagcctggccaaagtggtgaaaccccgtctctaccaaaaatacaaaaattagtccggcgtggtgctgaactgtaatcccagtgactcgagaggctgaggcaagagaatcgcttgaacccgggaggtggaggttgcagtgagccgagattgtctcactgtactccagcctggacaacagagcgagatatatattttgtcccttttctatttatttatttatttatttattttttgatacagggtctcactctgtcacccaggctggagtgcagtggcacaatcacagctcattgtagcctcaacctcccaggctcaagcaatcctcccacctcagtcttctgagtagctggtaccataggcatgcgacaccatgcctgattaagttattaattttttgtagagatgggttttcgccatattgcccaggctggtctcaaactcctgggctcaagtgatactcccaccttggcctcccaaagtgctaagattacaggtgtgagccaccactcatggactctttattaacaatatacttcacaatgaaaaagggaatacagtgatcttcattctatattataccctatataccaaaaaaaatcagattgattatggagtttaaaatcatgaagctatatataaactggaaggaaatatagcaaaaaaatatctaaggtgagtgctgagtgggctacaagccatttctcaaagcaaaagcaaaaaccataaagggagaaaggtcaatggacttttgtttgtttgtttggagacaggttctccctttgttgcttaggctggagtgcagtggcacgatcatagctcactgctgcctcaaactccccggctcaagctatcctcccacctcagcctcccaaagtactggtattacagacatgagccacagcaccctgccggtcgatgggctgtattacataaactgcaaaaaaataaaaaataccccaacaactgtaggctgaaatattaaataaaatagaaaggcaacataaaagcaatcaactctctggagaaaatacagtgtgatgtaagggatgtatctaccttctgtgaattggactgacaacacagaggcttagaactatttttttttttttttttttttgaggtacagtctcgttctgtcacccaggctggagtgcagtggcaagatctcggctcaccacaacctccgcctcctgggttcaagtgattctcctgcctcagcctccccagtagctgggattacaggtgtgcgccagtgcgccaggctgatttttgtatttttagtagagacagagtttcaccacgttgacgaggctggtcttgaaatcctaacctcaggtgatccacccacctgggcctcccaaagtaatgggattacaggcgtgagccaccatgcctggccttgttagtgcatttttaagattacattcaatatacaagcatagaacagcttccgtgggaccaggcacaagctcagtcctgtaaccccagcactttgggaggccaaggcgggaggactgcttgaggccgtgagtttgagaccagggtgggtagcatagtgaggctctgacactactgaaaaaactaaaaattagctgagcatgttggcacaagcctatagtcccagctactcaggagcctgaagcaggaggattacttgatcccaggagttcaaagttacagtgaactgtgattgcaccactgcactccagcctgggtgacagagcaagacccggactccaaaataatactactaataattaaacaaacaaaaagagaacagcctccatgaaatagatctcattccgacttcctgagcttgagtagttcactacagacagcaggcaggcagagctccttggatctcccaattccgcttgctggaactgaattttgacataagaaaataagttaaggggtttactaactgtctatggtcaatggtatgaggctatactgggtttgagaatgacaaaggtttgaaatcctgggacatgggagctccagaattgttacattatgagaagcttagacaggaatgcttcattcactgtaggatagtacaaaaggctttttcagggcttacaaaaatattggtagggagagaagcgtcagggagaccagctccatattacccaaagaaaacggcaaaatttacaattcagctcactgaagaaaaaagaaaataaaaagttttttttttaaaaaaagaaaactgcaaaatgaagattagtaaaggaattcagtgaaatggaccaaatgtagcattgtgtcaattagtcaggcaactcaagtcataggcttattgcaggtggtgaatgcattttgacctgtttgatgtgatatgaagtgaggcctctgtaagtgagaatatcaaggttgaacaaagtttttggcagatgagaacggttggaccaatagacaacattctttccaaggacatccccccctgcagattaggttatgatccactctgtcatatcctgagggtgtggcccactttgagatcccatgatgcaccacgctgattaaattaggcattcagtatataaaggggtcggccacagacgggcaaaaggaacagattcaccgcttcggagtgaattccatgacggcttgcaattttctcgtcgagtttttctttcactagagatagccctcgccctttcattcacacagaggcttttaagaaaaaagcaaccaacctgaagaggacctggcagcaataagtttttggtgaaataacaaagaggtaaaagtggaagaaacttgttatatatgaaaagtactgatgtgtgtggttgagttaaattgtaatggtatctctagagctgcccttgactacggccaaaattttattgccacgacatctctatggatcacgtaaaaatgtatccagttattcagcacgtatttattgagcacctactatgttctaagagctgaggatacagcaaaaacaaatataaagataagattcctattgtcagccgaaggtaggggttgggggagatagataattaaaaagtaaatgtgtaactgtcaactatctgcaagtgctaggaagaaaagactaaagggatagagaaagatcgccatcttattttaaaaagatggccttaggaaggcttttctggcaggatggtgattaattttaaatcaagttcagtaagaatttggagtgtgcttgcaggaagtccctgggaaactctgctacttctcggctataggatcttattctcagttgcctaaattcactgagcctagcctgtaaaattcagagaggatgaggaacatggattgtaaacgataataactatcgtttatgaatgtaattttattatattatgattttttctgaatgtaataacgtccccatgcccaaaggaaaaaaaaaattccaatctactgagggggttcttgtcactgttcctggcatttgcgcttaggaatggaatcgggaccctgccactgagcaggcatccccttctgcaaattcagaaagtacatgattgctagcttcagttccatcatctataaatcggaaataatgtcatgttgaccacgtagggtttttgttgttaaattgacatttattgagctacagctattaatatttcggtgcattgagccacgtcaatgcaccggcatggtcttagactatggatttatgtgcatttatttaatccaagtaaaccaagtactatttttaatggcattttacagccaaggagacccaggcacagaggggttaaatctagagcccccacagccagggatccaacccagacaacgtggctgctgagcctggcaatgttgttatgcgatcagccctgtgcctagcacatagtaagagctcaataaatctgtatggtgctggtggctgttatcagttcttggcagcggctgctccacgatttccacttgtcaagagtatagggtagccagtttattggaagcagcagctagggagcgcttgcatagcaaccatagttttctgcgtagcaaccataatgctcacttaaattgggaggcttagaggagctgacggggcctgtggggaagggggagttagccggccacccctaggcaagccactttgcagtggaaactgcacgcagcccctgcaaggcgagctctccccaccgagcctccctgtgagccggtcctcctgacgcgcaacccccctcccttttgaagcagatggttcttcccgttgtccctgctctttcagtttccgcgctttggagtcacaaagcgcggggtcacgtgggcgggccgtgcgctttgtgacgtcagccgccccgcctctcggcccgcctatccgcgcacgccagccccgcctcgcgcgcgccgcccgtgcaatccctgcttaagagaccccgcagtggggcgctcgtccgaagccaggccgcgtccgccatagtacctggcttggaggtgtcgccgccgctcggtgagagcccccgagcggcagggggccaacacaaaaagggagccggagaagccctagccgctgcccagcagcttgcgggcgtgttctcgcggttccgggcctcaaggcgacggaaacgaaaggcgagcgaagcgcggaggatccggcgagaagaagcgtcagggagcctcggcggtgtccccggggtccgccgaagccacccggccgccggctggggcccggggtggtgaggaagtgctccgaggcctcgccgaggcctagcgccggctttgtgtccgaggcggcggcggcggcggggggaggcggagccgggggcggcctgcgggaaggcctctcctccgccgaccgcgcgttttcggcctaggccgtggggccgctcgtggcctccggggagcaggcgccaggggtttgtgtgcggtgggggcctgggcctgggcctggggaagctgacgccggtcgtccggaagccaggaggaggcgtgaggccgctcgtggactccgggcctaggccctctcccctcaaccttctcccggggcctgggtcaccccaatccacggagagagagacccgccgggaggtgcggccgcgctatggacccctgaccccgtggggtcgctcggactcttaacgtgtggactgaccgctactgactgcaccgccaatccccccgtctctgccggccccttagcatgagcgagggggacccagccgggtgacattgtgcccgttggcggattctcgatttcccctcttccccgtcctcgtcctcctcctcccccatgaagtgattctgagtatcggggggtctctggattattgttctgacgaacccctgcttgtggttggggggtatttaatctgaggccttagggtccttcggtgtctttgagtgttttgtgtgtacatattttgctcttaaagtttataaatatacgtatattgagagtgtccacgtctcctcgctgaaccttaggaatcccttggcaccatgtcctgtgtgcattataaattttcctctaaactca

SEQ ID NO: 1864 - DNA, 6000 bp, Homo sapiens
aatgaaaaagggaatacagtgatcttcattctatattataccctatataccaaaaaaaatcagattgattatggagtttaaaatcatgaagctatatataaactggaaggaaatatagcaaaaaaatatctaaggtgagtgctgagtgggctacaagccatttctcaaagcaaaagcaaaaaccataaagggagaaaggtcaatggacttttgtttgtttgtttggagacaggttctccctttgttgcttaggctggagtgcagtggcacgatcatagctcactgctgcctcaaactccccggctcaagctatcctcccacctcagcctcccaaagtactggtattacagacatgagccacagcaccctgccggtcgatgggctgtattacataaactgcaaaaaaataaaaaataccccaacaactgtaggctgaaatattaaataaaatagaaaggcaacataaaagcaatcaactctctggagaaaatacagtgtgatgtaagggatgtatctaccttctgtgaattggactgacaacacagaggcttagaactatttttttttttttttttttttgaggtacagtctcgttctgtcacccaggctggagtgcagtggcaagatctcggctcaccacaacctccgcctcctgggttcaagtgattctcctgcctcagcctccccagtagctgggattacaggtgtgcgccagtgcgccaggctgatttttgtatttttagtagagacagagtttcaccacgttgacgaggctggtcttgaaatcctaacctcaggtgatccacccacctgggcctcccaaagtaatgggattacaggcgtgagccaccatgcctggccttgttagtgcatttttaagattacattcaatatacaagcatagaacagcttccgtgggaccaggcacaagctcagtcctgtaaccccagcactttgggaggccaaggcgggaggactgcttgaggccgtgagtttgagaccagggtgggtagcatagtgaggctctgacactactgaaaaaactaaaaattagctgagcatgttggcacaagcctatagtcccagctactcaggagcctgaagcaggaggattacttgatcccaggagttcaaagttacagtgaactgtgattgcaccactgcactccagcctgggtgacagagcaagacccggactccaaaataatactactaataattaaacaaacaaaaagagaacagcctccatgaaatagatctcattccgacttcctgagcttgagtagttcactacagacagcaggcaggcagagctccttggatctcccaattccgcttgctggaactgaattttgacataagaaaataagttaaggggtttactaactgtctatggtcaatggtatgaggctatactgggtttgagaatgacaaaggtttgaaatcctgggacatgggagctccagaattgttacattatgagaagcttagacaggaatgcttcattcactgtaggatagtacaaaaggctttttcagggcttacaaaaatattggtagggagagaagcgtcagggagaccagctccatattacccaaagaaaacggcaaaatttacaattcagctcactgaagaaaaaagaaaataaaaagttttttttttaaaaaaagaaaactgcaaaatgaagattagtaaaggaattcagtgaaatggaccaaatgtagcattgtgtcaattagtcaggcaactcaagtcataggcttattgcaggtggtgaatgcattttgacctgtttgatgtgatatgaagtgaggcctctgtaagtgagaatatcaaggttgaacaaagtttttggcagatgagaacggttggaccaatagacaacattctttccaaggacatccccccctgcagattaggttatgatccactctgtcatatcctgagggtgtggcccactttgagatcccatgatgcaccacgctgattaaattaggcattcagtatataaaggggtcggccacagacgggcaaaaggaacagattcaccgcttcggagtgaattccatgacggcttgcaattttctcgtcgagtttttctttcactagagatagccctcgccctttcattcacacagaggcttttaagaaaaaagcaaccaacctgaagaggacctggcagcaataagtttttggtgaaataacaaagaggtaaaagtggaagaaacttgttatatatgaaaagtactgatgtgtgtggttgagttaaattgtaatggtatctctagagctgcccttgactacggccaaaattttattgccacgacatctctatggatcacgtaaaaatgtatccagttattcagcacgtatttattgagcacctactatgttctaagagctgaggatacagcaaaaacaaatataaagataagattcctattgtcagccgaaggtaggggttgggggagatagataattaaaaagtaaatgtgtaactgtcaactatctgcaagtgctaggaagaaaagactaaagggatagagaaagatcgccatcttattttaaaaagatggccttaggaaggcttttctggcaggatggtgattaattttaaatcaagttcagtaagaatttggagtgtgcttgcaggaagtccctgggaaactctgctacttctcggctataggatcttattctcagttgcctaaattcactgagcctagcctgtaaaattcagagaggatgaggaacatggattgtaaacgataataactatcgtttatgaatgtaattttattatattatgattttttctgaatgtaataacgtccccatgcccaaaggaaaaaaaaaattccaatctactgagggggttcttgtcactgttcctggcatttgcgcttaggaatggaatcgggaccctgccactgagcaggcatccccttctgcaaattcagaaagtacatgattgctagcttcagttccatcatctataaatcggaaataatgtcatgttgaccacgtagggtttttgttgttaaattgacatttattgagctacagctattaatatttcggtgcattgagccacgtcaatgcaccggcatggtcttagactatggatttatgtgcatttatttaatccaagtaaaccaagtactatttttaatggcattttacagccaaggagacccaggcacagaggggttaaatctagagcccccacagccagggatccaacccagacaacgtggctgctgagcctggcaatgttgttatgcgatcagccctgtgcctagcacatagtaagagctcaataaatctgtatggtgctggtggctgttatcagttcttggcagcggctgctccacgatttccacttgtcaagagtatagggtagccagtttattggaagcagcagctagggagcgcttgcatagcaaccatagttttctgcgtagcaaccataatgctcacttaaattgggaggcttagaggagctgacggggcctgtggggaagggggagttagccggccacccctaggcaagccactttgcagtggaaactgcacgcagcccctgcaaggcgagctctccccaccgagcctccctgtgagccggtcctcctgacgcgcaacccccctcccttttgaagcagatggttcttcccgttgtccctgctctttcagtttccgcgctttggagtcacaaagcgcggggtcacgtgggcgggccgtgcgctttgtgacgtcagccgccccgcctctcggcccgcctatccgcgcacgccagccccgcctcgcgcgcgccgcccgtgcaatccctgcttaagagaccccgcagtggggcgctcgtccgaagccaggccgcgtccgccatagtacctggcttggaggtgtcgccgccgctcggtgagagcccccgagcggcagggggccaacacaaaaagggagccggagaagccctagccgctgcccagcagcttgcgggcgtgttctcgcggttccgggcctcaaggcgacggaaacgaaaggcgagcgaagcgcggaggatccggcgagaagaagcgtcagggagcctcggcggtgtccccggggtccgccgaagccacccggccgccggctggggcccggggtggtgaggaagtgctccgaggcctcgccgaggcctagcgccggctttgtgtccgaggcggcggcggcggcggggggaggcggagccgggggcggcctgcgggaaggcctctcctccgccgaccgcgcgttttcggcctaggccgtggggccgctcgtggcctccggggagcaggcgccaggggtttgtgtgcggtgggggcctgggcctgggcctggggaagctgacgccggtcgtccggaagccaggaggaggcgtgaggccgctcgtggactccgggcctaggccctctcccctcaaccttctcccggggcctgggtcaccccaatccacggagagagagacccgccgggaggtgcggccgcgctatggacccctgaccccgtggggtcgctcggactcttaacgtgtggactgaccgctactgactgcaccgccaatccccccgtctctgccggccccttagcatgagcgagggggacccagccgggtgacattgtgcccgttggcggattctcgatttcccctcttccccgtcctcgtcctcctcctcccccatgaagtgattctgagtatcggggggtctctggattattgttctgacgaacccctgcttgtggttggggggtatttaatctgaggccttagggtccttcggtgtctttgagtgttttgtgtgtacatattttgctcttaaagtttataaatatacgtatattgagagtgtccacgtctcctcgctgaaccttaggaatcccttggcaccatgtcctgtgtgcattataaattttcctctaaactcaactatgataccgtcacctttgatgggctccacatctccctctgcgacttaaagaagcagattatggggagagagaagctgaaagctgccgactgcgacctgcagatcaccaatgcgcagacgaaagaaggtaagggccgcttggtcttaagatatttggtggctggagagagatactagctagaaggtgcctggcaggaagctaaccgccattatgtctctagtggggactgttcgttctagtactttggatacaactttcattgatagccaaggtttgcagcagttggccttggagtttcactggtttattttatttctgcatacttgggtcatctgtaacaggctaacccaaaacgtggaagcctgattattcttctcgctgttttttaaaatgagggagggaggagagggggatagctatctagactctttgagtgcttgtcttagggcgttttctaacttattttccatcaggagggcaggagagcctgtgcaaagcttgtttgttcaatcagcaaaaaaaaaaacaaaaaaaaaaccaaaaaaacaattttctaacctaacaacattgtggagtttgatggcaaattttatgtcctgccttcctccctcctcgcatttatttatttggagttgcttgcctgtgttgtggataagggatctgaactttaatatttttgaggatttaatcagtattggaattgtttttggatcttgaaatgttctgatgtcaccgctcttgtcttgtgtgtcaattccagaattagtaatacggcaattaagtagttaaactgttagttcatcacattactcttaagctttatcaattcggtgaagatcaaaagtactgattttttttaaagtagtagttgctagattttacgtgactgttgatactaaggtactgaaaaataggctgctaccatagagtacaaataagccactgataagaatcgttagattctttctccttttcaaaagtattttgataatattgggaacttaacagtagataaatgtgacaagcagtctttcctgactctgaacttgttttggt

SEQ ID NO: 1865 - DNA, 6000 bp, Homo sapiens
aacgcattagcaacatgcaaagcttatattaaagtttgatgctttctccaagttcaaacacatcatagaaaagagctttccagagaccattgatgcagctttattatttagtcttgctttatttggcattttgagctccttcttttgtttacatctgtactataaagtgaaacctgaacctggggccccctatgaatatataagtgtcttagtgattttgagtttatataaactgattatattgttttcaaagtttaatgagatcttccacttctatctagttagtgcagatgtccaaattaaaatatttccctcttatactaaaatgctgcgttaattttaggccattgaaagctgtaccttatcagaggtaactccccttaaccaggataactggtttgaagaaagttaagcttaatttttgtaatcacagattaacttaatttgtgataccattttaactttgagctcttaagtaaaaagtagcagcattcctaagttgtggggtgaagcatctgtttcataacacaggtctatcataattgggttctgtaaatgtaatggttctctaaacattttaatgcccaggcttgatattgtacacaatgcaagatgtctaaaatcttcatttagaattcaagggtattgcttgctatttcacattatatactttttaaatactattgctctttgtatatgaggcatttcactaaccttggatcattggatcttaaacatgataatatagaatatctgaacattggacttgttctttagagtatatggcctttagttcttgtggaactaaatacagtgattctaagatcaaaagtcttagtgtttggggtttttttttcctctttttggatatggggtgtttttttttgtttttttgttttttttttttaagcataatgctgtaaaaactgtccaagcttatgttttgctggtgattggtttaaaactgatttttatgtatccaaatgctagcataaattagattgactatcctggtgactgtagtagttaatgtaacacattttgtataaagtacagtttatatagtatttaaactaattcagatgaagttttatttcttgaaaacagttatttcctttttgtttattagcatgtgtataaacacaaatcacatgttcataaataaagttaacattcttttagccttgtgtgttccggcatgtctgtattacatttataagaagcagtttatttaagcttatttaggtttctcttttcttttcttttttttttaatactttaaaattggctttaatttttaggtagaattatctgaaatagagatattagataaccttgttgtccccatcatttatttgcttggggtacatttgctggcatttaagatgagaatatattcatcaagcataattagtgcccatcttaggagatttagagtcacgtggattgtacacattcacaaaagcaaagtaaatagaggcgctaagccaaatttttcttatcctgattagtaaagtaaatgtatagttttggtaatggaagcgaactctaatcaagaatggatggctgtttccatattccccagtcttgtttttagtcatccatccatgttgataccccaaagctggatgttcttcttgctaactaaatatcagagtggtattttataggattctttaacttcaaaaagctaatataattggcataaaagattttagatccttgcttcccaaaacaagacccctaattaggtacagggaggtgggttaattttaatgtctacggtctgcatcagtccgttttgtgaggactttaagtggcagacttttttttaccattagtatcttaccaagagtcactatttttattgatgtttagtaatacaaattcctaatcatttttaaaccattctttgtcaacattttttgctcatttctgaacaccttgctatatgtaggaaacatttgtttgcttttctaaatttgaggtaaatttgacttctttgtggactataagatatttaggggcaatagtgattacttggtggtaaaaaggtgatttaggtgcagttgcatatctaaaaccacttcaaagtcaataaatacataatactaataagttagcagaaagcttaaaagcacacaaaagcccagcataaaaacaaaaaggatactatatcttaagtgttaggagtgggaagattttttttttattcttaagttttttagttccagtggtaagaaagttaatataattgttttctttccaaggaaatcatcagtatttatattctattctagatagtaatgggctatttttaaagactatttgttttattggttagaatgtagtatagatgatggttgacagcaatttgtctagtccttgttacttaaaatcaagtaacttctggttggtataaaatctttaaaatagattgagtaggtcagaacttattttagataaaaagagatatgtattatttagaggtttttttctacttaccacttgagattagttcttaaaggaaaaaaatacttaaaagctggacaaaaatgataacccattggcaaattatgtagatatgcattaagttatagggttagtgcatcatgaactcttttatagtcagttccttaatgtggagcaaagaaccttttgtctgaataaacatcccagtaatatccatcaaattaacttttaaaaccctaagatatttgtgagatgtgtcttatatttagccaacattattttttatttacatttattgaatccctactgtgtgggcattggctaagaacttcatattgagactggttacatttgtctttggggctcttaagtcatgttgcttttattttaaaacttttggttctctggaacagaatacctgatgaagacttttttctttgatccagacatcttgttacattctccattttaaatgaagagttctgaccttacgacatgttaactaagcaacccacttactacgtaggaagctgtagggaaatcatatcttcaagattgtttgctaaagatttttttaaaaactgatattaaaatcatttcagaggatcaaatgaaaaaaattagtgttcaatttaaaatacatttttatttttattttattttgaaagagaaatgttttattcctctttgcacagaacagtttatgaaggtggctctctcctgactccatacatcttttacacaaagatgcctcttcaaatatgcccagttatctccccctcttcagtgttagagaattggcagttagtgagtggggcagaatgcttaaggctcattaaaataccttttttaaagccctcttatatcctttatgtacacttgctctgtgtgattaaattaactttcttcaaatattagagtccatcataataagtgacagctctgttggccttctcctcagggtgccattgttttccctttttttgacttaacatctttgccctgagaaagctgtggtttctttgacaagaagctattactctttgtatgagagaataaacaaacttactcagactgaagagtatgttttcaaaaattaaagaagtagcaattatatgggagctgttatttattaaagcaattatctgagcccttaaagggctgtttgtttttacaatgttgtataatggccttgcaggaaaattagatttcttattctctcttccagtgtacattgtcttgagtattgtcacatttagagaccatagggagatatgggactcctagtattcagtcgacactctgaacagattttctgtgtgatacattttttcattttaattgagtcccctcttcctcccctccaactgatagctttttataactgtgtgaaatatctagagaagaatgaagtaggctgagctacattttcaagcttaacattctttagaaaactaagaaaatgcccaatatttcaacattaaggtgtcaataggggctaaatgatcactttaagatgttttcagtttggaacttgaatgtgtgtttaattttttgtgaacagattgatgactcttccgcgtctatttctctggcccagcttacaaaggtatatatatatatatattcttgaaaatataagtttttttctaacatcatatttttttatgtggaacggttttttaagaggggttgggggaggacatattttgcaaaagcattgtacatattattactatcctgtaaagagtagttgctgttttgagaagataggggaatactttgtcagcctcagcgtattggagtattgttcatcttcaagacagaagaaacacttgaagctacacttaattattttttttccctcatacattttgtttaattatacattggaaactaacaaggttctggaggaatttcctggttttggctataaattatgtggaccttttttaagcagccaaaacagaagatttcctttacacggacgattgcatggttatttcttgaatatttgacttgatcccatgaaggtcaatattttaaatgtgatgcagttgtttctttatgctatagacttgtagtctgtctgcattaggaaaagttttgaacaacctaatttgtttgaacacagactacatgaattgtgtaagtgtgtaaagctgtttgcaggaatataccaatgtgtatgtttggcagaggggcaaattgttacctcctgaatcactgtatatgccatgttttgcgataagattgcttgcattttctgctcaacaatgtgtatcttctgtttgggaaagcactagtgatggattactttttaaagcaatacatttagcttgcaaattgtgcctttaaaaaaaaaaataggcagacttttgagggccaagaaggaagctgtccagttttccaaaaatcctttttccctgctatcagaaatgtgaaaccaaatttagcaaccaagattaatgaaaagatgggttttccattagtgctgtccctatcttgttcttggctttgttatgtcctttcccctagactgtatcccgacaaaatgtcctagtaacaaattgctttttaagctcctgttctgggaaaactaagcattaaaattgattattctaaaacataaagtggactaaagccatcctattttataattttctaatgcaaagtggtttagtatagagttaacacttagaagtttatagtttactgtttttattcttatgtactgtaaggaccatatttgagtttttggtctattcctaccattgtttctttgtggggaggagttggggcggtttgggggattggttttttttttttgtttttttaaactacaggtatttgtaaaacaatgtttgggttcaaacaaattagttgttaaacatctgtaatccagttttctgtaaatgttgctgttgttctaagctctgttaatgttaagcattctttgtatataaaattacaataaaatgttaaaactggttgcttgttttgtggatgaatgtaaagacaaaccccaatgaatggctgatatgagtgctaaatgcctgaagattcaacttaactagaaatcactcccttagaccctgcttacatctagaccttgtatatcatacctcaaagatgaaattcataaaacttatctgaagagtttaatttaaaattataatgctcaatgcacatcttttgcacttgagttgaaactaacatcactacctaaagagccttctacttctaatatctgctgcataatacgttcagtcattctacccccatccctacctccacattgtaagtataaattagtcttaatgctctgacacttgaattatttttaaaacatcaagtgtttctattctaacttaatatcagtctttaacttgtagaaaagtagtatgcaagtcttaatgtaaggtacaaacagggtctaaggtttgagtgcccccagaatgactttcttcagccttgcagacacctaaacatcatgtaattacctaaggaattcccaagtgcctcttc

SEQ ID NO: 1866 - DNA, 6000 bp, Homo sapiens
ctaatgatactgtttgagtcagtggagccaactgtgtcttcacagtcagtaagccaatgcacctcctttcttgcttgagtccttttgagttgggtctttgaagacttgttactgaaagattcctgcctactacaacctcatcagggccatgttttaggcatatctgaggaggaaggagacagacagaaaggaacctagttaagaccagcctggggccgggcgcagtggctcatgcctgtaatcccagcactttgggaggccgaggcgggcagatcacgaggtcaggagttcaagaccagcctggccaacatggtgaaaccccatctctactaaaaatacaaaaattagccaggcgtggtggcgggcacctgtaatcccagctactcgagaggctgaggcaggagaattgcttgaacccaggaggtggaggttgcagtgagttgagatcgagccactgctctccagcctgggtgacagggcaagactctgactcagggggaaaaaaaagaaccagcctgggcagtatagccagactgtcgtgtctacaaaaaatttaaaaaattaggccaggcgcagtggctgtcacctgtaatcctagcactttgggaggccaaggcaggtggatcacttgaggtcaggagtttgagaccagcctggccaacatggtgaaacccatcctaataaaaatacaaaaagaattagccagatgtggtattgtgtacctgtagtgccagctacttgggaggctgaggaagggagatcatttgagcctgggaggttgagactgcagtgagctgtgatcatgccactgcactctagcctgggcaacagagcgagaccctgtctcaaaaaaaaggaaagaaatgaaatgaaaagaaaggccaggcgcagtggctcacacctgtacctgtaatcccagcatgatgggaggccaaggtgggcagatctcttgagaccaggagttcaagactagcctgggtaacatggtgaacctcgtctcgatacaatacaatagtaaaggcaaagtgacatgagaatcacaaggaaatatcagacaaacccaaactgagggacattctacaaaataactgacctataatcttcaaaagtctacggtcatgaaagaccagaatactactactaataataagaagaataaataactatttcaggccaggcatggtggctcatgcctgtaatcccagcactttgggaggccaaggtgggcggatcatttgagaccagcctgggcaacacggtgaaaccccatctctaccaaaaatactaaaattagctgggcatggtgacacatgcttgtggtcccagctactcagaaggttgaggtgagaggatcatttgagcctgagaggcagaggttgcagtgagccatgaccgcaccactgcagtccagcctgggcgacacagcatgacactgcctcaaaaaaaaaaaaaaagaaagaaagaaagaaaaaaagaagtgccagaccttgaaaatcacaaaaagctaataactggtttaagatttaatctggagccagccgaagtggctcatgactgtaatcctagcactccgaaaggccgaggtgagaggatcacttgagcctagaaatttgagaccagactgggcaacattagctagaacccttctctacaaacattctaaaaattagccaagccaggcacggtggctcacacctgtaatcccagcactttgggaggccaaagtgggcagatcacttgaggtcaggagtttgaaacctgcgtggccaacatggtgaaaccccatctttactaaatatataaaaattagccaggcgtggtgacgtgtgccggtaatcccagctacttgtaaggctgaggcaggagaatcgcttgacctgggaagtagaggtcaaggtgagccgagattgtgccattgcattccagcctgggcacagagggagactccatctcaaaaaaaaaaaaaaaaatgctgggcgcagtggctcacacctgtaatctcagcactttgggaggccgacacgggcggatcacgaggtcgggagatagagaccatcctggctaacacggtgaaaccccctctctaataaaaatacaaaaaattagccaggcatggtggcacacgcatgtagttccacctactcaggaggctgaggcaggagacccgggaggcagaggttgcagtgaactgagattgcaccattgcactccagcctgggcaacagagcaagactccgtttcaaaaacaaaaaaaaaaaattagctaggcgtggttgtgtgtgctaggcatggtggcaggatctgttgagcctaagagttcgagcctgcagtgacctatgatcttgccactacactccactccagcctgggcaacagagcaagaccctgtgctagaaaaataattctgccgggcacagtggctcacgcctgtactcctagcactttgggaggccgaggcaggtggatcatgaggtcaggagatggagaccatcctggctaacacggtgaaaccccgtctctactaaaaatacaaaaaattagccaggcatggtggcgggtgtctgcagtcccagctactcaggaggctgaggcaggagaatggcgtgaacctgggaggcggagcttgcagtgagctgagatcgcgccactgcactccagcctgggtgacagagcgtaagcttccacatcgttttccctctgtccctttttttgggggggtgggggtgggggcagggtctctcactctgtcacccaggctggagtgcagtggcaccatcagagctcactgcaacctcaacatcctgggctcaactgatcctcctgcctcagcctcccaagtagctgggattacggacgcatgccaccacacccagctcatttttgtatttttggtagagatgggatctcactatgttgcccaggctggtctccagctgctggggtcaagcaatcagcctgcctcagcctcccaaagtgctggaatcacagaggtgagccaccacgaccagccagcatcattttccagttaaatgttaatagtatctacttcatatggctgctgtgaggattacaggaggtagtgtacataaaagtgcctggcaagccaggtgccgtaatctcagcactctgggaggccaatgtgggtggatcacctgaggtcaagagtttgagaccagcctggccaacatggtgaaacctcgtctctactaaaaatacaaaaattagccgggcgtggtggctggcgcctgtaatcctagctacttgggaggctgaggtgggagaatgacttgaacccaggaggtaggggttgcagtgagcttgcactcctgcctgggtgatagagcaagactccgtctcaaaaaaacaaacaaacaaacaaacaaaaaaaaaccaaaagtgcctggcacagaagagatggtaagtctacattagttgaatatgcgtctatgaaccagaacaaatcccagtccagtcctccaaggaaatgccaacctcagtcactagaggggaatctcagtcacactctaactgagcttccagcagcaggaggtggcagcttgcagctctgatacaccagcctttcctatgctgggaaactcactcccactcagcaaacctggctccatgctgaactccatagtgttttctctgagtcactatattctcccgcagttgcaaaatgatctggcaaaagtccctctagggtttttactgcttactgagtaacatccaaactccttgccagaatccagagccttcctaatctggccccaacctacctctccaggctgaaacctcatcatttttttactgcagccatgctggacaagttatgcttctgcctttatgcctcagctcaccccgatccttctccttcatgcctttcttcagtccctaccttctgcaaccctactttttctcttcttctttttgttttttgtttttgagacggagtgttgctctgtcgcccaggctggagtgaagtggtgcaatctcagctcactgcaacctcctcctctcgggttcaagcgattctcctgcctcagtctcccaagtagcttggattacaggcacgtgccaccatgcccagctaatttttgtatttttagtagagacggggtttcaccatgttggtcaggctggtctcaaactcaggtgatctgcccacctcggcctcccaaagtgctgggattacaggcgtgagccaccgtgcccagccccccaatttttttttttaattagcagggcgtggtggcgcgcactcgtagtcccagctctttgggaggctgaggtgggaggatcacttgaccccagggaggttgaggctgcagtgagcaattattgcaccactacactccagcctggacgacagagagagaccctgtctctataataaaataaaaacagtctaggactctgagaggcatggaattagaaagagtctctgtgtcagaagacaccattttgagtctcagctgtcactactagtgaccttacccaagttagtaaacctaactctcagattctccatctgtaaaatttgatccatttattagaacattatttttaacctagggtgatcccgggcccaggttctggtgggctgccgcatacattggctgggtggctctggtaggtcacgccctggccgcttcgccatcgaggggagggtgaggacagtctccgaggcggcgctgccgaacctcccggtgacctggaggccgcggagcccgcagggacccatggcccccgaacctggggcaagaagggcgggcgcgcgcggggcgggtcacgtgacagctccaggcccacgcggggccggggcaagggcggggcctggcgcgcgcggccctgcgggtgacaggcaggcgggaaggggcggggcctcgggcggggccgccgtggggaggagggcggtgggaggggaggagtggagatggcggcggcggcggctcaggggggcgggggcggggagccccgtagaaccgagggggtcggcccgggggtcccgggggaggtggagatggtgaaggggcagccgttcgacgtgggcccgcgctacacgcagttgcagtacatcggcgagggcgcgtacggcatggtcaggtgagggggcgttccgggggagggggtgccctcaggggagggggcttcgcgggagaggaggaggaggcgccgagcgctttccgggacgtggagacgcggagcgtcccgaggaggcaggagactcgggatgatcgggagcgtcccagggagggggcccctgagtgctttctgggggagggggcgctgcctacgtcctcaggggagcaggcttggaggctttgagtccacccttctgtaatgatgggaggggcatccgagtgcatgtgggggcccgcggggaccctagtgacacggggcgaggcccagaggatgagtactctcggggaggcgacatccttagtgaagaggcagtggagggcccgttttgggggaaagggtgtcttggattccccctgtgaggcagtgccagggagcctgggggagaagagccgagatcagggtggggcagggctttggccccaccaccccaggggcccagagagagatgaggcggccaggagtgccacctgcatgttttgggaggggtctgtgagtgcccccggccccaccgtgtgctctgggcctctatccctctgggacagccccgctgcccggatccctcaccctgggaccctcccctgccctgtccattctctcctgcccctcccctggctgccaccttcccagtatttgccccatggtgtgtccccagcatctgcacccccggacctgtcttgggttaaggagcctttcctgggaatgggggcgaagggttcagggccagtagaatggaaggggattgaggagaggggaagtcagtgagcggtcagtctcttcctctgtttgtaaagtcaccgaagggccgcctggctggtccccagctttctctctggagatcccaggcctccacagcag

SEQ ID NO: 1867 - DNA, 6000 bp, Homo sapiens
atgttggccaggctggccttgaactcccgacatcaggtgaaccgcccacctaggcctcccaaagtgctgggattacaggagtgagccatggcgccccgccgaaacactgtctttaaaaaaaaaaaaaaaaggccgggcgcggtggctcacgcctgtaatcccagcactttgggaggccaaggcgggcggatcacaaggtcaggagatcgagaccatcctggctaacacggtgaaaccctgtctctactaaaaatacaaaaaaattagccaggcatggtggtgggcacctgtagtcccagctattcgggaggctgaggcaggagaatggcgtgaaccctggaggcagagcttgcagtgagccaagatcgtgccactgcactccggcctgagtgacagagcaagactctgtctcaaaaaaaaaaaaaaaaaaaaaggccaggtgcagtggctcatacctgtaatcccagcactttgggatgccggaagttcaagaccagcctgaccaacatggtgaaaccccatctctactaaaaatacaaaattacctgggcgtggtggcacatgcctgtaatcctagctactcgggaggctgaggcaggaaaatcacttgaacccgggaggcagaggttgcagtgagccgagatcacaccattgcactccagcttggacaacaagagcgaaactacaagggcgaaactccatctcaagaaaaaaaaaatggtgatatcacattaaaaaatatatttttttcgaggtagggtctggctctgtcacacagactggacgatcctcccacctcagccttctgagtagctgggaccacaggtgcatgccaccatgcccagctaatttttgtattttttgtagacatggggtttcaccatgttccccaggctggtctcgaattcctgagcttaagccatcctcctgcctcagcctcccaaagtgctgggattacaggcatgagccaccactcccggcccacatttaaatgtttatatttcaattgcattttataatttttctatgaaaacatgtgttggttgtacaataaacagataaatatatatcatcctaaattttgtattttttttgagacagggtctcgctctgtcacccatgctaaagtgtagtgacaccacaatgactcattgcagcctcaaattcctgggctcaagtgatcctcctgcctcaacctcccaactagctggggcaacaattgtgcaccacgatgcccagctaattttttttttttaatttgtaaagacaggatctcactgtgttgctcaggctggtctcaaactcctggcctcaagtgatcctcccacctcggcctcccaaagtgctgagattacagacatgagccactgcctggcctacatgttatcctcttttttatttatttttttaatacagatcgggtcttgctatgttgaccagactggtcttgaactcctagcctcaagcaatcctcccacctcagcctcccaaagcactgggattacaggcgtgaaccaccacgcccaacatttttttttttcctttaaacatgttattctgtcaaaggctgttgaataactcagagaagagttgatcagggtctgaacccaaagcaggttaatggcatggagagtgtgaagaaaaggggaccaatttttctgaaggataggtgggaattggaaactcactggaaacacttgtggggagtgagagtgggaggagttcagaaagttttttttccttttttttgagacagagtcttgctctgtcgccaggctggagtgcagtggtgtgatcttggctcactgcaacctgcgcctcctgggttcaagtgattcttgtgcctcagcctcccaagtagctgggattacaggcacgcgccaccacatccaactaatttttgtatttttagtagagacggggtttcaccatgttggccaggatggtctcgatctcctgaccttctgatctgcctgccttggcctccccaagtcctgggattacaggcgtgaaccaccacacccggctgatttcagaattttaactaagaccatagagatgctcaacctggtgagagatgcaggaggaaggccggtggtggagtgctgagaggtaacatgatccctgccctttgcttatttatttatttatattattattattattattattattattattattattattattatttgagaaagagttttgctcttgttgcccagattggagtgcaatggcacaatctcagctcaccgcaaacttcacctcccaggttcaagtgattctcctgcttcagctcccgtgtagctgggattacaggcatgcgccatcacgccctgctaattttgtatttttagtagagtcagggtttctccatgttgctcaggctggtctcgaactcctgaccacaggtgatctgcctgactcagcctcccaaagtgctgggattacaggcatgagccaccgcgcctggcctacttatttatttttttgagacggagtcttgccctgtcgcccaggctggagtgcagtggcaggatcttggctcactgcaacctacgcctctcaggttctagcaattctcctgcctcagcctccctagtagctgtgattacaggcgtgcaccaccatgcctggctaatttttgtattcttagtagagacgggggtttcaccatgttggccaggctggtctcgaactcctggcctcaagtgatccgactgccctgtcctcccaaaatgctggaattacaggcatgagccaccgcacccagcccccctttccagattcttaacagtccctagatggtattaagtagcatttttgtttgtttgttttttgttttttgagacggagtcttgctctgtcaccaggctggagtgcagtggcacgatcttggctcgctgcaacctccacctcctgggttcaagcaattctgctttagcctcctgagtagctgggactacaggcaatgccaccatgcccagctaattttttgtatttttagtagagatggggtttcaccatgttggccaggatggtctcaatctcttgacctcgtgatctgcccgactcagcctcccaaagtgctgggattacaggtgtgagccaccgcagcggtcctgaggtagatttgtttgtttgtttgtttgtttgagatagggtcttgctctgttgcccaggatggagtgtagcggtgcaatctcggctcactgcaacctccacctcctgggctcaagcaattctcttgcctcagattcccaagtagctggaattataggtacgcaccaccatgcctggctaatttttgtatttttgctagacagggtctcgccatgttggccaggctggtcttgaactcctggcctcaagtgatccacccgcctcggcctcccaaagtgctgggattacaggtgtgagccaccacgccagccaggtgctgggaatctgaaggagggacaatgaccctgcctagggtaggtggagagattgcatagaggcagagcccttggaaagaaacacttgaaggatgaggaagagtttaactgattcagaaaaaggaaaagctcaatgtgggtagagagccaaggacgtttggaagagtgagagatggggtgatgaggccagctgagggaggctttggcagtcaggccagaattcagacttgactctgagttactggggagttcctgaaggattttgagcagtggagttctttggccaggattctgaaggaaaatctctcgggcagtggtgtccaaagacctggagtccttttatgaatccattgtctgagctggaaaatgtatggcttcacccactcccaatcccatcatggcttctggtccacttttttctttttctttttttgaaacagcgttggcctggcatggtggctcacgcccgtaatcccagcagtttgggaggccgaggcgggcagatcacgaggtcaggagatcgaaaccatcctggctaacacggtgaaatctcgtctctactaaaaacacaaaaaaattagccaggcgcggtagcaggtgcctgtagtcccagctactcgggaggctgaggcaggagaatggcgggaacccgggaggtggagcttgcagtgagccgagatggcgccactacactccagcctgggcaacagagcgagactccgtctcaaaaaaagaaagaaagaaagaaaaagaaacagggttttgctgtgttgctcaggctggagtgtagtggtgtgatcacagctcactgcagtcttgatcttctgggctcatgcaatcctcccacctcagcctccccagtagctgggactacaggattgtaccaacatgcctggctaattttttaatgttttgtagagatggtagaggggcacgtccctctgttgcccaggctggtctggaactccttggctcaagctgtcctccctcctccgcctcccaaagtgctgagattacaggcgagagccaccttgcccgtcctgggaactgttttctaatcagctcatcaaaaccttcatctcccctgctaacaaagggagccacttccttcctctctgcacataccccatgtctcaccacgatgatggagctacagtgggacttggaatccagatgtgtgaaggatggagggttgaaggtacgtagacaggtgatgggcaaaggggtccaggaggtggcaaccccaagtgttcttggccttggccttccccacctctctgggactgggccagtttgagcatctcagctgcctcttctgcccgcccccttgttagccgcactcagcttcctgccccaccagaggaagtggggagagacggcaggtgcagtgatggctggcggagtcatggtgagtccttacacccagaaacctgggcatctcggcccccagcccccatgcctggggtccccagaccccactgactcttcctagcccaggaactcaagtgatcctggggaccctgcctgccattgccagcagcctcatattgtccacccccatccataggacaaggagtacgtgggttttgctgccctccccaaccagctgcaccgcaagtctgtcaagaaggggtttgacttcacgctaatggtggcaggtctgggggttttggagagggaactgcggaggggatgtccttaggaggccctggctgtcccctcccctgaccagttgggcctgttctgtccacaggggagtcaggcctagggaaatccaccctcatcaacagcctcttcctcaccaacctctatgaggatcgccaggtgccagaggccagtggtaagaccctccccaccctcttgaggcagtagcccctgtccccaggttacaccctagtcttttccatctggggactcaggtagttgactgctttttttctgagactttcctcccctgggaaatgggtgcaggcaactgtgatattgacaaaggaaattaattctgcctcagagcctccccggatccctgacctctcccccatcccacagctcgcttgacacagaccctggccattgagcgccggggcgtagagattgaggaagggggtgtgaaagtgaagctgacccttgtggacacacctggctttggggactcagtggactgctctgactggtgaggaagaggaaaggggacagaggctcagcctttcacagtggcgactccctggagagttacaggactggtttgtgctggctccctatctcaaaaggtggtgtctgtttcagagggccactgggtccctgtgcttcttgatgactcacctaggcccccaccagttccccttaatgtctttggagggagccaaagaaatgacattctactcccacagtcctggctagccttgccccctgccctctggcctttgatctctgacctcacatcctctccccacacccagctggcttccggtggtgaaattcatcgaggagcaatttgagcagtaccttagggatgagagtggcctgaaccggaagaacatccaggactcccgagtccact

SEQ ID NO: 1868 - DNA, 6000 bp, Homo sapiens
ggccaaggtgggcagagcacctgaggtcagaagttcaagatcagcctggacaacatggtgaaaccctgtctctactaaaaatacaaaaattagtcaggtatgatggcaggcatctgtaatcacagctagtcgggaggctgaggcaggagaatcacttgaacccaggaggcagaggttgcagtgagccgagatcgcgccattgtactccagcctgggtgacgaggaaaactctgtctttttttggttttgttttgttttggagaggaagtctcactcttgtcccccaggctggagtgcgatggtgcgatctccactcactgcaacctctgcctcccgggttcaagtgattctcctgcctcagcctcccgaatatctgggattacaggcatgcgccaccatgcctggctaatttttgtatttttagtagagacaggatttcaacatgttggccaggctggccttgaactcccgacatcaggtgaaccgcccacctaggcctcccaaagtgctgggattacaggagtgagccatggcgccccgccgaaacactgtctttaaaaaaaaaaaaaaaaggccgggcgcggtggctcacgcctgtaatcccagcactttgggaggccaaggcgggcggatcacaaggtcaggagatcgagaccatcctggctaacacggtgaaaccctgtctctactaaaaatacaaaaaaattagccaggcatggtggtgggcacctgtagtcccagctattcgggaggctgaggcaggagaatggcgtgaaccctggaggcagagcttgcagtgagccaagatcgtgccactgcactccggcctgagtgacagagcaagactctgtctcaaaaaaaaaaaaaaaaaaaaaggccaggtgcagtggctcatacctgtaatcccagcactttgggatgccggaagttcaagaccagcctgaccaacatggtgaaaccccatctctactaaaaatacaaaattacctgggcgtggtggcacatgcctgtaatcctagctactcgggaggctgaggcaggaaaatcacttgaacccgggaggcagaggttgcagtgagccgagatcacaccattgcactccagcttggacaacaagagcgaaactacaagggcgaaactccatctcaagaaaaaaaaaatggtgatatcacattaaaaaatatatttttttcgaggtagggtctggctctgtcacacagactggacgatcctcccacctcagccttctgagtagctgggaccacaggtgcatgccaccatgcccagctaatttttgtattttttgtagacatggggtttcaccatgttccccaggctggtctcgaattcctgagcttaagccatcctcctgcctcagcctcccaaagtgctgggattacaggcatgagccaccactcccggcccacatttaaatgtttatatttcaattgcattttataatttttctatgaaaacatgtgttggttgtacaataaacagataaatatatatcatcctaaattttgtattttttttgagacagggtctcgctctgtcacccatgctaaagtgtagtgacaccacaatgactcattgcagcctcaaattcctgggctcaagtgatcctcctgcctcaacctcccaactagctggggcaacaattgtgcaccacgatgcccagctaattttttttttttaatttgtaaagacaggatctcactgtgttgctcaggctggtctcaaactcctggcctcaagtgatcctcccacctcggcctcccaaagtgctgagattacagacatgagccactgcctggcctacatgttatcctcttttttatttatttttttaatacagatcgggtcttgctatgttgaccagactggtcttgaactcctagcctcaagcaatcctcccacctcagcctcccaaagcactgggattacaggcgtgaaccaccacgcccaacatttttttttttcctttaaacatgttattctgtcaaaggctgttgaataactcagagaagagttgatcagggtctgaacccaaagcaggttaatggcatggagagtgtgaagaaaaggggaccaatttttctgaaggataggtgggaattggaaactcactggaaacacttgtggggagtgagagtgggaggagttcagaaagttttttttccttttttttgagacagagtcttgctctgtcgccaggctggagtgcagtggtgtgatcttggctcactgcaacctgcgcctcctgggttcaagtgattcttgtgcctcagcctcccaagtagctgggattacaggcacgcgccaccacatccaactaatttttgtatttttagtagagacggggtttcaccatgttggccaggatggtctcgatctcctgaccttctgatctgcctgccttggcctccccaagtcctgggattacaggcgtgaaccaccacacccggctgatttcagaattttaactaagaccatagagatgctcaacctggtgagagatgcaggaggaaggccggtggtggagtgctgagaggtaacatgatccctgccctttgcttatttatttatttatattattattattattattattattattattattattattattatttgagaaagagttttgctcttgttgcccagattggagtgcaatggcacaatctcagctcaccgcaaacttcacctcccaggttcaagtgattctcctgcttcagctcccgtgtagctgggattacaggcatgcgccatcacgccctgctaattttgtatttttagtagagtcagggtttctccatgttgctcaggctggtctcgaactcctgaccacaggtgatctgcctgactcagcctcccaaagtgctgggattacaggcatgagccaccgcgcctggcctacttatttatttttttgagacggagtcttgccctgtcgcccaggctggagtgcagtggcaggatcttggctcactgcaacctacgcctctcaggttctagcaattctcctgcctcagcctccctagtagctgtgattacaggcgtgcaccaccatgcctggctaatttttgtattcttagtagagacgggggtttcaccatgttggccaggctggtctcgaactcctggcctcaagtgatccgactgccctgtcctcccaaaatgctggaattacaggcatgagccaccgcacccagcccccctttccagattcttaacagtccctagatggtattaagtagcatttttgtttgtttgttttttgttttttgagacggagtcttgctctgtcaccaggctggagtgcagtggcacgatcttggctcgctgcaacctccacctcctgggttcaagcaattctgctttagcctcctgagtagctgggactacaggcaatgccaccatgcccagctaattttttgtatttttagtagagatggggtttcaccatgttggccaggatggtctcaatctcttgacctcgtgatctgcccgactcagcctcccaaagtgctgggattacaggtgtgagccaccgcagcggtcctgaggtagatttgtttgtttgtttgtttgtttgagatagggtcttgctctgttgcccaggatggagtgtagcggtgcaatctcggctcactgcaacctccacctcctgggctcaagcaattctcttgcctcagattcccaagtagctggaattataggtacgcaccaccatgcctggctaatttttgtatttttgctagacagggtctcgccatgttggccaggctggtcttgaactcctggcctcaagtgatccacccgcctcggcctcccaaagtgctgggattacaggtgtgagccaccacgccagccaggtgctgggaatctgaaggagggacaatgaccctgcctagggtaggtggagagattgcatagaggcagagcccttggaaagaaacacttgaaggatgaggaagagtttaactgattcagaaaaaggaaaagctcaatgtgggtagagagccaaggacgtttggaagagtgagagatggggtgatgaggccagctgagggaggctttggcagtcaggccagaattcagacttgactctgagttactggggagttcctgaaggattttgagcagtggagttctttggccaggattctgaaggaaaatctctcgggcagtggtgtccaaagacctggagtccttttatgaatccattgtctgagctggaaaatgtatggcttcacccactcccaatcccatcatggcttctggtccacttttttctttttctttttttgaaacagcgttggcctggcatggtggctcacgcccgtaatcccagcagtttgggaggccgaggcgggcagatcacgaggtcaggagatcgaaaccatcctggctaacacggtgaaatctcgtctctactaaaaacacaaaaaaattagccaggcgcggtagcaggtgcctgtagtcccagctactcgggaggctgaggcaggagaatggcgggaacccgggaggtggagcttgcagtgagccgagatggcgccactacactccagcctgggcaacagagcgagactccgtctcaaaaaaagaaagaaagaaagaaaaagaaacagggttttgctgtgttgctcaggctggagtgtagtggtgtgatcacagctcactgcagtcttgatcttctgggctcatgcaatcctcccacctcagcctccccagtagctgggactacaggattgtaccaacatgcctggctaattttttaatgttttgtagagatggtagaggggcacgtccctctgttgcccaggctggtctggaactccttggctcaagctgtcctccctcctccgcctcccaaagtgctgagattacaggcgagagccaccttgcccgtcctgggaactgttttctaatcagctcatcaaaaccttcatctcccctgctaacaaagggagccacttccttcctctctgcacataccccatgtctcaccacgatgatggagctacagtgggacttggaatccagatgtgtgaaggatggagggttgaaggtacgtagacaggtgatgggcaaaggggtccaggaggtggcaaccccaagtgttcttggccttggccttccccacctctctgggactgggccagtttgagcatctcagctgcctcttctgcccgcccccttgttagccgcactcagcttcctgccccaccagaggaagtggggagagacggcaggtgcagtgatggctggcggagtcatggtgagtccttacacccagaaacctgggcatctcggcccccagcccccatgcctggggtccccagaccccactgactcttcctagcccaggaactcaagtgatcctggggaccctgcctgccattgccagcagcctcatattgtccacccccatccataggacaaggagtacgtgggttttgctgccctccccaaccagctgcaccgcaagtctgtcaagaaggggtttgacttcacgctaatggtggcaggtctgggggttttggagagggaactgcggaggggatgtccttaggaggccctggctgtcccctcccctgaccagttgggcctgttctgtccacaggggagtcaggcctagggaaatccaccctcatcaacagcctcttcctcaccaacctctatgaggatcgccaggtgccagaggccagtggtaagaccctccccaccctcttgaggcagtagcccctgtccccaggttacaccctagtcttttccatctggggactcaggtagttgactgctttttttctgagactttcctcccctgggaaatgggtgcaggcaactgtgatattgacaaaggaaattaattctgcctcagagcctccccggatccctgacctctcccccatcccacagctcgcttgacacagaccctggccattgagcgccggggcgtagagattgaggaagggggtgtgaaagtga

SEQ ID NO: 1869 - DNA, 6000 bp, Homo sapiens
aatcacagccaggagcttccccgtctccatctgaatgtgtgtatcagtaggacgtaactggggtcagatgccaggggcaagctgggccccaaaggaaggacctgggtggtgatgctcagaagtaaggagagcttcaccccacggggactcacatgctcacctcctctctaccaagaagctgagtgtgaggaggagagaggcatcactcactcacacacacgcatatacacacacatacacacactcctgtaggtgcattttcctgcagccccaaagtttccgttgtaaggcatcacatttgttttacctaaagcaaaggccaccccatccaaacaagggctctggagatgcaggcaggaggccacatggcaaaggggacccctgctctgcgttgtagggattgaatcaggcaatcatttttaaatggatcaaacacccaaagctcttccaattctaccaaagtgaaaagagcaggtttcgatgattctagattctaggattcttgtgtcattctacaacagcttatcaaggctggatctgtgccaagctctgtgctggaatgtgaccttggacaagcccttccacctctctgaacctatcttctcatttacaaagtggggccatgattccctatctcaaagggattgctataaggcttagaaataatgcacgtgggctgggcatggtggctcacgccggtaatcccagtacctgggggggccaaggcaggcaagattgcttgagccaaggggttcgagaccagtctgggcaacatgccaaaaccccatctctactaaaaatacaaaagttagctgggcatgatggctcacgcctgtcatcccagttactcaggaagctgaagcacaagaatcatttgaacccatgaggcagaggttgcagtaaggggacattgcaccactgcactccagcctgggtgacagagcaagattctgtctaaaaacatatatattacaaaaattggctgggcatcgtggtgcacacctgtagtatcagctatttgggaggctgacatgggaggatcgtttaagcccaggaggtcaaggctgtagtgagctataatcatgccattgctctccagcctgggcaacagactgagaccgtatctcaaaaaaataaaaaaaaaaagagagagaaaaagaaaaagaaaagaaaggaaggaagggaagaagggagggagggagggaaaggaaagaaagagaggaaagaagaaagaaagaaagaagaaggaggaaggaagggagggagggagggagcaagggagggagagggggagggagggagggagagaaggaaggaagaaaggaaggaaaagaaaagaaagagaggaaagaagaaagagaggaaggaaggaaagggaagggaggaaggaaggaaagaaggaaaggaggggggaggaagggagagaaggaaggaaggaaagaaagagaaagaaagagacagaaaggaaggaaagaaggaaggaaggaaggaaataaagaggagatagaaagagagaaagaagaaagaaagaggaggggagggagggaggaagggagggaaggaaggaaggaagaaagggaaagaaagaaagaaaggaaagaaagaaaaagaaagaaagaaagaaagaaagaaagaaagaaagaaagaaagaaagaaagaaaagagaggccgagtgtggtggctcatgcctgtaatcccactaatttgggaggcagaggcgagcagatcacaaggtcaagagatcaagaccatcctggccagcatggtgaaacctcatctctactaaaaatacaaaaattagctgggtgtggtggtgcgcacctgtagtcccagctacttgggaggctgaggcaggagaatcgcttgaacctgggaggtggaggttgcagtgagccgagatcacgccactgcactccagcctggcaacagagcaacactccatctcaaaaaaaaaaaacagagagagagagaaagggaaaaacaaaagaaggaaaggagggaaggaaggaaggaggcatgcgaaggactgcagactaaaggcttatttctattatttattagaagaggtgactcctaggttgggtgtgttggctcacacctgtaatcccagtgctttgggaggccaaggcaggaggatcgctgagcccaggtgttggagatcagcctgggcaacatagccagaccccatctctacaaaaaaattaaaaaattagctgagcatggtggcatgcacccgtagttccagctacacaggaagctgaggtgggaggatcgctggaacccaggagttcgaggctacaatgagctatgattgcgcactgcactccagcttgggcaacagagtgagacctcatctctaaaataaaagcagaaaagaaaaagtgatgcctgatgaacgtcagaagacaggcaggaactcaccaagtagaccaggaggaaaaagaggccaagcagagagcagctcccacaggggcggaggttcacggatcagcaagctggaaggggcagctgaagaggttggcaaggaccttgaaggccaagccaagggcttgggacttgagtttgagggcactggggagtcatgagggggtctctgagccaggcaggtgcaggatcatatgtgtgggttaggaagatgtatccttctggccacagtgcacaaaaggaaatggagattctggaaggataaaggccagtgagaaggcatgataaacatccatgagccaaggaacactggctgttggaccacaagtgccacccatggtgaggatgttggcacacagcttaccccagcccacatgctacaaggatggggagcaaggccaggcacagtggctcacacctgtaatcctagcatgttgggaggccaaggcaggaggactgctgagcccaggactttgagaccagcctgaacaacatagggaaacccattctctataaaaattttaaaaactagccaggcatggtggcacaactgtagtcgcaggtactcaggaggccgaggtgagagaattgcttgagcccaggagttcaaggctgcagtgagccacaatccctccggtgtactccagcctgggcaacagagtgaggtcctgtcttcaaaagaaaaaacaaacaacaacaacaacaacaacaaaaaggctttcagcagggtagcagagcactgctccccatcgtggtttttgtttgtttgtttttgttcctgttttgagatggagtttcgctcttgttgcccaggctgaagtgcaatggtgtgatctcagctcactgcaacctccacctcacgggttcaggcgattctcctgcctcagcctccccagtagctgggattacaggcacctgccaccacgcccggctaatttttgtatttttagtagagatggggtttcactctgttggccaggctggtctcaaactcctgatcacccacctcgccctcccaaaatgctgggattacaggcatgagtcaccgtgcccggcccatcctggttgtcttgtttgtttttgagacaaggtgtctgttgccgagtggcacagagtgcagtggcacaatcatagctcactgcaccctcaacctcctgggctcaagtgaccctccggcctcagcctcccaaagcactgagatgacatgcgtgatgagccactgcacccagccatgctggaagcttttgaatacaacatgctgcaggcatcacagcctcattcattccttcactcagcaaatctttactcagcacctaatgtgttccagatacatttttttttttcagatggaatctagctctgtcacccaggctggagtgcagtggtgcaatcttggctcactgtagcctctgcctccgaggttcaagcgattctcatgcctcagccgccctagtagctaggattacaggcgccctccaccacacacagctatttccaggtacattcttgacgctaggaattcagcaaagaataagacagttaaggtctccgatgctcataggcctcacattttagagagggatgaatgtccaataagcatataaacgtataatatgtcagggtcgtatgactacaaggaacagtgattgttacaacccagatgagagggaaaaataaaggattccaaatatcccccttgggaagtagagtcaggattcaaacaaagaactgtatggcttcaagttcatggtctttaatctcctggaggctgtctctctttcttttttcttttttttaatcagtgttgggatcaaattctggctcccctaggaagcatctggcaaggtttcgggagccatcgggttggccatgttatgctggaatatttataagcaccggagggttatccccatgtcgtagaaaatgaaactgaagctcagagagatttgcactctctgcccttttgtacaactcatttttccccagtatgtggaattgagggagcttcacgcttctagctgtcatgattccaagattctacgacatgtgggagaggatcctaaggttcggggaaccgcggaggtttcggggttctagaaatccgaggttctaagcctaggtgctccaataaacccagtgagagccagcccaggtttccggtctgtacccgctggtgcaagcccagagacaagcaggcgccacccatgagcccctctgcggccccctcccgggtcccacctcgcaggccagctggagggcgcgatcctggcgtcccccgacggcctggggccccaatccagaggcctgggtgggaggggaccaagggtgtagtaaggaagcgccttttgctggagggcaacggaccggggcggggagtcgggagaccagagtgggaggaaggcggggagtccaggttccgccccggagccgacttcctcctggtcggcggctgcagcggggtgagcggcggcagcggccggggatcctggagccatggggcgcgcgcgcgacgccatcctggatgcgctggagaacctgaccgccgaggagctcaagaagttcaagctgaagctgctgtcggtgccgctgcgcgagggctacgggcgcatcccgcggggcgcgctgctgtccatggacgccttggacctcaccgacaagctggtcagcttctacctggagacctacggcgccgagctcaccgctaacgtgctgcgcgacatgggcctgcaggagatggccgggcagctgcaggcggccacgcaccagggtgagccgcccccgttcccctccaccccgtctttcccctccacccacaccagcgcttaccccgcgggctcttccgctttctgttcctcctacccctaaacaaagctgctctaccggaaaggaggctccccacgcttggcctaccgaccaacgggaccccggccccacggcgggaagggaagggaaggggatcacttggcccatatccttccaggctctggagccgcgccagctgggatccaggcccctcctcagtcggcagccaagccaggtgaggcctccacacccagcccggccccaccgcactcctgcacagcctgcatctgtgctcccgcaaccagggcagggcagggcagggcaggcacggcttggcaaccctgcgcaccccacccaccaacccacaccctgcgggggaagggagacaatattaccctcatcccactgcatgtggggtcctggtggccgccccctggagccctgcccctaggcttgcagaggaattcctgaagaactcaagttcagcagggacaggccccacaccctggctgctggctcatgttctcctcccacccccaggcctgcactttatagaccagcaccgggctgcgcttatcgcgagggtcacaaacgttgagtggctgctggatgctctgtacgggaaggtcctgacggatgagcagtaccaggcagtgcgggccgagcccaccaacccaagcaagatgcggaagctcttcagtttcacaccagcctggaactggacctgcaaggacttgctcctccaggccctaagggagtcccagtcctacctgg

SEQ ID NO: 1870 - DNA, 6000 bp, Homo sapiens
ggtcagataattccttctcttctcataattaaaaatatatttttttaaagatagggtctcactctgtcacccaggatggagggcagtggcacaatcatagttcactgtaactttcaactctcgggctcaagtgattctcccacctgagcctctcaaatagctaggatgacaggtgcacaacacccagctaattttttctttcttcttttttttagagataagatcttgcgggccgggcatagtggctcacacctgtaatcttagcactttgggaggccgaggcaggcagatcacttgaggtcaggagttcgagaccagcctggccaacatggtgaaaccccatctctactagaaatacaaaaaatttgcccagcatggtggcaaacacctgtagttccagctactcgggaggctgaggcaggataatcacttgaacctgggaggcagagattgcagtgagccaagatcgtgccactgcactccagcctgggtgacagagtgagattccgtctcaaaaaaaaaaaaaaaaaacaactcgctatgttgcccaggctggtctcaaattatcctaccacctcggcctcttgaagtgctgggattacaggtatgagccaccactccccagccccagctaattttaaaaaatttttgtagagacgggtcttgctatgttgtccaggctaatcgaattttttttttgagatggagtctcgctctgttgcccaagctggagtgcagtggtgcgatctccgctcactgcaagcttggcctcccgggttcacgccattctcctgccccagcctcccaagtagctgggactacaggtgcccaccaccacgcccggctaattttttgtatttctagtagagacggggtttcaccgtgttagccaggatggtctcgatctcctgacctcgtgatccacccaccttggcctcccaaagtgctgggattacgcgcataagccaccacgcctggcctttatgtatattatgtatatattatatatatattacagtggtaatgaggtgtgtgtatatatatacacatatatgtggaaaacatatatattcatattcatatctcatattatcacaatagacatatcttctccactatttttcccacactaattgttagatggctaaatttattgggtcaatttctctgcttactataccactgcaattatataagcaaactgaacctttggaaaatgctaattaataaggcagggtttgacacgactgggtttgaaaggccagcagtggggctagaaatacctaccacatacaactgtgctgccccatcactgaataatctactttaagcactgaaagaaattcagagattattcagtgatccaagtcccacaattttttctttccagagtaccaacaatcatcaaattatgtggtcctgacaccctcataacaagaaccatcagtaccttcttctgtatccccccaaaatattttaacctgcatcacttactctatacattcaaacctagttaaagcagaaagcaaaactattttctgactgcctcaatgatatatctggagttgtctaagtaatggattacacagttcccaattacttgtgaacagtatcaatggtcttcaaaaatactacagttcctataccccccgtcccagtccatatccacctcctctccatcccaacccttcacagttacacaagcatactaaatcaaagcaaaggaattgaacaccaatataagcctggcagaaatctgaaatcactgccgcctcaaactttagatcactgcagcgctcaggtgtactgtgactcagcattttacagtgcctgagacatgaaatgagataaaggtccttttcccttcacagcattggctaaacatgaagccaaaataaatatgctacctcaaaacagttagtggctggaacattacagtgctcacactgacacaggtttatctcagtctgtgatccttgggaggagaccctgtgtcagtttaagcacacaaagttcttctgaaataactcgagctataaaattagcaaattatgctgactacaattaatacccagaaatggagaaaatattgcaaagaaatgaaaatgaaattcaaaaatagttactgtggttactggtctagtcaggtaaaaaactaaaataaaataacaagaacaaaagagggaatttacccagctactcttcattacaatatcagaagctaaaatggcatcaagagagaattttttcctcttgcaaaaaaaaaaactgagtaaaactgaaacaaataggaaactccagcccttttaaactgttcatgggcagaaggaaaataagataaaacaatatgaaacaaataagataaattaatatgaaggttgcaacaaagacagattttcagttcatattcttacgtggagcaggaactaacagagaaatgagacgagagaaaatgataactgacaagcaaggagatttgggaagatgaggtcatgaaaagggacggaggggcattccccataggtaatggaagaagtcagggaatcccagtagaaaagccagaaatttaaatgagcaaagacaacgtaagcatatgggccaagaacaatagtttatacttaatttcttttagcttcttagtaattttttaaattttaattatttattattattttgagacagggtctcactctgtcacccaggctggagtgcagtggtgtgatcttggctcactgcaacccccacctcctgggctcaagggattctcccacctcagcctcccgagtagctgggactacaggcgtgcgcaaccacccccagctaatttttgtgtttttaatagagacggggtcttgccatgttgaccaggctggtctcgaactcctgacctcaagtgatcaggacttgaggcaggagtgatcccgcctcagcctcccaaagttctgggattacaggccactgcgcccagccctaagtaatagaaatgtataactcttttaaaccaatgatataaaaaataacaagccccatcttacacctgaggaaacctcagaaaagttaagtaacttgctgaaggtcacattgttcctaaatggcagagtcagactaccaacctacacagtctaacctcgccataactttacaccgtctcttacgaacatctcaaaatgtgaaaagtagagaattggattttacagccgtgcatgaggatgacgtcagcatttacacggcaatggcggttggcagaggcagtggctcaggcctgcaatcccagcactttgggaggccaaggtgggtggatgatttgagatcaggagttcgagaccagcctggtcaacatggtgaagctccacctctactaaaaatacaaaaattagccgggcatggtggtgggcgcctgtaatcccagctactcgagaggctgaggtgggagaatcacttgaagccgggaggtggaggttgcagcgagctgagatggcgccactgcactccagcctgagcgacataacgagacgctgtttcaagtaaaaaaaaaaaaaaaaaaaaaaaaacaaaagagttcgagatcctaccacaaaaggtacaaacgaagggtggtgggaactcgaatgagatagcagtgttcaccagtgcccagtaaaggaagacttcacagagggagcaggatttcagatgggatttgaggaaaagggtttaaggactattaatgacttatcactgattactcttagggttttcaagctaaatttcagagtccttgtcatggaattcaggccctccacaactaggtcaaagggaacgccaaggaagaaacattatcctgagtgagatgcttatgctgaagtctttgctatcagttcaggttccaagggatcagaaaaccttacttttctgtctccataaaccgtaaatgggttgaaggcaggcacttttgtaacactcctctccccggaccaggcctctgtacatcatagcacttggtagatgcacagcatactttctgagcgaaactaaaacgaatgtaaatcaagtcacctggtggccagacttgccttacaccatctaaacctctggtgttagctaattttaaagctatcaagtaagaggcttaaacacgtggtccagatgcaacatgtggaccttggtttggacccggatgccacaaaccaattgtaaaaggacatgagatcatctgaaaaacctaaatatggactgggaattagattaaggaattgttaatttcattagatgagattacatcgttatgcctttaaaagttgtctcttagatattaaatatatacacttagggtatttatgaatgaaacggtttcccttaaaacactagaaatgtatggtggagccaatgaaacaggtaaaaggtagctaactgcactatggggagtaatatactgcttctgctaaatgtttcagaattctcataatataaaacacaacatacacacacacgcgccccccagtttttttcatcgtaagccccgagggagccagacccagagggtccaccgacgtcccggattctaataacgacatctgcgcgccaggcgggcctcctgcgggagccggggcccattttctttcgaagctaacgaagctgctgcgcaggcctgttaattccctcagcagccagtgcgaggttaaacacgcgacctcgcaaccatggcttttgagaggaagctgaattcctggggtgcgccgtgcacagttcttcatttcctacgttggccctgcccagccgcctggacctggaggaaaacagagaacctggcccactcttcaatacttcgaccccagtggccgcgcctcgggcgctcgggggcgggctctgcacagcgacgtcacggcgcaccgtgcgctgggtcaaagttcagccccgcccccgcttccccctcgctgtctccctcggcctgtgccgccgccgacgccgcttgtgggcccgactccgctctgtctgcttcgccaccttctccccgagcactgcccggccggccgccatggctaacgtggctgacacgaagctgtacgacatcctgggcgtcccgcccggcgccagcgagaacgagctgaagaaggtatctgggagcgggccgggcgggtgtgaggggcgcggggcctgcgcggccagggatgtcttcttcagccaggccgcgctactgggctgcccgcgagccggcgccggccgtgactggcccgggctgggagtcggcggcggcggcgggaccggcctcgccgcgagccgcgcactccggcctcggctgaccttggggccgccggccccgcccgcccgcagatgcagcaaataaaactcactcctgcgcaaacacgatgggagcccttccttcctccctccttgaacgagcgccgggggctggtatcccccgggaggcagcagctcgcccggtccttcgcgtcgaggtcaccaccccggaaaaacaggttggaccgaggtgctcagcgcatcccggccccgagagagaagctgtccgccccgcggccgtcggccccgggtctggtgctccgcggggaggaacggcggggaggtcgaggccgcccccacagagcgcctcgggcggatggggttgtttcctgggttccgcggccgccggctgcgggagctcctccctctctgcgtccctcgcccattgacccggaggtagctgggtctgtgtttggatgcattgttctttgggcaggtaatgctaatgtcctgtacctgcttaggaataagccgtggtcccagccaaacgcctgagtgtacagtaaacataaatagaaggccttattattgctatttgcaatgctgcgatatctttcatctcaggatttcaaagcacacgaggcatttaagccccacagcatcctcaccaggctaagagcatccagatttgtaagccgagaaaaatgagaatgctccttaggcagtgagaagagtacagtggacttcctgttaccttaccggaaatgctagtctgtattatat

SEQ ID NO: 1871 - DNA, 6000 bp, Homo sapiens
tgtgagtcaccatgcctgtccttgaaatttgttttttttttttttgagatggagtcttgctctgtcgcccaggctggagggcagtgtcgtgatctgggctcacttcgagctccgcctcccggattcacgccattctcctgcctcagtctcccgaatagctgggactacaggcgcccgccaccgcgcctggctaattttttgtatttttagtagagacggggtttcactgtagtctcgataacctgacctcatgatccgcccacctcagcctcccaaagtgctgggattacaggcacgagccaccgcgcccagccgaaatctattttcttaagtaaggtggggataaatgtctaactttggtcattggaaaggttaaatgagaacatatgtaaaccattgagtctacctggcacttagtaggtgcttaatatgtgtttggggcagttcttcattaatgaagaactgtgtttagcttgctgactctggaacccgttgagactagcagcaagaccaaaaccaacaaccaaggtccaaggaaagacgagaaaattaagcatgaaaatttatatagaggggttaaggagttacaagagtaatgtaataagaatttatgtggctcttcctacttaagggaaagggaagggagtggccattcttgccatcagtctctgttggcttgctggagattgaggatacctatatattttggaaaatgctttagcatatcagaaggttatctgcaaagggttgagaatgaaaatggcattaggcttttctttcacttacatcattgaatagcagaagacagtgggcatagcttacttagttcttagagaagagagttgtgaccaggattgtaagctgtggaatttatgcaagagcttcagacttagactaagatggagagttaatcacttacgtaatcctttcagaaactttctttgaagtattgtgatcacaccacaaaattaaggattcaggtgtagttaggtttgattaattgctttgacaaagttaggagcttagtacaatctttattgtgcctagtgggaaagggaaagttttactattggcatgttgaagggcttgcattgttttagggggatcttacactttatttattctttcccagacagggtctcactctgttgcacagacatagctcattgcagcctttacatcccaggctcagatgagcctcccacctcagcctcccaaatagctggctctacagcggatgccaccacacccagctaatttttttgtattttttttgtggagatgaggtctcagtatattgcctaggcttgtctcaaactcttgggctcaagtgatcctcccacctcagcctcccaaagtgctgggattacaggtatgagccaccaaactccatgtatatctaatgtttagcttgggtggaagcctcaaaataaagtgacttagcaagtgttgtattttgctttgaacacatttaagtcgggatttgcctttcctctttgtcttctgttgacagcagctttcctgggtttccctcatctccagtaatcaatctttctatacctattcagtgtaacttcttctgtagctgcaaagttttcagaattatcttcaggaaaaatggaggttttaggaaaaacatacaatttttaagaaatcattttattgctttgctacagttctggaagctatagattgtttaatttattgtccttataacagtgtttgattttttaacttttggcattttaacttgttgaatttttaagagacttgctttgattttgtcattgtgtaagaagcaagtaagtcttcaaatagaagcaatgtttaattaacattttaacgtaaaacattttctacataatacctgccacaatgtcaaatgagtttggaaaatacccttttaacctaaaggcattctgggaacaagaaaagccttaagtgttttgaatggaggagttttatttaattaagatttctaatggaaagagcaaatttgtaatctgatacctataattttattttatattttattgtttctaagaataatttttgttttactagagatggggtagtgataattgcatcctaccctttcttttttttttgagatggaatcttgctctgtcgcccaggctggagtgcatgcagtggcacgatcttggctcactgcagcctccgcctcctgggttcaagtcgatcttggctcactgcagcctccgcctcccaggttcaagtgattcttctgcctcagcctcccaagtagctgggattacaggcacacgccaccatgcccggctaatttttgtatttacttagtagagacaaagtatcaccatgttggccaggatggtcttgaactcctgacctcaggtgatccacctgccttggcctcccaaagtgctgtgattacaggcgtgagccaccacgcccagctgttttttgttgttgttgttttttactaaattaagaataaacatgttttactttttgctcattttgactgttttcacagttgttaatcagactaatctttataaagcagtttattgtcccctttggagaaaatacagctaaaaatcaccagtatcctcatataggtaactgattcattggtctgatgttgtagccctcttggtttctcaccccgtccctcacgtctgtgttctatttgtaacttcatttacaatatattatgatttttttccatatctgactacatttctccattttaaacttttataagtaatttataaaaggaaacaaagattaccacgtggaattgagaataaaagtttatctttctactgttaagtatgctaaggtggtaaagcaatggctgaatgctctgaaattactaagacaacattaaaggctgattctaaaatgtttttgtttagattgacatctacttaaactatataccaaactgggcttgggacgtaggctttagaaagtgtaggtaatagtgcattcttgctaagttttggatttttgccagttttggattctatgggcttgtcttaaggtacttctgtgaacttttcagctttttgtaaaactagtgtaaatattctacctagttgagaattaaggtttattgtgctaaaaattaaatggtggttgattcttggcagacatgtttgatcacctttgcaaggttaaggcatcttttggagtgtgtttcttggaatctacaaattctgagtctgtgactaattgatgacttggcaattaaatcaggtctcagctgaaaacttaaatattctggaatatgtaccatccatgatacacataaattacccatctcaatctagacaaaagccagttgaggctggaaacagtccagttttacagctcaacaactggtggagccggggtctgaatccaagtgtagatgactctagaatgcttccacttttctgacttaattaagtagaggggcctgtccatagatcagtggttttcagagtgtgctgtaaggctctgtacagatcttttggagtttggtaaacagtgaaatatcttttgcttgagaaataatcagtcatctttttgttgtatacattttggttctgtttggaagagtttctctatatgaaattttcttctctagggaaatttaagacctgtcgaatgaaaaaatattagaaaataaaaatatagactgggcacagtggctcagcactttgggaggccaaggcaggctgatggctttagcccaggagttcgagaccagcctgggcaacatggggactccctatctttacaaagaaaattaacgagagtggtggtgccagcctgtggtcttagctactggggagattgaggtgggaggattgctcgagcccagaagaccgaggctgcggtgagtggagattgtgccactgcactcagacctgggcaacagagtgagaccctgtctcaaaaaaaaggaaaaaaagtagttgtggggctgactgtgtctattttcaattatatttcttttcctaatgctgttttgtgtagcctgtattgtaaaacgaggttgaggtgattgaacacacttaatagagtgaggaagtggttagagttaaaatttcctgctgaaagtgggtaatctgcaattccttgcattgggttcactcctcactgccaactcttgctgcattttgaggctgccctaagcatgatgtaatgacaggttaaacctctgcacgcactagctgatgcaatgcaaatctgaggcgcaggactttattggggcaagggtagtgcttgtttaaaaacaaaacaagctactctgcgtttaatgaggccatttaagatggctttcccagagtgggaagagagtataatctcttaggaggtttaagtaggagtttaatgtggcagaagtgtgcttactacttttcctgcaaagtcttttcacagtgggtaaggagagtttaaaatatagtgctgataggagtagaaatgaagtgagctagaattgaggaaatatggtagttgatgcccggtaaatagccgttgaatgaattagggagaatgttttcactctaaaaatttagagttcgcacgataaacctggagcgtagcgccagtgtggccacgcatttcccagatacgctgtagctcttagatcgaaaccataagaaactgccgatattcgactgttctgacctaccgaaaatagcgtggttccacctaattttaaactggtggaaatgctgaggaaggttcgatgtcgctggggtgggatggggtcaacggcggggtggcgggggctcccccacgcccccggcctttggctggggggcggggcttgcgggcacggccccacccttgcgcgagcaagacgggcatcgccctgtgcgccgcgcgccctgaactggccctggcgccccgggttggagtaggcgttcccaacgcaggcccagccccggccgaggctccaaatggctctcccggcaggcaggctcctgcagtaactcttgagctggctcagggagcgcacttccttctcagccagcgcgtcgccccctgcatccgtggcctccactggagctgggcaggaccctacccagtgaatctggagaaaacaaacttgggagacagacgaaagcttagggcacattggaggacagcgcagctgtggctcccatttttggagatgcagtcgaatttgagctcacagggaggtgtggttgcctcctggggatggaaaggcttcctttctccacctctgtaactggtgcttctgagaagtaaatggtatttggatcctgacctcagacgcgaatttgggtcttctgtgcttaggagcagaaagagcccaggaggggcctgttcctttacttcttgggggaaacgcaatgcgtggcctgacttctcatgacgggaaaggctactccaccttctctgtactcctggaggggagtcttgttcacatgtttaccagcggccaggacaaggaagagaaaaggtattgacattaagaggatggtttgctgaggctgtgaaacttgaacgctattagtcagtggaacctgcctggcttagggaatggctgcagcagaatcgagacgtttccgaggttctcagtcatgtttcatttgggctgctgttcttttttctgtttaaatcaaacttcaggttacgtcatgacttctgcagggctgtccttggttcctactgcagggcgcctgtgtggttgggattccttttctgtttcaagatggagctgggttccacccttggagctttgagaggctttagcagttgctgtcctgtaatacctccgttcccaagaaataccgttcacatttcgcttctttttcacactttgaataggagttaaaatgtgctttctgtagtgtttggaaaatggcaaagatatattgtaatgtgagcccgaactgttgttgataaatgtataactattgctaggtcaagaaattgtgaacaacagtgttttgcttggtccgtagctatattgtgttaaatataaactgagtttac

SEQ ID NO: 1872 - DNA, 6000 bp, Homo sapiens
ctaggtgacagagcgagactccgtctcaaaaaaaaaaaaaattaagtaacccatgaacttgtgcgtgtgttaagcatttcttgaatgctaaatgtttctaaatgctagtttctccaagataatttggaaagaaagtcaaatatctactaacaatgaatgaaaggatgtaaaagagaaactggaaacagattccatagaccgtgatagttaagggcatggtccttgtttaatatttcttcatttgctcaacaaaaatgttgagggccctttatgtgtcagccactgtgctaggcatagatggaaatacagacatgcaccctgccctccagggatttattctacttattgccatgtcatagcagttcaacaaatacttaaattttttaaaaaggctaaggccgcgcatggtagttcacgcctataatcccagcacttggggaggccgagatgggcagatggcttgagctcaggagtttgagaccagcctgggcaacatggtgaaaccctgtctccaccaaaaatacaaaaaaattagctgggcacagtggcacgcacctgtgtttccagctactcaggaggctgaggtgggaggattgcttgagcctgggaggcagaggttgcagtgaccaagatctcaccagtgcactccaacctgggtgacagagtaagactccgtcttggaaaaaaaaaaaaaaaagaaaaaagaaaaaggctaaattctgacaagtgtaaagaaaagatttggatccatggaaatgagcatctgtgggttgggcatgaggcaggggttgtacctaatgcactggacagttatcactgcattccaatgaactcaagaacaacaattacttaaactaattgtcagtatcacctacttccaccagctacataaaaacctcaatgattttctaatttttttttttgatacaaggatcttgctctgttgcccaggctggagtgcagtggtgtgatctctgctcactgcaacctccacctcctgggttcaagtgattgtcctgcctcagcctcccgagtagctgagattacaggcatccaccaccacacctggctaatttttgtagttttagtagagacgaagtttcaccatgttggccaggctggtctccaaatcctgacctcaggtgatctgcaggcattggcctcctaaagtgctgggattacaggcgtgagccaccgtgcccggctctaacttcttgaaaaatgtgatgcctagcatgtaacctttttcctaaagaaacttgattatattgaaggaaaactacagttatgggcgaactcatttcccaaccacttgggcttttgggaacttccttcagctacttcctgtttcattcttggatgctcatgttgtgtctctaacttctccaccatgtccaggaaaatttgtttgggatactgtttaacacattcaccaacctcagacagtgactggcaacaggtgtgtctgataaagaaaacattgtttctgctctgctgtaggcatgtctgacaagttggggacctgctttcctttgcaaagcttataggagtctatttgggagggaggaaccgccttccagtttccaggctgaaaaagattctgtttcgctaccagcagagccaggcttggaagggaatgctaatatgtttccagacctatccacctaagctgaatgacaaatgggtatcagtggtttaatgtaagaggagatagctatagtttcctgggcaagagacatctgtgattgcctggaaacaaacacagcccatcggtgattcaatagatgggtttggtcttgtgaactggtctattgtaaaataactatattgacatgaagacacttggaaatcatctgttcagtcttaactagtttagccaactttgacagcattatctgagaggctgaggcacaagaatcgcttgaacccaggagatggaggttgcagtgagccgagattacaaaataaataaataaataaatatcaatttaatataaattcatagcaaaacccccaaataaagatactctcatcagtgcctgttttatttattcatttatttttatgtttttagagatggagtgtccctctgtcacccagatgggagtgcaggggcacaatcatagctcactatggcctcaaattcccaggttcaagcaatcctctcattttggcctcctgattagatgagattacaggcgcacaccaccctgccgggctaatttttaaactttttatagggacggggtcttgctatgttcttaggttggtctggaacttctgggcctcaagcgatcctcttgccttggcctcccaaagtgctgggattacaggtgtgagccaccgtgcctggccagtgcctgttttattcataagaggaaagtaatttacatcactggtaccttaactacgggccagatgcaggaccagagcgttatgttccattgcaatagatggaattaccatttgatgtgatttgaggggaccaggaaggctccctatccagatgtggcctgaaaatatttgtcaccgttactgaaatcccatcaattggaggattatttggataggctttacagtttacaaaatgcttttctatggataaactgtcaaggaagcagagtcaactccctgttcagaaaaggtgcttagttacccccacagtggagctattttctttcaaatggaaggtacatttttttgagagggggagtaaattaaatttataatggtgatgtttatgtcccacccatagctaccacccagaattaaccaaatcagattgagccccgcccaaatctaggtaggaattctcagagatggaattaacccgattaaatttgttttgtataaaagggaagtggggaaagtaagaagtaacttggactcttctagaggagagcaggcacaaactaagccaagaaaagcacgtttgagaattccagaggcagaagttgcttctgggtgcctgacgtcaacgatccagcacttcaagactggtgtgcggcatcctcaggggacactgtgtcctgggcacccctgcagtttaagagaatccactagtttataaggtaagtcctcgactgtcagcagtgggccagagacagactgttattttcagatggacaaatgctgttgggtagaggaagggatgcgggataaggaggacaaaatctgactttggcaaagccgggtgtttagaactttaatcgccacgttggcaagttctctcttagtccgtatccatttcactgcttgcagagcggcccaggggttctgggggcgagaaacacatctcaccccagagctgctcctcgcccaggacagaactcctctgcccttcacgaccaggtcaaggccacatggctatgccaagcacatagtctgtaaaaatggaaaatttacctctaaactgaagtgaaccgaactctattgaccttcccgtgtactgaggagctataacttctccccaaaaatgtgaaagtaaaattgcagtttaaatcatgtaattaggaatactgtaaactagtgttttgcacatataaactttatcatacactgggaatttgtacatacgtgcccggtatgggatttttctatttttatttttatttttttgagacagagtctcgctctgttgtccaggctggagtgcaatggcctgatctctgcctcactgcaacctctgcctcccgggttcaagcgattctcctgcctcagcctccgagtagctgggactacaggcgtgcaccaccacgcccggctaatttttgtatttttagtagagatagggtttcaccatgttggccaggctactctcgaactcctgacctcaggtaatccatcggcctcggcctccctaagtgctgggattacaggcgtgagccaccgcgtccggacggaataccattttaatagatcttacatggaattccagttagggcttgtaaatgtctcagatgcttgcttctgctcatagcacccatcaaagaattgcaagtgatgttttccttttattatttcaagaagtggaatgcagagtccctaattagggactttccagatgagcatggacacaggaaaacgcgtgcttccccattacccacttttcagctgaaacaagcttttgaagctcgtcccgctgttgctgaggagcggctcaacctcgggagaggctgggactctctttaggggtggggtcccggtcggcgggcagggcagccgctttttctttgggactgagtggagttgggaaggatccgtggaggcgctgggctaaatcagcagacaaaacaagggggagggcacaaggccgcggcggcggccagcctggggctcgcatcccgctgggcgacccctccggccggagccgggggggtcacgcggccccggaacaaagcgccgcgggaggagctgccctgagccgacgggcaagcgctagcttctcgcgggccagagcgccacgtgccaggatccgttgaatgcgcggtgcacgggcgcagcaacggtagccgagtagcccccgcacctactgccgcctttggagacccgcacagctacgcccgcggaggccgccgccggccgcgccaacgcctgtgcgcctgcgcgcccgcgaaagccccgcccccccaggctcccagcgcgcggggccgcgcctcctcatggccgccgccgcagtgtgtggtatttagcgggggcgcgcggcgggctcgaggacgcgcgaaacggcggcggcggcggcggccaggggggagccggggcggccgttgcggggcgcgctctcgagaggcggcggcggcccagggtgtcccgtcggtctcggcgccgggaagaggcggtggcgctgcccgcggtggcgggggttggcgacggagcgcgttggtgccaggaccggggtccgaggcgcgctctccgcccacaggtaagtggggcccggcctgagggaggagccggcggcgaggggctctccgacaggcgggcgcccaggcccggtaatggcggagggcgggaagggcggcccggccggggcgcgggcagtagtcggcgcggcggcgcctttgtctcggccggagtcgggccgcccggtcgagcgccgccccccgcccctcccctgccttcagccttcgcaagccggctcgcccccgcccctggagccccgggcccggcggggtggcggcgggggtcggccccgcgcggccgggccgagggcgggggaagggcctcggcggcggcccggcccccgcgcgcccgggaggcgggcccggccgggggtggcgcccggcgcgccccgcgccctcgtgccggcctttgttgtggagggtcccggggtgtgcggccaacatggcggaggtcagctgagtgcgggcagctgccggggccctgccctccctccccctcctccccgcggcgcccggaggcccgggccgcaccgcgccgctcggcgggcctcggcctccgctctctgcccccgacccccggctggagccgtccgggacggggctgcgctcttcctgccgcttcggccggaggcttcattgtgcagtgggaagaatgcagcctcctcccttgtttatgtcgttagagaggagagcgcgtgaacggcgtgccggggaagctctagcttattataaacctggcatttcctagggttcatttgccgggtagtttggggtcctttcttaactctcccaaatttataacttaaagtgaataacctgggccactccgatgcgtaggttcgttttcgctgtctgcccgttcctggaaagatacataatttgtttgctcggacattcagaaaagtccagcttgggtgttcggaaaatcagattgtgtgtacttcttttgccaaagtcatagaggccataaacaaacagagagacatggatactggatatgggacggtgttctgactgtcccttcctagcagttgagcatttacctttgcttatagcggctgtcaagggtaaattgttaactcttcagcagttggatgttgag

SEQ ID NO: 1873 - DNA, 6000 bp, Homo sapiens
caaggttggtattggcctcaggagtatctaattgggattagaaagagcaaacacctttggaagacctcagaagctctgaaacaggatcacagccctttactgttgatgccaccagcagttgctaagggacgaagcaggcatttcaggcactggcaagaggggatccccagggcgctgggcagagtctggctcctggcagccgcctgcgactctgcccacatccctggccctgcacagaggccagaggtctcagccggaggccagcggctgtgctgagaagtcacttgcctggagcatgcaggctgcacccgacaaactataaagaggaggcgatggctggttgggaggacacgggatcaagctggcaagtcaaggagcctctttgaacttgaatttccttctcaataaaatgaggataattaggcaacacagactgacctcccagagtgagtgttaggattaaaagagagaatggggctggcacggtggttcacacctgtaatcccagctgggaggctgaggcaggtggctcacctgaggtcaggagtttgagacctgcctgggcaacatggcgaaatcctgtctccattaaaaatacaataattagctgggcatagtggcaggtgcctgtaatcccagctactcaggaggctgagtcaggagaatcacttgaacccggaaagcagaggttgtagtgagccgagattgtgccactgcactccaacctgggcaacagagcaagactccgtctcaaaaaaaataaaagagagaataactggagaggacttagtgagttgtaaggaggagttcaacaccagtcattgtcattataaataaaagaactgggattttggcatctgggaaaggagaagacacacccatcctccacttggccaaataaggttcatcaaattgtgtctagagtgtgctcttatcccatcctgttagcaatatgtaaatatacattatcaagttacataaaattataaaatagaatgttttccatgatatacattttattaaatgtaatctccataaatagataaatgaactatatgaataaatccattgttcatttatagtctggaaagttaatcactgtctgttaatagccacctcatcaagaggggagattatggatgattttgatctcattcttttcttttcttttcttttcctttttttttttttttttgaggcagagtctcgctctgtcacccaggctggagtgcaatggcaaaatctgggctcacttcaacctccccctcccgggttcaagtgattctcctgcctcagcctcccgagtagctgggattacaggcacgtgccaccatgcctggctaatttttgtaattttagtagagacggggtttcaccatgttggccaggctggtctcaaactcctgacctcaagtgatccaccagtctcggcctcccaaagtgctgggatttcaggcatcagccactgcgccaggcctgatctcattctttttgctatcttttctgcaacgactgattggttgagtgctttttataaacaaaagtgggttctggcctgcagctctgtagagggggctacttcaacactggcctctcctaggagattgggaagaccaagtgtgtccaaatacccccaactgaatgacccagggctgctgaagtggcctccatggggccgcagtttcacagcaaaacctttttttgtctgtttgtttttgttttttgagacaggtctgttgcccgggctggagtgtggtggtatggtctcagctcactgcagcctccactgtgggctcaagtgatcctccatctcagcctcccaagtagctgcgactacaggcgcatgtcaccacacacagcttttttgttgctgttgcagaggtggggttttaccatgttgcccaggctggtctcagacttctgagttcaagcgatcctcccgcctccaccccctaaagtgctgaaattataggcgtgagccaccacgtccagtcacaaacatcttttcccattccaatagctttttttttttttcaaataaaactgacaaggaagcccaacctctaaacagggtgtggggagacagcctgcagaatggaaggggctcagactcagatcagagagacttggggctatgtggccttaggcccctcagcctccatttccttatctgtaaaaagggctcctaaagcttgccccacagggtggttgtggaaactcagtgtaatatctccagaggtgtctggtacatggcaaatgcccccaaattattagcaattattttacacattttttaaaacaaaatatataaacatggaatggctctggttaaaagggcatgatgcttccctgggcttctgcggtcaccctaaagggacctctagggagccttgacctccaaacagcagtgtctgaaatgtcctggtgcaggtgggagccctgagttggggtcagaagtcacaggcccagtccaggcgtgggagctgacaagttgcgtggccttgggtggatcactttctttctgtgcctctgcagcccacatcagtggttctcactgggaggtctgggtgggagaggggccgattttggtttgtcatggccaggctttctactgcttctgcaaacagccttgtagtttaaacccatgaataattctctctttaataatccattttacatacagtgtatatgtgtacatataaacaccaagtattttttcagttttaacctatactgcattttctagtattgcaattcctatgtaaatcaagaaaagatacgttctgtttggctcagtactttaccaagagatttcagaatatcaaaccactagtggcaacatagctcatggtatttgactcaccaaaacatcacattacacaaaaatgaaaagcatgtgaggttaatatgtcaattcacttgattagtgattatgtttgaaatatgtaatgtatacctatttcaaaacaacacatacacaatcaatatatatataattgtcaattaaaaaatgaaaaactaaaacatcacattactaaataacacacatgtttatgatgattctatacagaactgcaagcacctattttattaattctactagtgtagttgggccaaggcatttacatatttaaaagcatacatatctatttttaaatttttatttcaatagtttctgaggtacaggtggtttttggttacatagataagttctttagtggtgatttctgagattttggtgcacccatcacctgagtggtatacactgtacccaatatgtagtcttttaaaagcatattattttaagttatgttgttgttgttgttgttattattattattattattattattattattattattgagatggagtctcactgtgtcacccaggctggagtgcagtggcatgatcttggctcactgcaacctccacctcctgggttcaagtgattctcgtgcctcagactcccgagtagctgggactacaggtgcgtgctaccatgctcagctaacgtttgcatttttaatagagacagggtttcaccatgttggccatggtagctggtcttgaactcctgacctcaagtgccttggcctcctaaagtgccaggattacacacatgagccactgggcctggcctatgttatgtttttataaattgcatttcttccatatacataatacatgtaggtcagttatgttatgcatacagtaacagtaagggaggttttaaagtaattgttataaaaaggaaacattgacaatgacataaaattgtgggaggggctaaaaaggtaggatggtgttgggattgtgggttgagcaccttgcctgattgtcatatactagttttctttctttcttttttagagatatggtcttgctctgctgcccaggctggagtgcagtggtgtgaccatagctcactgcagccttaacctcctaagcttaagcaatcctccctctcagcctcccaagttgctgggtttacaagcacacaccaccatgcctggctaattttattaatttttttgtagagatgagtcctcagtgtgtttcccaggctggtttggaactcctgggctcaagagatcctcttgccccggcctagggagttgctggggttacaggtgcacgccacccagcgggctcctccctggttgtggagtggggttcaggagagttcctcctacacagaccttgtgttgggctgcggaagctgtgtcaaatccagtaagccctgcctatgaacctctttagtctgaggcttctcaaccaaatgggattcaccagctgagaaccacccttgttaagcttaaatcgacacacaaattgggagtttcccagcgacatcatcggcacccatggcccccagtctcactcaccatcccacactgggaccagatggggagcgcctcaggcagcatcagaggggcatccctcaggttcttgttgccagggatccccaatggccagagctgtgatctcacaggcccccaggcaccccgcagagcttatattctaggaccactctgtgacttgagggcaaatgagaaacctgggccaacacgtgtgtgtataaatgtggaagctgtaaagacttctttctgtgaaggagcatccttcattctgaggccatgattttcctattattttttgtattaatatgaccatgcttttatgaaataatggtgatggtaggtagaggagctggggtattgtttcacaaacatccttttacatagcaaagtagttagcaaccctctttgatgccccctgttctctctctcttatcctgaaccccaaaagtcttgcagtggaagacaaagacattaaaacacactcattcccaaggcagtgccagggcaccggtagccatctgtacctgtcacggtgaggtcacagaagaagggtgtggttagcactacctgggaaaacttcacaaaggaggtggtgtttgagtgaagtcttgaggtccccagggctgcttaccgggcagtgtggatggcatgcagtgggatggtgaaggatggggccagaggaaggaaggacatgcccgcccagctgtgtttgggatgctgcctccctggagaggggtcatgaagcctagcaggcagtggagcccaggtaatggtggaccttgaggggaacgccagtgggaaacttagacccatgaactccagactgtacattgaggccatcagtttcaaatgtttactttttggtatttgctattccaagctgaacacagggaggtgggtgagttggaagcttgtttgtgcttggaagcttgtttgtgctggatgtactttagcaggacttccccggactacagggggcttctgagccactgggctccccagagtgatgagagacctgctgtgtagactactcctgaaagactttcatgaaggcacaaaagcaacaggtttgctgagtggtgctgcccgtgccccataaggagaacggtgtatactgtttccacacgatgcagcaagccaagctccaggctgcacacttggggtctttaaaggatgcctcattagagtaaaatgggacttacttttttttttataactcaattttattctgagcccctgttatgctaggtggcagaaatgtcatctcaggcaatgttgggggcctgcccctttcctcagggcttgctatcgaggaagtcatcgagggcttgcgatcaaggcctggggtcccacctgtcctcacagcttgctgctgggacacctgctcctccgtgccccaggtctagagtctctgctggtgttgggcgcctggcagcgtttcactggggaggcctccttggctccagctcattcctctttctctgtgtctggtgcctgcccagggcctttcccattaaatggtactgggtgctctctggtcatcggctccacagtctggatggatgttttgcctcccatctgaagcttagacaaggcacgagggtcaaggatccccactcaggacccatcaacatct

SEQ ID NO: 1874 - DNA, 6000 bp, Homo sapiens
tcccctatcttgataaatctactcagtctgggcagcaggccagaaaaactcactggacagttacaatttcaactcctagcatcttgctcaagaactaagacagaatcagttaacctccacgatcaaaaatggctgtgacttaaaatctctttctttgaaggaacgttaatgtcaaacatcatttttttgtcccacagatttcagttgggcagggctcagtgggaaggttcatctctgttgtatacaacatcagctaggacaatttgactgaaggctggaggatctgcttcggcttccaaactggcttattcaacacagctgagggccagaggccttgggtcctatccacatggtgataactgcagaattcttggcacataaaggctccttccaaacctctgcacttaagagatgaccatatctcatgagcaaaagaaaagagagagagagagaggatcaaatttttgcattgcttctgggagcttagggtcaattctctggaatgatcctgggctccctgcccccaccctcccattgaaatcatcaggaagaataggggttctgtcttccagtctgtgtaggggacagtagcctgactttgatagttgctggctagtagacacaactagcctaatgacattaacattgacccaccttttgtaattttttactcaagctctgctctctccccctcctcctttactctttctttaaaaggccaagtcacatctaaaaaagttggaatgaagctcagctctttccctgctgtctgtcagtagttactcagtaaaatccgtttttcacactttaactaatgttcggctttgtttatctttgacaataggtgacctggtctttcccacagtatgttggctgggtacaaagagtgaatgaagaatgactgagagaatgagagacagagagagcacatgtgccagtcaggtgaaagacctcttgcattttatgactaagcttcataagtcaaataataacctcaaggaaatttaacttctccatatcagaggcatccaaaccagagtgactccatcttgagtgatggctaggaaaaatggggctgggactggctgggctgcattcctagaaagttaggtattcctagcccctagatgtttatagttaagggaacacattgataacatttactaaacagacccagacttaggagtgtcctgatatcccgatatcttgagaacagaagcattcctaattttgctttaaagataatatcaattcttgcaaaatatagtaattaggaagattaatcctttatcacaaacccttgtggcagagcacatctcctcatgatctttctaaatcctatttataaacaagtattgtacctagggtggatgcattcctcctcctactttcgggaacgtcctactctctatggagtaactgttctctcatcactttactttcttaataaactttcttttgctttgcactgtggactcgccctgaattctttcttacatgagatccaagaaccctctcttggggtctggatcgggactcctttcaggtaacactcacacccccattccaccccacccccatcccaaaaggctttgaaaacattggtattaacaagcaaaggatattttaataaatacatatttgatggtttattgccaccaattttgcttacattgcaataattatttaaattacattaacttttactaaaaatagtaaagataatttcacatcgtttgtttaagttaaacagtttgaagttaaactttaattgttaaaacaatttaagtttttctcttagttgctaaaagaaaaactttggacaagttaacagtttaagcaaacaacaattcatgaattgggcaccacttaaaacaagaagatattcagagcgcttctgcaggtgagcagtaagctttaatagaaaagtaaaacagttacttgattggctacagctgggtgtttgccttatttgggtgtgagggctgggcccggtggctcatgcctgtaatcccagcactttggaaggccgaggtggttggatcatttgaggtcaggagttcaagaccagcctggccaatgtgcttaaaccccgtctctactaaaaatacaaaaattagccggtgtggtggttggctcctgtaatcccagccactctggaggctgaggcaggagaatcgcttgaacctgggaggcagaggttgcagtaagccgagattgcatcattgcactccagcctgcgtgacaaggcaagactctgtcaccaaaaaaaaaaaaaaaaaaaaaaaaggaaaatccctaattagaggctagttggcagtttctgattggttaagcttatgttttgttttactgttgtcttactgtttacactgaattctggtttgcttacatataagctccagctacagagacagatgatatcaggctcatggcctctttatttgctttgacatagtaaagtgttgataatgatttccaaaggaagaaatatcattattttaaaatcaatattcccagtgtatatacaggtaaaatactaagattttaatacacttattatttattaatttatttatttattgagatggagttgctctgtcgcccaggctggagtgcagtggcatgatcccagctaactgcagtctttgcctcctgggttccagcaattctcctgcctcagcctcctgagtagctgggattactggcaccagccaccactcctggctaattttttgtatttttagtagaaatggggtttcacaatgtttgccaggctggtcttaaactcctaaccttaagtgatctgcccgccttggcctcccaaagtgtagggattacaggcgtgagccaccgcgccttgccaaattatttattattatttttttgagacagggtctctgttgcccaagctgtagtggcatggtcacagttcactgcagactccccaggcttaggcgttcctcccacctcagtctcccaagtagctaggattacaggcgtgtaccaccactctgggttaatttttctattttttgtagagacagggtttcactatgtcgcccaggctggtctcgaactcctgtactcaagcagtcctcccaccttgacctcccaaagtgctggatttacaggtgtgatccacaacgtccagcctatatacttaagatacttctaaaccatttgtgttcaacttctgttcttgccccatagtcaccttgagactcatcacttagccaactccaaaagcattgctgattactgtgaattttactaaggttttcttaagagggttccattgtctcaaaattgttcctgaaatatcctgttacctgtctacctgattttctcctatcttcagagttccatttcctgtcctcccgcctgtcattataccttccataagcccctacttttgtcccagcacttttccctctgtcagtttacatatcccaccaagcaaaacaaaaatagcaaaacagtaatgccttctgaatcctcaaattgctcaatcctcagattgctcctcaatctggaaaatgttttatatcaagcccatttataaatcaaggattggcaatttaaaaaattaaaataaagaaaggagaattggaaataaaatgaattggctgggcacggtggctcacgcctgtaatcccagaactttgggaggccgaggtgggtggatcacttgaggtcaggagttcgagaccagcctggccaacatggtgaaaccctgcctgtactgaaaatacaaaaattagctgggtgcggtggcgcacacctgtaatcccagatactcaggaggctgaggcaggagaatcgcttgaacccaggaggcggaggttgcagtgagccgagatcgtgccactacactccagcctgggcaacagagccagactctgtctcaaaaaaaaaaaaaaagtttaattcacgcagagccagctgaacggcagacaggagtttggttattcaaatcagcctaccagaaaattcggagactggggtttttaaagaatgacttggcgggtagggggccagggattggcgaatgctaatttgtcaggtgggaggtgaaatcacagggggttgaagtgggctcttgctgtcttctgttactgagtggaattgcagaacttgttgagccagattatggtctgagtggcgccagctagtgcatcggaatgcgcggtctgaaaagtatctccagcaccaatcttaggttttacaatagtgatgttatccctgagagcaattggggaggtcaggaatcttatagcctctggctgcaagcctcctaaatcataatttctaatcttgtggctaatttgttagttctacaaaggcagactgatccccaggcaagaatggggtttgtttttggaaaggactgttacaatctttgtttcaaagtgaaattagaaattaaattcctcctgtagttagttaggtcttcgcccaggaatgaacaagggcagctcggaagtgagaagcgtggagtcatttaggtcagatcccttgcactgtcataactttctcactgttaggatttttgcaaaggcagtttcgtgaacgtacagagacaggcccttgctattatccctattttttagataaggatatccaggcgatgaggaagttttacttctgggaacagcctggatacgaaaccttcacacgtcagtgtcttttggacattttctcgtcagtacagccctgttgaatgttctcacggtggggaggtacgtgtttaaaatgcggggaaggtgcttttatttcacccctggtgaaactaggggagctaatttttttaaacatgatttttggcccccttgaaccgccggcctggactacgtttcccagcagcccgtgctcaagactacgggtgcctgcaggcggtcagcgtcgtttgcggcggcgcaggcgcggtgcgggcggcggacgggcgggcgcttcgccgtttgaatggctgcgggcccgggccctcacctcacctgaggtccggccgcccaggggtgcgctatgccgtcgggaggtgaccagtcgccaccgcccccgcctccccctccggcggcggcagcctcggatgaggaggaggaggacgacggcgaggcggaagacgccgcgccgcctgccgagtcgcccacccctcagatccagcagcggttcgacgagctgtgcagccgcctcaacatggacgaggcggcgcgggccgaggcctgggacagctaccgcagcatgagcgaaagctacacgctggaggtgcgctcgcgggcggaggggcgcttccggcctagttggcgtgaaccggtgccttccgagccgcgtcgcgcgcctcgagagactctcgggcgggttgcgggctcccagccccgagaggggtggggacttcctctgcgctattccgaggctcttagccgctccgagggctaacccgctctcgccgcgctttcctgcggcttccgaatggggaacgcgtcttgccctaaagtagcacagcaaggctgagatcgcgctggggtcccgttgaggaaaatgggtgtgtgtggcccatctgaccccccgcccgccttgttagtagaatgaactagtgtcgttgtcaagaccacacggacaaggggaggggacttgcccttatttgcaccgcgattaaccgggttgtggcacctgggtctccaggcgtctccgtctgttcgcttccccctgttaaccaaattgcctttgccctggcgttgcgggcgtttgagtcaacgtgctgatgcgttttgggctgtgtttacgtctgtgtaaacaaattaatactcatttccccccaggccagatgaaatgagccctccgccgacccggatgtagacacatgcccccatttgtcactaggatcaggactgtggctacctcgagggctttttggtcaccccgggcattgcacaggactcctgttgttgttgcgatccgggtgtgttaggtcgcagccttcggacagggcttgcagatgagaaa

SEQ ID NO: 1875 - DNA, 6000 bp, Homo sapiens
cctcaggtgatccacccgccttggactcccaaagtgctggcattacaggtgtgagccaccatgcctggccaacattttattcttatcattgggaaaatttgaagtctggtataccaagtttggtcactgtacagggaaacaggaactctattttttttatttttcagttcttttttttttttttttttttttttgagatggagtctcactctgctgcccaggctggagtgcagtagctcaatctctactcactgcaacctccacttcccaggttcaggtgattctcatgcttcagcctcccggagtagctgggataaaggcacataccactatacctgactaatttttgtattttttgtggagaccaggtttcaccgtgttgaccaggctagtctcgaactcctgacctcaagtgatctacctgcctcggtctcccaaagtgctgggattacaggcatgagccactgcgctcaggcaggaactctatattgctggtgtacattggtgagagtcaaaattgacacaactactttactagcaaatttggtggtatctagtaatattgaaggtgcacattctcttactgtacttcttggagtagtccccaaagaaactcctgcacacatgtataaggatgttttcattacaacatgttttgttatcatggaatattagaaacaacctaaatttccattggttggggagtgaatgcaaaaagtcattgtatgttcatatgaaagaatgtttttagcaattaaaatgaatatatcttacatatcaacattaatgtcagaaacattattgagtgtgaaaaagcaagttgcagaataccactgaagtatgatagcatttatataaaatgtaaaaacacgtaataagatattgcttattgtttacacatacatgtgtatgtgtagtaagtgtgaaaacataggaaggattaagaccaactttagaatggtttttatctttggggtagaagggtaaggatgggattagggaggagtataaaatggtaattttgactgtttctttttctttttctttttcttttttgagacagagtctcgcattgtcgccaggctggagtgcagtggcgtgatctcggctcactgcaacctccgcctcccaggtttaagtgattttcctgcctcagcctcctgagtagctgggattacaggtgcccgccaccacgcccagctaattttttgtatttttagtagagatcgggttttaccatgttggccatgctggtttcaaactcctgaccttgtgaatctcccacctcggcctcccaaagtgctgggattacaggtgtgagctactgcgcctagccttgactgcttctatagtgttgctagtttaaaaaaaaatctgaagtggcaggaggaggtggctcacacctgtaatcacagtgttctaggaagccaaagtaggaggatcactcaagcccaggagtctgcagtgagctgtgatcttgccactgaactccaacatgggtgatagaacgaaaccctatctcttacaaaaacaaaaacgacaaaatttatttaatatattaacatttaaaaaatctggcagtgaaccaacgtgaatgttggttaggttactcttgttaattttggtttgtattttcaaatatttcatagttaacaaatactttaggtaacctaaacaaaatggattaggaggatcagaggaatataccaatctgtaagaaattaagctagtcagagacatgagttgtgattttatttcactgtctaaaagtaatataatttaatgcgataatattgatttacttttgaatacttacttttgtatactttagccttatgttaattatgaaatatcttgtttgtctttaataccagcttaatcgaattttttaataagatgaagaagtgggaagacatggcaaatctacccccacatttcagagaacgtactgagagattagaaagaaacttcactgtttctgctgtaatttttaagaaatatgaacccatttttcaggacatctttaaataccctcaagaggagcaacctcgtcagcagcgaggaaggaaacagcggtaggttttcttgttggttcatcaggaatacacgttagtctgtgctgcagtgttgatattctgctaggttttttttttctggttttaaaaaagaaataagatttaaaaaatctttttcctcagtcgttttcttttaatgatgctttttttgcttttcattgtgggttagccatgaagagtggcttttttcatattgctaaatgtatacaggtctttgtttctataaactttcatttgtcttattttattttattattattttttcctcagtgatccttgttctgaaaccttcctttttcatttaagcaacaaaaaatgcagactgtacaagtcagacttagggattttcaccctttcgccgccttggagatgtatctgtatctgtatctggatatatatattttttattgcgcaggggccatgctaatcaatgtattgttccaattttagtatatgtgctgccgaagggagcactgccctagatatagatcactatattaaccactatattttctactagtgattatatagactattttatgtcaaactgagtaataaataatccccttgaaatgacttctctatgtattttgatgtttataatgaattcagaatagagagactggattgggaaaagacaggagaactgaaactattatgaatttgtgctttctgatcacttctgcaaagtctataagcatgctctgactcagtgttttctacctttcctgatagataaaggcagttatggaatacacattttccttctttatcattgaaagttttttcataaagtagaaatgaaaattctaacaattagaaaaatgttgacaagaaaagtaaagggaaaggagttaaaattatttggctagaataaataatgtttgcttctctttaaatataaaagttttcccagactgtgaaggatgtttacattaagtgtaaccttttaaaaataaaatgggggaatgacaaaccaggaggaaaaaaaatttaaaaaaactagaactatttacattttaatatagatggcaccactgatacagaagcatctggtctagctcacttacagttttggggaattgactatttaaaatgaagcattctgagccaggcgggttggctcacgcctgtaatcccagcactttaggaggctgaggcaggcgaatcacctgagttcaggagttcaagaccagcctggccaacgtggcaaaaccccgtctctactaaaaatacaaaaattagctgtgcgtggtggtgcatgcctataatcccagctactcgggaggctgagtcagtagaatcccttgaaccgagaggcagaagttgtgagccaagatcgtaccattgcattcgagcctgggcgacaagaatgaaactccatctcataaataaataagtaaacaaataaaaggaggtattctggctgagtgcctgtaatcccagcactttgggaggccaaggcgggtggatcactctaggtcgggagttcgagaccagcctggccaacgtggcgaaaccccgtctctactaaaaataaaaaaattagcggggtgtggtggtgggtgcctgtaatcccagctacttgggagggagaggtggaagaatcacttgaacctcagagttggaggttgcagtgagccgagatcacgccactgcactccagcctgggcgatagagcgagactccattttaataaataaataaataaataaataaataaaatgacatattctcctagcactttgggaggccgaggcaggtggattgcttgaggtcaggagttcaagactagcctggccaatgtgccaaaaccccatctccactaaaaatacaaaaattaggcaggtatggtggtgtgtgcctgttgtcccagctacttgagaggctgaggcaggtgaatcacttgaacccaggagtcggaggtttcagtgagctgcgatcgcgccactgcactccagcctaggtgacagagtgagacttcgtctccaaataaataaataaaaaatgaagtattctaaagtttgaatagaagctttgtactgagtctgagtgaggccaatgtgatcatttatgggaagatatcttctttctttggagtatctggaaaataatttcagattgcacttgttttgctatttcttaggatatatatactacctaattctaattaagagaattttaaaaggccatgtgcagtggctcacacctgatccccagcactttgggaggctgaagtggacagatcacttgagcccaggagtttgagaccagcctggacagtatggcgaaacttcatctccacaaaaaatagaaaaattagcttggagtggtggcgcacacctgtggtcccagctactggggaggctgaggtggggggatcacttgagcctgggaggttgaggctgcagtgagctgtgctcataccactgtactccagtttgggtgacagagcaagaccttgtctcaaaaaaaaaaaaaaaaaagtaaatcactttattagagattttacattttaatcactttgtatactttctgttagctctttctgttaactatagtcataatgtatagcacttactgagcatttactttggggcagggactcttaagacttcaatatgtattacttcagttaatccctctgacaaccttgtgatactcatactattgttagatagagaaaattagccgcagagaggttaagtaatttggccagggtcgcacaaccaagcgtggagttcttattgaaactgactgcgggaacccatgtgctttactgtgactatatactgcatctctcacacactatctgaaaatgtgtcactatttgtttagcacttatccacaggaaatactgttaggtattatgtaggacacaggcattttttaaaacaccaaaccccacagtctctgtcttctgagagcttacagtacagtcagcgagatgaggcaggtatgaagattccagtgcatgcaatgcagtgtgttataaaagtcccatgactaccagagggaatacagatgtaaaacttaggaggaaaagaaatcactctggatgagccagtcaggtaagtttacatggaataagtagaaatgggtcttgaaagatgggtacgagtttgataggtgaatttgaagatacagatagcaccttctgtgtagaggaaacaagaaaagacaaaagcagtaaagcaagaagaaatgtgggaggttagtcaagtttttttttctagaattctcaagttgtagagccagaattaagagtagcttaagtgttaagctaaaaaaaattgaattttattttggtaggcaactaaaactagaaatagtttatcatgcgcctatggtagagaggctacttttaaaagcagaacactgacatttaatccttgccatggactggtgaactaagtacagtattgtacccaagtagagtaatcttttgacagatgaaatgactaaggcccaggtgagcaagtaccctagctaatggcagtgctggaactaaatctaatctaatcttctccacggaatttcgttcttctgggcaccttgttagaataaggctgttgggaggtggagaccacagatttcttgtctaaaagttgtcagaggttttggtagaaaagccaagcttaaagcaggtctgaaacttggcagactacttggcaatatacaacaggtactcttaatggatggaagtataaggaattataggaagctcataatttacattaaaaaggccttttgtgatttgatatagtctggaatatctttaaggagggagggagggatacaggtcattagctatgataaaggagaaaaaaataaggacatatctgactgcatatagtggtcctaaagcagcatagcattgctgtgtcatcaaaagaactatttttattcattttattttccacct

SEQ ID NO: 1876 - DNA, 6000 bp, Homo sapiens
tcctaggtagcagcaggacagctctagagatcctcgccacctcccatcgctaagctgcttttaagctaattttctggctctttgcctactatgtgtgtgcacgatgggactgttttccttggtagtttctcagatcttctctgggatgttggggttctcagggacacctgttccttggctgggcaccatggccttggctcactgcctagccttcagggtttaggcagcagacatacacccttaagtaaggtaggtgacctgtcacatttcaccccatgtcaaagaggaaacgagtcagataatttgtggttgtcctaagattttggtgacagagtaaaaattcagtgttctttcttgatttccttaccaagtttctttcccatagagcagtggtccaacctttttggcaccaaggaccagtttcatggaagacaatttttccatggacagggttgggggttggagagattttgggatgattcaactgccttacatttattgcacactttatttctattattattacgtggtaatatataatgaaataattatacaactcaccaaaatgtagagtcagtgggagccctgagcttgttttcctgcaactagatggtcccatctgggggcggtgggagacagtgacagatcagcaggcattagattctcataaggagcatgcaacctagatcccttatgtgtgcagttcacaatagggttcacactcctgtgagaatctaatgccaccactaatctgacaggaggccagcacaggcggcaatgtgagcgatggggagcagctttaaatacagatgaagctttgctcgcatgctcacttgcctgctgctcacctcctgctatgttgcccagttcctaacagggtccatggcccaggggttggggactcctgctttagagtggttgatattcaaactctccaaaccagtaatgaagtttgactcatatttagtatccaattacaaggttttgaattttttgactgccaaaagttttttttttaactttattattaaaatgggaaagacagctgattttatttagatggaataattgttaagatactttttctgccttagattactattgtatttgtaattaaagtgcttttttggatactggcattctgtgtaaccaattcttcataggtcatgccacctcagaacctggaaagggcagatgaaatttgcattgctggctcccctttgactcccagaagggtgactgaagttcgtgctgatactggaggacttggaaggagtaagtttaaaatactaggagaatattttggggcttactatctggaaatttaaatttcatctaaccctacaagtgaagttaatagggtatacatagaagaaaatattctatgcatttttgtaccacatggatcacttaaaagaagggcctttaaagactaagaacacaggaaaatgcatgatataacaggtatcttttaaaaaggatagactgctttatttatttatttatttattgagacagagtcttgctctgtcactcaagctggagtgcagtggcccaatctcagctcactgcaacctctgcctgccgggttcaagcgattctcatgcctcagcctcctgagtagctgggactacaggcatgcgccaccacgcctagctaatttttgtatttttagtagagaaggggttttgccatattggccaggctggccttgaactcctgacctcaagtgatccgcctacctcgttctcccaaagtgctggaattacaggcatgaggcaccgtgcccggctgactgctgtatatttaatatgatccctatttttaaagtgtatgtttatttatgagcatacaaaatagtggaaatggaaaaaccaaactgttaagatcattgttgggtgatagaattcctggtgatttctgtaaaatttttaaggcaaatacatattacttttaaaatcagaaatagaaaagccttcttaaagatagagctgcatgatccagttaggtatagacaagccagtgagttaagacaactgagtatgttccactttgttgagctgtgctaccctagttaatgtgacattagtgctggcccaagaaatacagaaaagggcagttttgctatctatctggtttgtattttttaggcagctgcttagaagatctgcaaggtgaaaggttttagtttacatatgtgagatagaactacttttttaaagagcaattcagtaaatccagagagttctaaatccttggatccaattaaaagaatattcttatttctagatcagttttataatgtaattgataagaactggctatagaaggaataccagttttaaagtcaggattcactctaggctgggcatggtggctcatgcctgtaatcccagcactgtgggagacctagtggggaggatcacttgagccccggagttcaagaccatcctgggcaacatagcaagataccatctctacccccaacccccccaaaaaaatcactctaagtgtatacttaatacacatggatgatccttatgaaaagtcctcatttttgaaagatctgacagctggtctttcttagtctatttttgtagaattttccgttccctaatctacagattaggaagacttgactttaaacttcattttctttgtacttaccacttctcagttttcctgagatctcttgatattttataagaaaaaatgatcataatctattctttctgattctgcagctttgtaccaaatacaaatctagtaagtttatttacttttgtatcatctggaaatagaaatgttaagccacagtttgttaggatttactcctatcagtacttcttacaaactttctatgtatattttaaattttaaaaacactctgatgcacagctcttagaagtggacacagaagaaggaagaaatgcttctcaaaaattcagacattggtgtgaatacttaaaaatagactaagccataatgggttgtgtaccactgaatcatacacttaaaaatggttgaatggtaaattttatgttatatatataaccacaattttaaaaaactagcctgtaataccagcattttgggaggccaaggcgggtggatcacctgaggtcaggagttcgagaccagcctggccaacatggtgagacctcatctctactaaaaatacaaaaattagccatgccttgtggcatatgcctctaatcccagttacttgggaggctgaggcacaagaatcacttaaacccaggaggcagaggttgtagtgagccgagatcaggctactgcactccagcctgggtgatagagtaagactctgtctcaaaaaataaaaaaaatagtaacaatttgccccaaaccattgaattgtataatttaagtagatgaaatttatggtatataaactgttttaaaaaaataaattatgcttaactgaatccaaatcatgcatgtccaccttgcttaagaacattattgagttttaataattttttatatgtggaaaaagacagagatcaaaattgataaaaccggtggcggaatgctcctagatgacatactaccaatcaggtccccttatcaagtagtggctctgtagtaaaatcacatcttacatgagtggtaggtagaaagtggatatgatagaaaatattatagaaaaatataatatagaaaaatagggtaattccttaaattgcccctaaatcatgaaggttctttagtagtggaagacagagtcaggtctgatttgggaaagggggcgtggagaaaggaacactgcaagacaaaaaattccgttttaaaattttgctctcagtagtgttcactgaacacgaatgaaagttcactaatgaatataggtaagatatgacttctgtaattcttgtttgctttttgaattatgaagtatttcaaacactgtagttattttttaacataagagcttggacggaagtcagatctgagtctccttgagttaaatgctttgtttgatttgttttgaccctaggcataacatctccaaccacattatacgataggtacagctccccaccagccagcactaccagaaggcggctatttgttgagaatgatagcccctctgatggagggacgcctgggcgcatgcccccacagcccctagtcaatgctgtccctgtgcagaatgtatctggggagactgtttctgtcacaccagttcctggacagactttggtcaccatggcaaccgccactgtcacagccaacaatgggcaaacggtaaccattcctgtgcaaggtaaggaaggcagagttggatattgagttccttctctgtggcatgtattgaaaagttacccgaggtttggctagagtgacataggggacagaggagtgatggggagagagggtttgggagagcagaaattgtaaacctctgcccggagaacctcttattatcaacattttcttcatgctttttttctctgtcactaggtattgccaatgaaaatggagggataacattcttccctgtccaagtcaatgttggggggcaggcacaagctgtgacaggctccatccagcccctcagtgctcaggccctggctggaagtctgagctctcaacaggtgacaggaacaactttgcaagtccctggtcaagtggccattcaacagatttccccaggtggccaacagcagaagcaaggccagtctgtaaccagcagtagtaatagacccaggaagaccagctctttatcgcttttctttagaaaggtaatttttcacataccttatcagagcatgagcttgggaaatacaagtgttaaacaaagtttgaaatgtttttatctcctaggtataccatttagcagctgtccgccttcgggatctctgtgccaaactagatatttcagatgaattgaggaaaaaaatctggacctgctttgaattctccataattcagtgtcctgaacttatgatggacagacatctggaccagttattaatgtgtgccatttatgtgatggcaaaggtgagtaccatttggaattgtaaaggcaaagataggtcttcattactgagaacattttttaaccactgtcttgagatacagtttacatgctctataattcacctatttaaaatgcacaactaaatgggtcttagtatattcacagatatgtgcaatactcaccacaattttagaacataatattccattgtatagttatatgagagtatttttatccatttattagctaatgtatattttagttgtttctacttttggcatatatgcataataccactattagcatttgtgtttgggtttttgtatagacatgtattttcatttctctagggtatatacctaggaatgggctgctgggtcatacattaactgtgttttaactatttagggaattgctagattgttttccaaagtactgtaccattttacacttacacagcagtataataaagattttagtttctccactatctcattaacacttactatcttactttgtttaaataacttattgaggagaaattcacataacataaaattaattgggtttttctttttttttttgagatgttgtttcattcttgtcacccaggctggagtgcagtggtgcatctcagctcactgcaacctctgcctcccaggttcaagcgattctcctgtcgtagcctcccgagtagctgggattacagccatgtgccaccatgcctggctaatttttgcatttttagtagagatggggtttgaccatgttggccaggcaggtctcaaactcctgacctcaggtgatctgcccacctcggcctcccaaagtgctgggattacaggcatgagccactgggcccagccaaattaactattttaagttgaacaatttaggagcatttagcacatttacagtactaagtgtaataaatggttgtatactcaccacctctgtctagttccagaacatttccgtacctgcaaagtaaa

SEQ ID NO: 1877 - DNA, 6000 bp, Homo sapiens
agtcctccttctctgtctgccctatgaccacaggagacccaggagctgcaaaagaagcagcagtggtaccaggagaaccaggtgacgctgacacccgaggatgaagacctgtacctgagttactgctctcaggccatgttccgcatccgcatcctggagcagcgcctcaatcggtgagcaggcagggcaggtggagagaacccactgggaggctggaccaccagctttgtaacccctcaccctctttccttgcctctctgacttcagacacaaggaactggccccactgaagtacctggctctggaggaaaagctctacaaggacccacgcctgggggagctccagaaaatattcgcttgatgtccctcctggggcctcagccagagctgccagagaaaggaaacctcttcccgcagcctggctcctgtgttccctctatccagccaatgcctgtttacacagacacctggcctcactgccagcccacctcccctacagccctgtttgttcctgcttctcatgattttcctgtaaataaacacactcttaatttgccatttgtgccttgcgcttcacaagctccagcagcagcctttctcttcttctgttatctatagcctgggaccacccccttcctccccttggcctgtcgtttgcttcctgtccttctctccgttggaatgtcaggtcttcacagcacctctgcagatggtcccacagccatctgcaaacaactggttatatctcaatgtgactagggtggcccacctcaccaagtgggatggggaaggctaagatgcatgccccagaatttgaggactgaatcccagctcctcctcttaccagataccacttacccatctgtggaatggggtagcattgttgcattaaataagacttatggccaggtgtggtggctcacacctgtaatcccaacatttagggaggctgaggcaggaggatcacttgatcccaggagtttgagaccagcctgggcaacataataagaccccatctctaaaaaaaaaaaaaaacaaagagccaggcatggtggcatgagcctgtagtcccagctactcaggaggctgaggtaggaggatcactttcacctaggaagtcaaggctgcagtgagccatgattgcaccactgcacttcagcctaagcaacagagcaaaaccctgtctcaaaaaaaagaaaaaaaagacataaattataaagcagggaggctgggaatggcacatagaaagcagtcattaaatgttagcttacaaaatagccaaaaaacacatgaaatggttgtcaaattcatgagtcatctggcaaatgaaatgtcacaacaccctccggtatgaaaaaaataaaaagtactggtgacgatgagaaacaactggaactcccaaatagccttcctagtgaaagtataaatcagtacaaccattttggaaaactgcttggcattatctattaaagctaaactaaagcccaacaattctactcttaggttctactccaatccatcattcatcaagtaagaatgatgaacaactcaaccgaaatgtagatagatagttatctgctaaaaggcatgtgctagaactttcatagcagcattattgataatagcaccatacttggaagttacccaaatgcccatcaagagcagaatggatacataaattgtggtcttcagatattttgggttgtctttaactgcttagggagaactgcttagggagaatgctactggcatctagtgcatacaggccagggatgctgctaaacattctacaatgcccagaacagccccccacagcaaataattatctaggtctaaatgccaataatgttgaggttatagagtatattagtctgttttcacactgctgattaagacatactcaagactgggtaatttgtaaagaaaaagaggtttaatggactcacagttccacacggctggggaggccccacaatcatggcagaaggccaaaggcacatcttacatggtggcagacaagaaagaatgagaaccaagcaaaaaggaaaatcccttataaaatcatcagctctcgtgagactaattcactaccatgagaacagtatgtgggaaacccctcccatgattcagttatctcccactgggtccctcccacaatatgtgggaattatgggagctacaattcacaagatgagatttgggtggggatacagccaaaccatatcatagagcaatgaaaatgaatgaactgcaacacaactatatggaatgatatggtcaaactgcctaagtataatgtcaaaagattcaagacacaaaagtacatactctattattccatttatggaaagaacaaaaataaggaaaattaattggtgatattagaagtcaggacaaccgtcactcttggagtgtgagggttagtgaatggatgtgagcatggagccctgggaggggaggttctggtttctagtcacgttctgctttttgacctgggtgtgttcggtttgtaaaaattcatcaaccttgtgcacttacaatgtgtcctctggagtgtttttgactgcttgttgtcatgaatctaatcaagcctttagccctaacttaagaaattcaagggaagaaatgcatttaagaagaacgtccatctaacaagaacttcaggaaattcaggtaaatgatactaaaaggaaacattcctaacgtgggacaatctaggtaaatggcctgatctcttcaaaagatcgatgtcataaaaataaaagtttggggacagaaatggaaagaacttaagagtcaagtgtggtgaatactgattggttcttagttagaaaaaaaaagtcctaaaaggtttttgggatgactggggacatacgaatatggactggttgttacagaattaaattttcttagcagtggtgataacaatggttattgtagaataagggctttatttttattttttgaaatggatctcactctgtcgcccaggctggagtacagtggccccatcccagctcaccgcaacctctgcttcccagtttcaagtgattctcctgcctcagcctccccagtagctaggattataggcacgtgcgccaccacgcccggctaatttttgtatttttttgtagagacggggtttcaccatgttggccaggttggtctcggactcctgacctcaggtgatccgcccgccttggcctcccaaagtgctgggattgcaggcgtgagccaccgcgcctggccaagggccttatttttaagagatacatgctcagtatttggtgttggggtgaaatgtcatatctacaattttcaaatggttccgaaaagacacacagacgaagcaaatatggcaaactgttaacaagtactggaatctacgtggtatcattatattgtcttttaaagttttctctgtttagttttctttttataatacaaaattaaggggaactgcaggctagacagttttgatccgatgttattctgctaatcttttaaaggtgtcttgcggtgactcacgcctgtaatcccagcacttcgggaggctggggcgggtggatcacctaaggtcaggagttcaagaccagcctggccaaaatggagaaaccccgtctctactaaaaatataaaaactagccttagcccgtcgtggtggcgggcgcctgtggttccagctacccaggaggctgaagcaggagaatctgaagcagaaggctgaagcagaaggcagagtggggactcccccacgctttggctttcagaacaagggttcgaattctggggctattactttctgaccgtgtggttttctgcaagcatcttaacccgggcctcagtttcctcatctgtaaatgggaacaggaattcctacctcttatggttgtactgggcgttatgtgagcccaaggagccctgacctgcggtgagaggctggaggccgaagggcaaggttcgaggggctctgggtgcctgggacaacctctgggcaacagggagaggcggctgcggggccaagtccctcctaagcggccacgcgagaggccctgagtcgagaagggttacggcgcttcccagagcccaccccgcccaacgtgtcacaaataaagctggcctttctccgattccctgattgcagccattcagggagcagccccttgcccacgcatccattagtcgaggcggtggctgcgtgtgcagtgctacagggttcagcgcctgcctcggctccggaatcaggctgtttccttctagacctcccatgggggattcaagccggcgtccgggtcaaagaacagggacaaagtcctcctgccacgggggaccatctgcaggcaaagtgaagaatgaggagcttcggcaaaatgccgactaaggcctccttaggttttgccccactccaagatggaaggcctgaggcttcacactgcccccgaagttcctttcccattggctatctgggaattgagttttccaataatgcggacgctgattggtcaatccaggacggttgctcaagccattggcgcagccgccattggagggcggctctcaaaagttttcagacacaaattaggttcgagggaggaaacggagaggaaagggaaaacttgagacggaggcgggactaaggaaacggcagcttgcattggtttattagaggccaaggggcggctcttgaacgttccttcctcttgattagtcctatttaggaaaagagggcgggtactgaggaaaagcggcagaagcgcctgcttccattggtcagtcctggcaggaggcggagcacccgcggcagctgattggtgcgggaggcaaggtgggcggggctctgagccggaggttttgttgtgagggtcggttgtcaagcagcggccaatcaaggcaggggatggaggcaagtgggggtcgcgcctggagcggagcctcggcctccggagccgcagctgcaggtggagtgggcaaggggacgaggtggcgaggggacggtgggccctgggctgggccgagccaggcggggctggctgggcttgcgggcagagagctctgagcgtggggaggctagagcccgtactccgcaagcagagggttgggaggatcagccgtggccgagggacctgcccccgcccccggacgagaggggtcggggtggaggccggagggggcaaaaccagggaggccggaagcagagctgggggtctgcagaaggacaggtaatgaatagggagaagagaagtaggagaatgaatgaatgggagaccccgcgagcatatgggaaagggcagtaacgggagtctggcgaggcaggggccacgtgagggatatcgggagacaggatgtgcataagtgggagactcagggggcagggagaaaagggggtgtgaacggaggactagagaggcagacccggggacccaggagaaaggggacggaggggagcgggctcatgggaaagaggtgaagtggctgtgggaaggaggtgggaggctccatgaggaggccttttagagttgaagagtcatagccacttacgcccagactggaggcctagttcctagctctgtccttgggaatcgcagggagcaggagcggttcccttgccaggagctggggaattggaccatcagggtcgtcttcgagattctttccaaggaggacttcagtggccgtctctgggatgcctttcctaggcccctaagcttagcttctgactccgctctcccacatcccacacgtcagacaaaaacaacgactcgcaggaaatctatgtgaattgcagacacgtggtcttctccgccccactgcggctgctgcactttaggcagccagcatcccggaacagagctgcagctcattatcctggcctctgggaggagtttctttttccttacgttccaaatcaccctacctgaggtgccccctctgcagattcccaaacctaatttgcagtgcagcttctgactctggtggctttggtgggtgtcagtctttatc

SEQ ID NO: 1878 - DNA, 6000 bp, Homo sapiens
agctagccccaaacttcctgacagcccaaaggtccagtctgccctcgttgagatcaactggactggataaaataacagatctgcactggggtctggtcagatctgttgggggtatttatttctttttgtttgagacaaggtctcactctgtcacccagactagagtacagtggtgcagtcatagctcactgcagcctccaactcctgggctcaagtgatcctcccaccaagtagctgggactacaggtatgccactatgcctggctaattttgtttgtttgtttgtttgagatggagtttcgctctttcacccatgctggagtgcagtggcgcaatctcggctcactgcaacctctgccttccggtttcaagcgtttctcctgcctcagcctcctgagtagctgggattataggcgcccacgaccacgccaggcaaatttttatatttttaatagagacaaggtttcaccatattggccaggctggtcttgaactcctgacctcatgatctgctcacctcggcctcccaaagtgcttggattataggtgtgagccacagcacccggccacattctttagtttttgtagagacggggtcttgttatgttgcccaggctggtctctaactcctggcctcaagtgatcctcctgccttggcctcccaaaatactgcaggtgtgggactacaggtgtgattacaggtgtgagccaccgcaccagactggggtatttgtttctaacccctgcaccacctcttaatctttgttacttcactcttctccccaaacatctgccctctgtctgtaaaacggggttagcagcaatatctgttgcattgggtggttgtgagctcacgaggtgatgcatgtcaggggcctgcctggcatcatagtaagtgctcagaaagccagggtaggatcaagcatgtatcagaatcacctggatgatttgttaaaacagtttcctgggcctcactctacagtttctgattcagcaagtatggataaggtccaagaatttgtgtttctttttttttcagagacaaggtttcgccatgtcacccagcctggtttcgagctcctgggctcaagcaatcctcctgccttagcctcctaagtgttgggattaccggagtgaaccaccttacctggctttctttttttttttttaatacttaattttttttaagagaggaatgtctcactctgttgcccaggttggagtgcagtggcgagatcatagctcactgcaaccacaaactcctgggctcaagtgatcctcccaccttagccttccaggtagctagtactacaggcatacaccaccatgcctggctaatttttaatttttttttttctttttgtagagacagggtcttgctatgttgctcaggctagtctcaaactcctggcctcaaggaatcctcctgccttggcctcccaaagtgctggaattacagtcatgaaccactgtacccagccaagaatttgcctttctttttttttttttttttttttttgagacggagtctcactctgtcgcccaggctggagtgcagtggcgggatctcggctcactgcaagctccaccttcctggttcacgccattctcctgcctcagcctcccgagtagctgggactagaggcgaccaccactgcgcccagctaattttttgtatttttagtagagacggggtttcaccgtggtctcgatctcctgacctcatgatccacccgcctctgcctcccaaagtgctgggattacaggcgtaagccaccgcgcctggccgaatttgcctttctaacaagtttccaaagtgatgttgatgccgctggtccaggaccacactttgaaaaccaatagcttaaatgaattacaccatggcttcctggtctgatatatctggtttccaccctccacaacagggagaactcaccagtgggccctgaattctttcatgtcagggccgtcaaaagaactgtgtctgatcagcctcctctgctccagcataggcacctttacatggttttacgggttgaattattattattattttcactttcatctctacagaaaataatctaaaaattagccaggtgtggtggtgggtgcctgtagtctcagctgctcaggaggctgaagtgggaggattgcttgaacctaggaggttgtggctacagtgagccatgattataccactgcactccagctcaggtgaaagaatgagatcctgtcccccactgctgccaaaaaatagtaaccagactccaaaagcataggcaacaaaagcaaaaatagacaaatgggtttataccaaattaaaaagcttctgcacagcaaaggaaatgacagaataaagagacaacccacagattgagaaaaaaatatttacaaaatatacattagatcagggactaatatccaaaatgtacaaactcagaccgctcaataacaataaaacaaataaccctattaaaaatgggcagggccaggtgcagtggctcatgcctgtagtcccagtactttgaggggctgaggcaggaggactgcttcaacccaggagtttgagacaagtctgggcaatatagtgtgaccccacctctaaaaaaataatgataatattaatacaaagcttctgggctgaattatgtcctcctcagaagttactgaagtcctaacctgccagtacccgtgaaggtgatcttatttggaaacagggtctctgcaagtgtaaaccagttaagatgaagtcatcagtgtgagccctgatccaatgtgacttgtgtccttaagagaggaaacacagagacatgaggggagaatgccatgtgatgatggaggcagagactgaagtgctgtggctgctagccaaagattgccagcaaacccccagaagccaagaagaagcggacggattctcccctacaggtttcagaaggagcatagtcccacccgtgctttgattgtagacttccagcctccagaactgtgagacaataaatttctcttgttttaagtcacccagtttgtggttctttgttacgacattcctaggaaactgataccctgaggtatcattttacagacaacaccaacacaaaccttttcaaaatcatttacttcttcacgggcaatatgactagccttctaccaaatttgtgggtgtttcctttcatgaagtccataggtatgagaaactaagcagtgaactctcatctgctgccttttgaccttcctactttcccggagtgtattttattatcccttatattttacctgtccacttggagaaggaaatgtgacagcacaaacacatgatgagctgggaaagcctcacacctctgtttcccatcagtgtgttccatgggagctgggtaagggcaagggaaggtatgggaaggtgtactctcaccctagtccaggagaccatgcccagggcaaagtgcaattcatcatcactgcatcattaccatcaaactgtgccatctctctggtccccatcctaggggattgggggtggggatctgtgttcattttcaccttatttcaggcagttattaacctgaaggtgcctgtagggtctgcgagatagcagggaaggagtcttcgtctccctcacagatggtcaccttgtcttcagcaccaccacccccctcccaattgttctcatggggtaacctccttccttggcctcccatccccacaggacagccgttctcttcctgaaaggagggtcttttcaggaagtggaggactttaaattcctccttggatctatgttcacagtcttcagaacccagcctgtcccaactgtctctcaaaccttctcaaccactccctatccttcacctgaccaaacttactctagcacctacagcttgctatgccttctttgcttcctagagatggcacctgctgttccttatgcttaaaacacccttccagctgggcacagtggatcatgcctataatctcagcacattgggaggccaaggcgggcagatcgcttgagcccaggagtttgagaccagcctgggccatgacgaaaccccatctctacaaaaaatgtacaaaaattagccaggtgtggtggtgcatgcctgtagtcccagctacttgggaggctgaggtgagaggattgctgcctgggaggttgaagctgcagtgaattgagatcacaccaccgaactccagtctgagcaatagagagagaccctgtctcaaacaaaacaaaacaaaacaaaacaaaacactcctccatctccaaaccacatgaaacattcttggagagggggactggggaggttcttctgtgcacccctgagcaccctgcttccctctatctagaggaaggccacattgtctggtaagtgcttgtttgctgtccctcttccttcatgagactaaactctccaagaacagagccctggacttgtctgcatctgcagcagggagcccctagctttgtgattcaaaataggcttgtgggcttttcatgagaggaagaaatgggtgaaaaataatgatcatcaaaatgaaagttattattcatgcaagatttggggggagtctggcctcctgtattcaaaatctcatttaaggtcaaaagacacttgggacccatttatccccactgcacaggtgagcacactgaggatttgagaggtaaagagtagatctcacagccagttaagtggtcgaaatacaagtatgcctgattccaatgccccagtcgcccccaattactgcatggacagagggcaaattggcaggctagcgggtctgcctttctggccgatggggaccaagagccccagacccgctcgggtaccagggccgcttaggccccggcgtaccggcgacgcgtgcgcagtgcagtgcggcgccccctgcaggcagcgcgcaggagacggtagcggcgaaggggcgctcagtgcgcctgcgcgcttgtggagctggtggcggcgctccgcaggggctcggctgttttccgcgcggcaggcgcggccatggcgcagctgggaaagctgctcaaggagcagaagtacgaccggcagctgaggtgagccgaggctcaccgagccgagggcgggccggcgggctttccagcattcgggccgggcctaagggcgcgggcggcgcggtcgggccttcctcaggccttcttccaggctgggccgggccgtgcggggcgcgggaagccggcgctcggagctcccgccctgggccaaaggtgctccgcgagggctgggaccccttcccccgccacgcggtgtgcagttcgggggacggggtccccagcgccagccgggtagctaaggcggctgccggccccgttgcgcccaggctcctcgttttccgaatggggaggcccggggcgcaccgcatcccggccgcgagggcggcacagagggttaggttttgttctcagccagcgctgtccaatggaaataaaatgctagtctcatgtgagccgcaaatgtaattataaattttctagtaaccacactaaaggtaaaatgaaacagatgaaattgatttttaaatacaatttaacccaatatgtccaaaacattactatttcaacacaatataaaaagttcttgagatattttacttaaatttttatttttatttttatttttgtttttgtagaaacgaggtttttgccacctttccccaagctggtcatgagtattttcctttttaaaactgtcttggaggaccggcacggtggctcacgcctgtaatcccagcactttgggaggccgaagcgggcggatcacctgaggtcaggagttcgagaccagcctgggcaacatggtgaaaccctgtttctatttaaaaattcagaaattagctgggcgtggtggtgcgcgcctgtaatcccagttactctggaggctgaggctggagaatcggttgaatccaggaggtgtaggtttcagggagccgagatcgtgccactgcactccagcctgggtgacagagcgagactcc

SEQ ID NO: 1879 - DNA, 6000 bp, Homo sapiens
ccaaaggcactgaccccaggtacacatgcagtgcccagtgcagcaaggcgaaggcatccgcagcttctagctcaggccctgcaaggaggttctgcaggctgcggcgcaaaccactatgcagcgtgtgggcccatagctggaccacgttgtactgtggcgggcagcaaggcgctactagtgcctcagctgtggccaactcgactggcagggccactcgcagagcctccagccaccctggtagggcccctggtgcaggcagcagaggtgacccaaagtgggcctgctccaggccctcctgtagtgccctcagacagcgctgacgccagtcccgggggacctggcccaggggggttgttcgtccagtctccacctccgccacacgcacagcagccaccaacagggctgggtcctcccgtgccagcttccctgcggcccctgcagctgcttccacagcctggcccagtgcctcgaacagaaggtccagcccctggaagactggcaactccaggccccccaggggtgcccacgtatcctctcgcagctgctccagctcccgaaggctcacatatgcctccaagaactgttggccatcaatcagagtctgtgtgtgggacactgcagccggcactaatgagagtgaaaaggagacggccctgggtctcagccttcccaccgcctcaatgtgtacagcaggggatactgaggcccagggcgggggtgatgcataaaatatttaacaaccagtagagtaagctgggcacagtggctcatgcctgtaatcccagcacttcgggaggccaacgtgggtgaatcacttgaggtcaggagtttgagaccagcccggccaacatggtgaaatcccatctctactaaaaatacaaaaattagccaggcatggtggcacatgcctgtaatcccagctactggggaggctgaggcaggaggattgcttgaacctgggatatggaggttgcagtgagccgagatcacaccactgcactccagcctgggtgacagagtgagactctgtttcaaaaacaaaacaaaacaaaaaatgaacaaaaaaccataaataaataaataaataaccagtagagtactggccaatctaagaggatcttggcaatgtcctaaagacctggtgggccagaggtcaacccatgaactcatggaatatgaggaagctgaggatcctggagggaaggcaggggaaatcggggggtcctgccagtactcgctcagccactctgttagggaagagtttgaatatactgataaccaggtggccagagtcacatgactgggtgtctgtcctgactcaagcatcccacacgtgggaatcccaggatgagctgcctcataggccatgggaagcccgggctactgtctgggaggtccctggtgtgctgctctatgcagttccccatctagtgccccagccccttgattagggatgggtgtttgtggactgactattggaggctgaggcccagggtccctgcatgctcacctgcccgcagccgaggcagcaggtgagacagggcctgcagttgcttgtgctgggcaacccgctcccgtaggggctctagagtctgtaaggcctgggacatgccctggagcaacccacgggcctggctcagggcctcccgggttccctgcaccacctcaatggcctgggccagctgccacacaccagtctgcacgccttccaggtatgactgcatcactgactgtggaaagatggagccatgaggctgggccagccctgcagcacagtcccagcacccgcaccccctgccccatgcccaccttgaggcgcgattccagggagcaggtacgctgcacctcgcggctgcggtactggcctagcctggccagctgctccggccggtagaagatgcctgaggcccacttgagcgctgcaccccgggccagctgctctgcccgctcctgctctggccactcaggtcctgggaaggaagagcctgggcagccgtgtagtcagggaggagggcccaacgaccccagtcccagctttcttatttatttatttatttatttatttgtttgtttatttgtttattgagatggagtctcgctctgttgcccaggctggagtgcagtggtgcaatctcgggtccctgtaacctccgcctcccgggttcaagcgattctcctgcctcagtctcccgaggagctgggattacaggcgcgtgccatcacgcccagctagtttttgtatttttagtagagacggggtttcactatgttggccaggttggtttggagctcctgacctcaggtcatctgcccatcttgacctcccaaagtgttgggattacaggcgtgagccactgcgcccagccagtcccatctttgttgccatcattcctcccctagtccacccaaaaggttcataccaggggacaacgccggctgcatctcatccttggctgctgagtccattgtgggcctggaggagccagagctgaggtgggcccggggcaagcaggcagagtagatgcccctgtgagctgctgcctctgtctaagcccttctgagaggaggaaggaggttcttcccggccccctcgggaagtgagagggagcgggtgtgatgcggagggcacctgggaggctttgcctgctaggtttcccagtcgtgcccctgcagatgtcaagcgagacagagtgggcacaggcctccactggaccctggtcctgctctgagctgcacaggacagtttggtacagaacttaccagatttgatcaggcgtccagttctccctccaaaaatgaccttggccttgagaacagccctctccccaatgcagctgggcacgcctgccacttgctcacagggcctgggcaactccagctgactccagcgtgcagctgaattcctctccccaaggaagtctctctcccactccccacccagaagccccttcttcccaccgaggctcctccctccccaaggccatcaacagaaaggaaggaagctgagtctctggcattttattcccaacaggaaagagtgtctgcacagagggtggggacagctgggcgacacttccctgaggggcgggggggtggggtgtacttgtactcaaccagtcttgaccagcctacccagaacctcttagtgctcaggagaggagatagggatttgctagacttggcctcaacctggggtggtgggcagagtgtgcagatatggatgcagacgacatcaacagcacaggatgaaaactgtgttggccagcctctgaggaggatgtgtacctctgcggaggagtgagaggtggcaggctcttgtgaagaggggtgtggtggggggtggtaggagagggtcatgaaagctgtgtttatcttttttgttttagacagggtcttgatctgtcaccaaggctggagtacagtggcaccaccatagctcactgcagccttctgggctcaagcgatctgcctgcctcagcctcccaaagtgttgggagattacaggcgtgagtcaccgcaactgggcagctgtgtttatcttgagagttatagggagccagggaagggactataaggtggtaattatttagtggatgttcagtccaccacccaaatccacccttcaggacagaagtgctcattctccagctgccaggagtgtaggctactgagatcacaccactgagtctctcagtcaatattggggtgcaaaagcatggtaccatcgtgtgaacatgaacccttcagaagtgctaccccaatttcagagatcctagtgggataggctgaggcctataatataattgcatctgctcaattctgcttgtcttaatcccttaaaggtgtggatcctgaccaggtgcggtggctcacaccggtcatcccagcattctgggaggctgaggtgggaggatctcttgagcccacgagttcaagactagcctgggcaatatagtgagacccacatctctaaaaaactaaaaataaatgagccgggcatggtggtgcatgcctgtggtcccagctacttgggaggctgaggtgggagaatcgcttgggcccaggaagctgagacggcattgatcttgccactgcactccggcctgggcaacagagtgagaccctgtctcaaaaaaaaaaagtgtggatccccaacaaacttgctgcaaaaccctatctcgagtcccatttcccagaggacctgatctaaaagaaacaataataaatagtaacaatgttaaaagttacaaaatgaccgtatcacacattcctgcatgccaggaatgactgagtgctttactgatatttacacataggtaaacacgtttgcattggctgaagtgttcataaccccatagtctctgagcactgtactgtgaggacaagacgagcgaaagatgaggctaggaccatgggtggaacaaggtggacaaggtagatatagttagtgcttgctgtttggcaggaagtgagggataggaatagatggggtgaccccaagacagtagggcagcctttaggaacaggtttgatgtggcagtaaaatgagtttgaaatatataaaagaataaataaagagaaaaaaatggaaaaggaacaggtttgagggagcagattggattagtcaggtagtgtggtctcctctcccaagatggggactaggcagagttagtgatgttggggcagattggcaaggaaagttccgatggcgtccccttctctactgccagggcggcccactgacgcccttctcattcctccccaacttcatcccaactccccggtctacccaggtagttttcgtcttattcggaggctggacatttgctactggtccctgaagttttgcggctgcacccacagacagcaatagcgccacgttccctggaaggcgcacgggacggaagcggaagcagtaacgctggctccggctgcccggcggccaggaacggaagcggaagtggcggcggcgccggcctggcctggcctggctgaggggaggcggcgggcgggcgcgatggcggaggccgggccacaggcgccgccgcccccgggcactccaagccggcacgaaaagagcctgggactgctcaccaccaagttcgtgtcccttctgcaggaggccaaggacggcgtgcttgacctcaagctggtgcggcctgggctaaggggagacaagggaggctggtggaccaggcctgggccggtagcgggaaccccgggggcggcccagctgggtcctccgagagccggccgccatcgtgtgctttctcacaggagagaagccgggggatgtttcattcattcggccgaggccatcgagctacagctatgggccaggctcgggctgcaggtgttcgtcctcgtggcccttcctggctggcgaggagaagagctgcctatgggacagagctgcggtcctgagctgcagtagcgcctgggaggcactacagggttggaatccagattactcccttcccagaccacgtctcagggtggctgggggtacaccccagagtggggctgagcattctccattctctctgccaggcagctgacaccctagctgtacgccagaagcggcggatttacgacattaccaatgttttggaaggtatcgggctaatcgagaaaaagtccaagaacagcatccagtggaagtgagtgggcatagtgggagggtagtagagtctcccacccagaagtgtcgggcgtggggtggagggtgccgaagaaggcaggggccatgggacccagagttctcagcagtccctctcagccccactccctgggctcaggggtgtggggcctggctgcaatacccgggagattgctgacaaactgattgagctcaaggcagagatcgaggagctgcagcagcgggagcaagaactagaccagcacaaggtgtgggtgcagcagagcatccggaacgtcacagaggacgtgcagaacagctgatatcctcctggcggtccctgctggggggagtgggcaagg

SEQ ID NO: 1880 - DNA, 6000 bp, Homo sapiens
ttcagtagagacgggatttcaccatgttggccaggatggtctcaatctcttgacctagtgatccgcccacctcggcctctgaaagtgctgggattacaggcatgagccaccgtgcccagcctagccttatttttatcacctcaactgtttcacagcctgtcatcatattttccctcagcttgtttctttccagcctcaaacattctattccttttgtttggccttctgttccttcatctttggagctgactccataaagtaggacacatcaagatttaccataaagacaagaaaatattttgtttgtttatttatttttgagatgaagtctcgctctgtcgcccaggctggtgtgcagtggcgcaatctcggctcactgcaacctccacctcccaggttcaagcaattctcctgcctcagcctcccgagtagctgggattacaggtgtgccaccacgcctggctaatttttatattttcagtagagatgaggtttcaccatgttggccaggctgatctcaaactcctgacctcaggtaatccgcctgcctcggcctcccacagtgctgggattacaggtgtgagccactacgcccagccagaaaatattttcttttcttccttccttagtgatccttcgcattttctcagccctatgtgagagcagtacatagggtccttgtcttcagaaagcaggcttcaaggccacttggaccccattcctggcttttgatgcctcagagatcatagagttataaatataattaatatatagttgtaaatataatcataaatataattgaggcttttttccctctaaatccactgcctcaggctgggtgtggtggcttacatctgtaatcccaagactttgggaggctgaggtgggcggatctcctgagatcaggagttcaagaccagcctggccaacatggcaaaaccccgtctccactaaaaatacaaaaaattagccaggagtggtagtgcacacctgtagtcccagctactcgggaggctgaggcaggagaattgcttgaacccaggaagcagaagttgcagcgagctgagatcgagccactgcattccagcctgggcgacagagtgagattacatctaaaaataaaataaaataaaaaaataaatccactgcttcatatttgcctacataaaagctttagaaggtgttcctgtagtctactcttaaagaagatggggacaggtgtggtggcttacatcccagcactttggaaggccaagacaggagaattgctggagcctgagaccagcctgggcaacacagtgagacctcatctccacaaaaagaaaacaaaaaacaaaaaaaaaggaaggtgatttgaagtaaaatcttgagaaagtgaactaattagcttattaatgttactagaaagaaaatctaaagtttaaatgcaagtcagcttttaattttttttttatttttgagacaatgtcttgctctgtcactcaggctggaatgtagtggtgcaatcggggttcactgcagcttcaacctcctgggctcaagtgatgctcctgcctcagcctcccaagtatctgggactacaggtacacaccaccatgttcagctaattttttgtagagatgggcttttgccatgttacccaggctagtctcaaactcctgggctcaagtaatccacctaccttggcctcccaaagtgctgggattacaggcatgagccactgtgcctggcctattttttatttttttgagacagggtcttgcttcatcacccaggctggagtacagtggcacacacatggctccctgtagtctcgacctcctgggctcaagcgatcttcccacctcagcctcccaagtagctgggactacagtcatacgccaccacactcagctaatttttaaattttttgtataaacaaggtctccctatgtgcatgtcagctttgttgtttctagtacataagttcttaagtataccaggaactatttgggctgaggagaatgcaaaatgcaaatattccagaagcatctgtttggtaattttcctctgagtttgtcttttctttatgtctgagtcctaatgtgtacataagaggcaaatgggataacttggtttctagaaaaagaagggtcacgtgtaaatttttcaaatacttcacacatttctaaaatagtatctaattgtataaggtaagtaactgggattagacatgagaaaacttgccgggcgcggtgagtcgctcctgtaatcccagcactttgggaggccgaggcgggcggatcacctgaggttgggagttcaagaccagcctgaccaacatggagaaaccccatctctactaaaaatacaaaattagtcgggggtggtagcgcatgcctgtaatcccagctactcaggaggttgaggcaggagaatcgcttgaacccaggaggcagaggttgtggtgagctgagatcacaccattgcactccagcctgggcgataagagcaaaactccgtctcaaaaaaaaaaaaaagaaatgagaaaaattgggtcctggtgttgagaagctgtactatcccttttcttcatgtctgtacccaagcagctgaatgttggagaaaaaccaacacactgggccaactggtttacctttaacatcatgatcacaaacctcagatgagtacccaatgccaccaaggcaatcctgttaaggacttgccttccctctcccctgcacttgcatctgtcttcacctttgttgcccttatcatgaatggaagcatccctgttcctctccaaggtcaaccctccctgtttccttatatcttctgatggatttcactcctatataggtcaagcaagcctcctctctcctggatcacccatctttcttccccaccatatccctcccaatggcacataaacatgctctgggaaccctaccatcttttattttatttattattattttttgagatggagtcccgctttgttgcccaggctggagtgctgtggcccaatcttggctctctgcaacctctgcctcccgggttcaagcaattctcctgcctcagcctccccagtagcttggattacaggcgcgcgataccatgcccaactaatttttgtatttttagtagagaccgggtttcaccatattggccaggctggtctcgaactcctgacctcaggtgatccacctgccttggcctcccaaagtgctaggataacaggcgtgagccactgcgcccggcccctactatcttttaaaagatttctttctatatctatccccaaacttatctggtcccttcacagcaaaacctctctcaaattgcatacatgtgctgtctccatttcctcactttcctggtgactgtttaacccattccggtcaggtccacctccctgatatactcacgtgaatcaagccaaggccatcagtgacattctccagtgacttgcaaggtgacccaatccaatagccacatctctggcccaagtttatcacaccgctcagctgatgcctcctacctgaaaccttctctgcccagggattccacaactcagcgctagctttcatgacttcctagatgctgcctttcagactccttctccattaccctcccaatattggagtgccccaggatttggccatggaatttctcttcactctttcctccaagccaagccaggggtcgtaaactgacagctcatctgtgtggtttaatcagctcatgaagtttaaaaacatctgattcagttgctaacatctaaaaactctggagatttgacatcttaaaaatacagatttttttattcctttaggggaaaaaaaaagagtatgttattgggccagcattctcacaacggaacggtcagatggatggagaagaagctgctccctagatattgggtccatttgatatctaagggaagagtcatattccctgtaagtaccaaaaggctctcatcccagagccaccagcaccttgcagtcagttcttggtcaacttgactgcaggttgggaagggtccgcaggcgcctcctggggaggggtgggactgaaggtctccgcccacagagaacagctctcccgcaaagacaagaaatgcacgtttccacagaattacacagcgctaaatacagaaactcctttcagtaaaaagcgattgctatgaacgtgttaaagcatcaagtctggttttccgccacctctccgggctgaggtggcctggggacaccaagaggaggccctcccactctcctctcgcacccgcttttaggtggccctcttctagggcggagagatcaccaaaagccgctgagcaaggacagcccttccagtcgtcgctcgcgggcacggagctgggagcgcgcgggaaccgaccgggccttactctggggcgggcagctgtaagacattcggagggcgggtcgggcctggctggggcggagactgggcggggccgggcccgggagcctcctcagccccactggcttgccccgcgcgcgcttcctccagccacccccacttccccaaccctgtacgggttcagggggccggagacagcagctagggaataaggtcaagcggactggatccggcaccgcccaggggcggcggcctccgcccaggaagccccacccagcgggagccaggacgccgcggcgccggcagagcccacgagcgacccggcgagggcgcgtgcggcgtgacgacgcgactcgcggcgcgtcccgtgacgccatcgcgcccgcttttgaaagttggcgcccggggccgcctcccatgctgccctgcgccaacccctcccctcacctttcctcccccgccctctactcgccgcccggccggtccccccacccgtcccttcccttatcagcacccgcggccccggcagcgccgacgcaggcgcactgcaccgcgccgccgccattttgtgtctgagcctgtggagcgattaaaccgtgcgcggagctgcttctttggcggcagcggcggcggcggtggccggtgcggacgcgcggagctcgccggagacgccgggtggccggagccgtggagcggcggcggagcgggcgccgcggggggtgtggcgcggaggtaagggggcccggggtggaggaggtttcgcgggccgcctctaggtgtcacgatggggccgctccggtcggcgctggctgcagcccggcgccagcgccgccgccggggggtgtttgtctccctctaccgtccctgctgcggcgcggccgccgccattgcccgtcgccgccgtggcccggccgccccccccacccccacgcccgcccgcccgcccgcccgctaggcctccctcctggcagcgcgctaggcctcgggcggcggcagaggcagaggcccgcgcgcccggcgactccattttccttcctttgtctgccctcgaggccggttcttggccggccgatcgcccggccgcggcccgccctctgtcctgtgtcctccgcccctcccgcggcgggtggccccagctgagacactatctccgcgtcccggcttcggcgcccgcctagcttaagggttcggaccgactgccgccgcgcgctaagccaggtcccggtgccgtatgggtgtcgggccctggccgtcgcgtctcgggctgcccctcctccagccagccccgtccccggaacctaccctgccggcctgcgtgccttcccagctgcttggctgctcggcggtcgctcccagtccgcgcgtcgccgccgctggtctccgtctccgccgagtggcgcaggcggcgctgcagcggctgcgagcagagggaccccagagctgccgagagctccctctgcaaggctggctgagctgctcgcacctctacgctgcctgagcgggcggggggacgcgcgctcgccgcccccgctgcgcccccaaactcgcgcccgggttcctggccggacccgaccggtgcggcccccccacggtgggcggaaaagatgcgagttccgcaccaagtagtttttatccagc

SEQ ID NO: 1881 - DNA, 6000 bp, Homo sapiens
aggtggtcctggcttaaggagtcttctctgactgctatcatggatataatacaatgttaaggtgcctagacagagaattggagaaaagtgtgtctaatagaactaacaaaagcttcgtttgagctgtattcttggccaaaaatacaaaacacttcaatgttttgttttgggttttttttttttttttttttgagacatagtttcactcttatcgcccaggctccaggctggagtgcagtggcactcggctcactgcaatctccgcctccaggcttcaagcaattctcgagcctcactcagccttccaagtagctgggattagaggcacaccccaccacactcagctatatatgttttattttattttaattattattatttttttgagacagaggctcgctctgttgccctggctggagggagtacagtggcccaatctcagctcactgcaacctccacctcccaggttcaagcaattcttctgcctcggcctcctgagtagctgggattacaggcatgtgccaccacacctggctaatttttgtatttttaatagaaacggggttttgccgtgttggccaggcttgtctccatctcctgacttcaagtgatctgcccgcctcggcctcccaaaatgctgggattacaggcctgagccaccacgcctggcccctattttactcttgtttaggtaatgtcattcacaagatttttgtttgttttttattttttgtttttgagaccgagtctcactctgtcgcccaggctggaatgcaggggcactttctcagctcgctgcaacctccacctccagggttcaagttcttttcgtgcctcagcctcccaagtagctgggattacaggtgcacaccactacgcctggctaatttttgtatttttagtagagatggggttttgccatgttagccaggctggtcttgaactcctggcctcaactgatccaccagccttggcctcccaaagtgctgggattacaggcgtgagctaccgtgcccggcccattcacaagatataagagccaaaaactatgaattggctgatttgttttctgctttctattatatattcaatttggttggcatttattgagtacttaccatcctgggcacagtgctaaagagtaaaaaccgtggctgggcgtggtggctcacgcctgtagtcccagcactttgggaggccgaggcggacagatcacgaggtcagaagttcaagaccagcctggccaacatagtgaaaccccgtatctgctaaaaatacagaaaattagccaggtgtggtggtgggcacctgtaatcccaactactccggaggctgaagcaggagaatcacttaaacctgggaggcagaggttgcagtgagccaagatcacgccattgcactccagcctgggcgacagtgcgagactccgactcaaaaaaaaaaaaaaagtaaaaaccggttgggcgcagtggctcacacctgtaatcccagcactttgggaggccgaggcaggcggatcacgaggtcaggaaatcgagaccatcctggctaacatggtgaaaccccgtctctactaaaaatacaaaaaattagccgggcatggtggtgggcgcctgtagtcccagctactcgggaggctgaggcaggagaatggcgtgaacctgggaggcggagcttgcagtgagcggagatcgtgccactgcaccctagcctgggcaacagagcgagactccgtctcaaaaaaaaaattaaaaaaaaaaaaacgacttgttagatgtggttcttattctcagggaattcctgatctcattgtcaggagagaggtgaatgtcaagttgatggtatgacatgggcagttttgtgcagtgtctacaaacacggccattgcagtctggatctaagttctgagtttggcttcaaaaaacaaggtcaaaaacccttgacagggtggggaaaatggggaattgctgttgagtgggtataaagtttcagttatgcaagatgagtaagttctagagatctgctacacaacatagttcctgtattaatcgtatagcattatgcactttgaattatgttgaggatggatctcatgataaatattatcaccaaaaacaaaatacaaggaaattttggaggtgtatttagtgtttttttttttcttttttgagacggagtttcgttcttgttgcccaggctgcacagtacaatggcgcaatcttggctcaccgcaacctccacctcccgggtcaaacgattctcctgcctcagcctcccaagtagccaggattacatacaggcatgcaccatcacacctggctaattttgtatttttacttaggacggggtttctccatgttgttcagggtggtctcgtactcccgacctcaggtgatccacacacctcagcctcccaaagtgctgggattataggcgtgagccaccacgtgcttaataaagctaccttaataaagctttttacaaaacattggcagacccgggcacagtggctcagtcacatgtataatcccagcactttgggaggcttaggtgggaggattgcttcagcccaggagttcaaggccagtctggaaatgtggcaagaccccataattgcagaaaattaagctaattcatatatgcatcatctcacatccttgtcattttttgtgatgagaacacttaaaaatctgctctcagttattttcaggtatacgttattattaactgtaatattcatgttgtataatagatctcttgaacttattcccactgaaattatatgtcctttaccagtgtcttccccactacatgtgtaagatttaaattagttttgttagtaattctttaatatcatcagatatccagagttgaaatttctaattgtcttgtgtcacatctttttcaccatttattggtttgaatcaggatccaaagaagattcatgcattgtgattgattactgtctctttaagactcttttatctgtatcagagtttctcagcctcagtgctcttgacatcttgggcctgataattctttttttttttttttttgagatggaatctcgctctgtcgcccaggctggagtgcagtggcgcgatcttggctcactgcaagctccgcctcccaggttcacgccattctcctgcctcagcctcccaagagctgggactacaggcgcccaccaccacgcccggctaatttttttgtattttttagtagagacggggtttcaccgtgttagccaggatggtctcgatctcctgacctccggtaatctgcccgcctcagcctcccaaagtgctgggattacaggcgtgagccaccgtgcccggcctggcctgataattctttgtggtggaggactgacctgtgtcttggaggatgtttaatagcatctctagctttcacccacgagataacagtagcacatcccagcccagtagtgacaaccaaaaatgtgttagccaaatgttcctagaggcaaagtcaccccaggctgagaactactgatctactggttctccctccaatcagtcttcccttgtattcttcttgttatctatttgcagaagaacctgagtataatcttgcagtgtttccctcggtatggatttcactgatttaatccctgtagtataatttaacatcctgagtcaccaatttcctgttaattgggttggatctagagacttgattggtttcagagttttggagtttgtttgacaaaattgcattataggtagtggttttttctttttcttttttttttttttttttttgagatggagtcttgctctgtcccccacgctggagcgcagtggtgcaatctcggctcactgcaagctccgcctcctggattcaagctattcttctgcctcagcctcccgagtagctgggactacaggcgcccgccaccatgcctggctaattttttttgtatttttagtagagacggggtttcaccgtgttagccaggatgttctcgatctcctgacctcgtgatccgcccgcctcagcctcccaaagtgctgggattacaggcgtgagccactgcacctggccagtagtggttgtttctttcatcaagaggcacatgtctgttgtgtcttttttaatattaacaaccattgatgcctaattcattcaccaaagggtctttttgttttaaaatgtatatttttatttagacatgctttgctttaaataacaatctgtgttctcccttaataaaggcaggggaaatggaaggtgatgcagtcgaagccattgtggaggagtccgaaacttttattaaaggaaaggagagaaagacttaccagagacgccgggaagggggccaggaagaagatgcctgccacttaccccagaaccagacggatgggggtgaggtggtccaggatgtcaacagcagtgtacagatggtgatgatggaacagctggaccccacccttcttcagatgaagactgaagtaatggagggcacagtggctccagaagcagaggctgctgtggacgatacccagattataactttacaggttgtaaatatggaggaacagcccataaacataggagaacttcagcttgttcaagtacctgttcctgtgactgtacctgttgctaccacttcagtagaagaacttcagggggcttatgaaaatgaagtgtctaaagagggccttgcggaaagtgaacccatgatatgccacaccctacctttgcctgaagggtttcaggtggttaaagtgggggccaatggagaggtggagacactagaacaaggggaacttccaccccaggaagatcctagttggcaaaaagacccagactatcagccaccagccaaaaaaacaaagaaaaccaaaaagagcaaactgcgttatacagaggagggcaaagatgtagatgtgtctgtctacgattttgaggaagaacagcaggagggtctgctatcagaggttaatgcagagaaagtggttggtaatatgaagcctccaaagccaacaaaaattaaaaagaaaggtaaaacgagtttatccatagtggtttcataaaaccattttgggataagcatacaacacagtgcatatgcaagttgttttatattaaccgtatttgtaaaaggtcgttatgtgggtaccgttctttaaaaccagtctaaaataagttttttccagattgaatgctctttttttaatcccaaagaagaaggaaatgtattagtgacatgagataattatgacttatattgggttttgttattaaaagctaatcaaatatatttgtagaaatttaagattaggattaatcttaacactttgaaactctgcagcaagtaagtgttttattttgcacataggtgtaaagaagacattccagtgtgagctttgcagttacacgtgtccacggcgttcaaatttggatcgtcacatgaaaagccacactgatgagagaccacacaagtgccatctctgtggcagggcattcagaacagtcaccctcctgaggaatcaccttaacacacacacaggtgctggataagaatgttgggggctacaacagcaaatgctcagacttcgctttttagtattcattcaagctgactccagcgggaatttaaaggaagtttttattatttcttatgatgccctttttgtaatcatgattttattgtaagcacttggacttagttattatagacaaatgtaaagaaaatttaatgaaaaataacaccctctctcttaaaaaaaagaagtctcaggcaatagatgcctggtactatgaggaagaatgttagaaatagaagtgaaatcccagtgaaaccctgtctctactaaaaatacaaaaaattagctgggtgtggtggtgggcgcctgtagtcccagctactcgggaggctgaggcaggagaatggcgtgaacccgggaggtggagcttgcagttagccgagatcccaccactgcactccagcctgggcgacagtgcgagtctccg

SEQ ID NO: 1882 - DNA, 6000 bp, Homo sapiens
ggtgtacttcaatggtgtacttcactataataatggaggaaatcacctgggcgcagtggctcactcctggaatcccagcactttgggaggcccaggcgggcagatcacttgagtccaggagttgaagaccagcctggccaacatggtgaaaccccatctctacaaaaaatacaaaaatcaggctggcatggtggagtgtgtctgtaatcccagctactcggcaggctgaggtagccggggaggttgaggctacagtgagctatgatcatgccactgtactccagcctgggtgacagagtgagaccctgtctcaaataataataataataataataatggagaaaatcatcctgtgatacttactacatgaggaagggaacacggtgatgagggagagtgtgtgtagggtctaaggtagttggagaggtcagggagctctttctgtaggaggcagggggcaggcctgtgtgtgaactagtggaagttggactgtgtgggccccatgtagggcagaacctgggggcatcttttctccagggaaggaccctaaggaccatgagaaggagaacctgaggcggatcagggagattcagaagcgcttcagagaacaggagcgcagccgggagcagggccagcccaggcccctgaaagctctgtggcgctcacccaagtacgacaaggtggagtcccgggtcaaggcccagctccaggtacctgcttcagggagccagaagtattatccattttgttggccaacaggcaactgtaccctgatctgagttctggggtgggagggaagtcacagaggtaacagaggactaagagaccctggctctgctgcagggcgaggctggggggcttctcagaagtagtgatggtggggctgatcctgagggcaagtagcaattagtcaaagggacagcagaagagaacattcccaaaagatggaacctcacagaccacagggcacgcagcagtggagatgctaggtacagttcactgtgaggaaagaagggcgtgaagttaggccaagaagtcagctggacccacgtcaggggccacaaaagccacttttcagcccttatttctgaggacagtgggaagggcaggggtatggtggggggctctgtctcagggactcagtaggaggagcaggagtgagaggaaaggcaaggtcacacaaatgtgttgtagctgaagcatctgtggggttcccagggggtgggagtgtgtccaggaagcagatggaaattcaggcctggatctcaggagtgagacctaggagttattgacgatcaggttgaggacaacgagaccaaggaattgaccgcctggatttgaggacttggaggccagctgttaggagccttgcagggctagagccaggaagcttggctaggaaggaggaaagagagtggtagctgggccagtactgaggtggaaggagagatggtttgttgttttcttaaaaatctgacatactcacacatttgtgtgctgatgaggacaagtgtcccttgaagagggaagagggcccgagggacatggatgcaaaggtcagaagggccaagatggccagggtcttgcagcttgagccccagacctcagcctgcctgctctctctgctgtgccctgccctccaggagcctggccctgcctctgggacagagtctgcccacttcctgcgggcgcactcccgctgcggccctggcctcccaccaccccatgtatctagtccccagccaaccccaccaggtcccgaagctaaggtgagaggatgtatgggggctagatggtggttgggcagggctcctggtgtggggggggtgttcagggacacaacataatgctgtctgcccccacccacgcttgctgtgtcctgcaggagccaggcctgggggtggacttcattcgtcacaatgcacgagctgccaagagagccccccggaggcattcctgctcactgcaggtcctggcacaagtgctagagcagcagcggcaggcccaggagcactacaatgccacgcagaagggccatgtgccacattagtaggtctcactgcccgacactcagggtgaaggacacctgtggagggtgggaaccaacctctgccctcgggtcatcaactctgagcctgtgtacccacagcttgttggagcgcagggacctgtggcggcgggaggccgaggcccgcaagcagagccagccggaccctgccatgcccccaggccacacgcgcatgcctgagaaccagcggctggaaacactgaccaagctgctccagagtgagtacctgggcagggaggctggaggggggccccactggggaccgggcacccctgcccaacactcactgttctcactgttcccgggccccctgtaggccagagccagctgctgcgtgagctggtactgctgcctgctggggcagactcactgagagcccagagccaccgtgctgagctggaccggaagctggtgcaggtagaggaggccatcaagatcttttctcggcccaaagtcttcgtgaagatggacgactgagcccctttgggggacagtggcaaggagctccatgctgaggatcgccacatggctgcaaaggacagggttggacccaatcccagagcagaggtctgaagacaggagcaggggggtggccagtgtccctagagcactcttcccagtcaccagtggctgcagaagggccaccctagccttttaactgctttgtcaaaattaaacattttgtacacaggatttgtttccataagagcttttcttaccctaaaaatgccaagcctggtggccctcctgctgcttgattgcaggaagttctccccaatgtcactcctgccttagtccagagcagaaggcaagctggtgagaccagggaggaggctggaactgggacacacaaggaccatgactgtatttgtagaaaacctttaatgttccccaggctgagggagccctgtgagccagctaaaaacccccactgtgaagtccctgccatgtcccagcagtgtggagtggcatggggcttcatcctgactgtcagaggctgaagccactaccatctcctcgaatgcgactcccccagccagaactggcctgctcctggtcatccagggagggcagagagctgcgggtaccaggatgtcggcagccagggtgcaggtcccagcacgggggcccctgagacagcccattggaactgggaggctggcggttctcaatgaccaggtcactgctgtcatcgtcactatcaggctcagcaggcccaggccctgcagagggaggacctgtcaaacgcccagatgcccctcgcaccacgttattgcgctggttggcgggcttgacagtgacaatgaggttatggctgttggcaaccatcatgtccgtcacttggtccaaggtcttcccggctacttcaatgccattgacctcgaggatctcatcactgaccgccagcagccctgtactctcagccagacccccacgtaccaggcgggagatgaagattcctggaacccgctccaggccctggggagccacacgcacgctcatgccatctcggatgtagaagcccagggggcggtctgaaccatgcttgtgcagccgcacccgtcggtgggtctcaggcagtaggtccacgtctatgactgaggaaacctggcggaaatcttggggcaggctgattagcaagggtggccgggtgcgcaggggtgccactggccgcagcaagagccctttcttgcgccgctgcagagagttggaggcaaaagccaggccgctggagtcagcttctgctgcagaagaggggggatgttgagatcagagacctgctccccgacttgggctgtttacagggggcactgtagctatttcctaccacttagaggtcaagccaagggcagggactgcagagggtgacgcttgggtaccctgggcatggactaacccttgtagacctgccccacagacaccttaccccacagaggctgcccactgtacccctcctcaccccgcttctgcaccagtaggcgcagtggcgggggcccgctggccagggcccggtgcaggctgtcgtcgttggtgaggggcagcaggtcgccatgagcatccgtatagccaagtagcacgtccaggcccgggatctggtgcaccgcccgcagcaaccgcgagaactcctggaagccgctcaccgaagcgcgaggcagcgcgaagcgtcggaactcggcgtcaaactggaagtcggggttgggggagaggaggagtcaggacagcctgcgcccctttctcaccgcaggctggcaggaatgggaaagatgcggctgccgcttttgcggcagccttaagcccagacctcagctccagtaccagggacgctgtccaaggtcttcttaccgccctccaggtactcaggccacagagagctggagaccagcagtggaggaaggaagacggatgggggaaggcgagcagaaaagcagaatgggacttggaggatagagggaagaggtggcggggaccaaggagctgggaaggggagaaagagggaattgggagcgcctagggccgaggccggaggagcccttactttgctcttcacctcgacgatgctatcgggactgcgcgccggagtcctctgcggccgggccatggcggggccgggcgggccggggacggtgccccaggcggcccgccgaggcgcaggtgcacagcccggccggcccgcccgcgccgccccgcccctggcggtagcacacgccccgccttcccatccggagcgtgacgtcaagggggcagcgacgcagagtggaacgcggagtccacgtttcctaggaaacggagccgtggatggagaggagccgtcctccgctcttgcgtcatcacgctgaggtccgcgcgcccccggagtctggggagcagggctccgccaatccgaggggagggcgaaggaagtaccatttatttagcgctgtgtgtgtgctcttatttccactggccttacaagaccgtgcactgtgtagatgaggaaactgagtcataataaatatgtgctgaaccgttcgggggtcacacggtgctgaaatggtttcgagtcaactcgctcggacggcactcggcctcagcctccggccctggaaccctctccagggacgggaccagcccttgttctgttccctaccggtaccacaggaatcttgacgaacggcccaaatgcctggccgctgtcagagtgacgccgcgatgagagtaaacgggccagcatcccgtgcaccagcggggtggaccagcgggagtctgcacacaggcccccgagcaggacgccctcgtgcgcaggcgcggggtgtacgtgggcggggcctcctcctccggccccgcccagcgaaggagcttcctcttccgaggaaaggcggggcctgggcgcccgcgggaaacccgggcccgttgcatccgctgggtgtagccgtggggatggcaggttcggggaggctggtcctacggccctggattcgggagctgattctggggtcagagacaccctccagtccacgagccgggcagctgcttgaggtgagcccccattcagggcccggagaccgaggcggaggcccggggtggtgggattgacgccgctcgccgccgtcaggtactacaggacgccgaggccgcggtcgcgggcccatcccacgcccctgatacgtccgacgtcggggccacgctgcttgtgtctgacgggacccacagtgtccgatgcctggtgacgcgggaggccctggacacctcggactggtgagaggccccgcgcggctctggaggtcggagtccggcaggagagcgcgaggtgggcgggccttgtgttcaggtgggcccggcagtgaggatcctgcttgttgcagggaggagaaggagttcggcttccgcgggacagagggccggctgctgctgctgcaggactgcggggttcatgtccaggtcgctgagggcgg

SEQ ID NO: 1883 - DNA, 6000 bp, Homo sapiens
ggaccctggggtgtggcagtacatttgccaggaggtgtccttatagacagcccccaaggcacttgctctccttggggaggaaggggagaggccaggtttttcttcccctcacctccaaggtctggtacctgagtccccagctccgccttgcaggtgacattatggacagttccacggaggcccctcccatctcgatcaagtcccgcacccactctgtgtctgctggtgagtgagggccactgtgtgtgttggtagtgggagcagggacaggcaggagttgggtcagactgttgttcagacctatcgccaatgcctgaccaggtcttggctgacacctttctccctacagacccttcctgcagacctggcccagggagccaggggcctgagtctgccacctggaagacactggggcagcagttgaatgcggagctcaggagccgtggttggggccaacaggatggtccaggccctccctcccctggtcaaagcccaagtccctgcagaaccagcccctccccagacagcctgggcctcccagaggacccttgcttgggccccagaaatgaaggtaggcaggcacctgattccccaccccaatcctggcctcggggctggaggagttcctgctgggaactcagctcctctaaggaccctgagggtgggaggcaagggctggagtgggggcagctgttggaatacccctgattccctggcctccctcagatggccagctgaggccgaggcctctctcggcagggcggcgagcagtgtctgtgcatgaggaccagctccaggcccctgctggtgaggggagacacctccacgtgtgcttgaatgcaggagatgtgggagggtgggcttctggggctcccttcatagctttggtccttggagggagccaccagtgtgtgaggtctcaagaaatcagggagccagaagaccaggtgcaagggtttgacagcaagcccttccaactagcactggctccacttcccgaagagcagcctctgccaggggtgaggacgcagggacgggggatgctctgaaggcagcagtgtgtgtgagtgcatgcttatgtgcactggaggtggaagagaggggcaggggatggacagaccccaagccttagcaacccaccccaagcctttctgtgtcccttagaacggcccctgaggctgcagcgctcccccgtcctcaaacgcaggccaaaactcgaggcacctccatccccaagcctaggtaagagggggtccaggccagctgggagggtggcaggactgcttagcccagccctgacccttcctctctctccctccctcccctcacaggatctggccttggaaccgagcctctgcccccacagcccacagagccctccagccctgagcggagcccaccctccccagccacagaccaaagaggcggcggccccaatccctgatcctctcctctcctgccgcatgagattattttattaaaaaactcaaaggaagcagagtgtggagcggtatctgtcctgcgtgacgtctcacatcggagttggctcagaccctggctgtgcatccatcagaaagtgcaaggcccaggccatgagctggggaggaagcctggaaagaaaccaccgctgcaggtcaatggagcctgggactagtgaccaagagttggggcagacccaggcactcacctgacagcttggacccgagcacagagggacgtgcagggtggctcatactcatactggaaggcagaaccatcacgatgcctctttgggggttcctgaaaggggtatggtgtctggggaagagctaacaaggaccccaaccccatccaaggctacccatgctccctcccagctctacctcaggccttccttgttctaccctccagctgcagaggggctatgctcacccagacagagcagggctcctgggctcccctggtagctccggtcctgggaaaaggcggccgattcttgcagggcaaccctacaaactccttgaactccaggctaggtttctggggcctggtcacaagagcctggtgtggactggggacatggctacggggtgagagactgggagtgcagctctggagtggggagctgggggtacggctggcgtgtggggacctgggggtcagggtggcaggggctgagcagatggctggtgagggctgggagctgcttctctgccctgggtctggagcagccaaggacagggcaggcagaaggctgatgctggtaccactttcctcggatgacatgtggccgggtaaggccggggttcctgaggaggaggggacttattgtaggcacagccctctccgctcagggcagctgagtggcctgcgagctcagacaggactgcagggaccgtgttcatcccccacccaccgtgcacctttcacagcatcctgcgcagcccgggaacctgactgacaggcggcagtgagtgcctgtgacctgtgcatcacctcacctgaggaactgggtgaggaaggaggagaggctatgagggtcagagataggtcctgcagagccgggtctggtgggggcagctcagggcctggggggttcaggaagtcttatcagcactgtggacctgggccccaggtatccccccaacctctccagtcccccttaccctgtgtcctctgacaggggcctagagagctcagaattagctggtcattctcagagatgcacagcattgagctggggacagtgtacacagcttctccctgtgggacatgaactctgtaggacaggcccgtttactctcatgtcctgtgggatatgacccttgcccaactcctcaccctgacatctcccaagcaaatccccagactgaccgtggccttgcatcgtgaggcagcccagtgggtgacagggggtgctgtgcaagggccctccagtgtcaggcagctttcagccaggcacacgagtgccccctgatgctcctggtcctcccgcatttcatccagaagctgggacagtgataggcctggggacaggggaccatgggatgagtcaaggcttaaaggggaggaccaggagggtgagggggaagacagcttattgaggaagcataaggttaaggctggagagatcactgcacagcgtgttaggatcactggtcaagctctacagtacctgcattggacgaggtggactctgaaaggtgctccctacaggaagagagtggccaggactcaggaaccatgctgaggcctgtctacctagatacaccatcccctcaccaaacaacacgtggcccccgagcccaaccccagactcactcaaggcagtcatagagctttttctgaacatctaagtcttggttgctaagaaaaagagaagggtagttaatgggggcccaagccctcctaccccataggcgtctgccagcgccggccaggctggggtggggagagctgctggagggcggaggcatcacttaccaaccaggcacccgtagccggggctgctccgtgggcagcaggctgaagcggtccacctggagatagaactctgcgggctggaggagttcggggggaagggggggtctcagaatcgtcacgaagagtcatgcccggtaacccgcccaaggcagtctcaccactcaccgcgccgccctcagcgacctggacatgaaccccgcagtcctgcagcagcagcagccggccctctgtcccgcggaagccgaactccttctcctccctgcaacaagcaggatcctcactgccgggcccacctgaacacaaggcccgcccacctcgcgctctcctgccggactccgacctccagagccgcgcggggcctctcaccagtccgaggtgtccagggcctcccgcgtcaccaggcatcggacactgtgggtcccgtcagacacaagcagcgtggccccgacgtcggacgtatcaggggcgtgggatgggcccgcgaccgcggcctcggcgtcctgtagtacctgacggcggcgagcggcgtcaatcccaccaccccgggcctccgcctcggtctccgggccctgaatgggggctcacctcaagcagctgcccggctcgtggactggagggtgtctctgaccccagaatcagctcccgaatccagggccgtaggaccagcctccccgaacctgccatccccacggctacacccagcggatgcaacgggcccgggtttcccgcgggcgcccaggccccgcctttcctcggaagaggaagctccttcgctgggcggggccggaggaggaggccccgcccacgtacaccccgcgcctgcgcacgagggcgtcctgctcgggggcctgtgtgcagactcccgctggtccaccccgctggtgcacgggatgctggcccgtttactctcatcgcggcgtcactctgacagcggccaggcatttgggccgttcgtcaagattcctgtggtaccggtagggaacagaacaagggctggtcccgtccctggagagggttccagggccggaggctgaggccgagtgccgtccgagcgagttgactcgaaaccatttcagcaccgtgtgacccccgaacggttcagcacatatttattatgactcagtttcctcatctacacagtgcacggtcttgtaaggccagtggaaataagagcacacacacagcgctaaataaatggtacttccttcgccctcccctcggattggcggagccctgctccccagactccgggggcgcgcggacctcagcgtgatgacgcaagagcggaggacggctcctctccatccacggctccgtttcctaggaaacgtggactccgcgttccactctgcgtcgctgcccccttgacgtcacgctccggatgggaaggcggggcgtgtgctaccgccaggggcggggcggcgcgggcgggccggccgggctgtgcacctgcgcctcggcgggccgcctggggcaccgtccccggcccgcccggccccgccatggcccggccgcagaggactccggcgcgcagtcccgatagcatcgtcgaggtgaagagcaaagtaagggctcctccggcctcggccctaggcgctcccaattccctctttctccccttcccagctccttggtccccgccacctcttccctctatcctccaagtcccattctgcttttctgctcgccttcccccatccgtcttccttcctccactgctggtctccagctctctgtggcctgagtacctggagggcggtaagaagaccttggacagcgtccctggtactggagctgaggtctgggcttaaggctgccgcaaaagcggcagccgcatctttcccattcctgccagcctgcggtgagaaaggggcgcaggctgtcctgactcctcctctcccccaaccccgacttccagtttgacgccgagttccgacgcttcgcgctgcctcgcgcttcggtgagcggcttccaggagttctcgcggttgctgcgggcggtgcaccagatcccgggcctggacgtgctacttggctatacggatgctcatggcgacctgctgcccctcaccaacgacgacagcctgcaccgggccctggccagcgggcccccgccactgcgcctactggtgcagaagcggggtgaggaggggtacagtgggcagcctctgtggggtaaggtgtctgtggggcaggtctacaagggttagtccatgcccagggtacccaagcgtcaccctctgcagtccctgcccttggcttgacctctaagtggtaggaaatagctacagtgccccctgtaaacagcccaagtcggggagcaggtctctgatctcaacatcccccctcttctgcagcagaagctgactccagcggcctggcttttgcctccaactctctgcagcggcgcaagaaagggctcttgctgcggccagtggcacccctgcgcacccggccacccttgctaatcagcctgccccaagatttccgccaggtttcctcagtcatagacgtggacctactgcctgagacccaccga

SEQ ID NO: 1884 - DNA, 6000 bp, Homo sapiens
ggctgacgctccttcttgcttgtgcggttatgaaaggcctcctcttccctgcccactcagcctgcagacttgacaggggccctgtacccctgagcaggctccatcccagctacagccaggcctgctggagccagcaccctcttgtccacccccccacaccccttcctctcacccaagagcacacctgaaactgttttgccacagccatcttgggtggtgaccccccttgtgcccaaatcagaggctacatctcagcctttatctcgggcctcctgctgggagcccctgccccctggcatgccctgtgtgggtcctcctgccttcctgcgcacccgtcctcgggtgccttcctggagggctcatgcagctggccctgcccatgcgtgggactcccacgcccaccgcagtgactcttaagtatctctgactggttgcattcaaatggtccagcttatcttccatcctccccttcatgcatggcagcctctcatccagctggtcactcaggccagaggcctgaatgtggcctagagtctccaggcactgagctcttcctgctgcccctgcaccaccctcttcagctctgccctgttactccccttcctacctcctccaacagcaaacccttgcccatcctctgcgatctggctccgaggactcctccacagtagtctcattgcctcaggccatggaggtggcagcaatgaggttgagaagaccttgctgagccatgcagggcagggccgggccacgccccgtttctgggccaggcccagcctgacatcaggtccccagctgccgaggaggctgctcttcgccaaccgccctctgtgccgcaggttctttctgatgtgctacctgttcgtgaacctcgcctgtgcggtgcagacactcctgaggacccccaactggcggccccggttcaagtactatcactggtgagccatgcctctgacacgggagaccctggggaggccaggagcctcattctgggtgaggcttgggtttcctgggtagggagctcttgaaacactgtggggagggagattatagggctgcgggggactggacctaggtcttacacccagtgacctgaccacccacctgggacctcccacccgggacctgacagggctaccagggcatgggccaggctgtggccaggggtcctcctggtcctgccctgactctgccctcccctctcgtccagggcgctgtccttcctgggcatgagtctctgcctggcccttatgtttgtctcctcctggtactatgccctggtggccatgctcatcgccggcatgatctacaaatacatcgagtaccaagggtgagtgagcactgccacctggcctctgccagctgagggggcccggccgagcaggcagggtggtctggcattggggtgggcagggagctgggccaccgtgggtgccaggactggggactgtaactcaggacccctgggtggtcttgaggggcagaacccctccacctcgcatccacatagacagaaccccctgggcggcaccaggggctcaccagctgtggtggaatctgcagggctgagaaggagtggggtgacgggatccgaggcctgtccctgagcgctgcccgctacgcgctgttgcggctggaggaggggcctcctcacaccaagaactggcggtgagttcccgccagaccctggccagggcgcagaggttcttaggggtcgctgtcggggtcagagggtcgagaggtgccggctccccatcctggggctgcccggggcaccctcctgggccatgctacccaaacctgcagggaccacgacccgagaagggaagaagaggaggggctccctagaacggccggccctggtctcaggctccccccacccggccactgcaggccgcagctgctggtgctgctgaagctggacgaggacctccacgtgaagtacccgcggctcctcaccttcgcctcccagctcaaggctggcaagggcctgaccattgttggttctgtcatccaggggagcttcttggagagctatggcgaggctcaggccgccgagcaggtacttgctttggggagggagagctgagccagactacaggggtctggactgcagctggcacggaggggagggcccagtcttggccagggtggccagccaggcagccagcactgctgccacctgagagctggcacaagggggagccagcagtcccatcttgaaaacttggcctctgggtaggcagcttgttgcccccaggccctcctccacccaaaagtcgttttgttcccgaggggccttgggagggagcccagaggcaggaagctgatggcctcccattggccctgggtgtgttccccacagaccatcaagaacatgatggaaattgagaaggtgaagggcttctgccaggtggtggtggccagcaaggtgcgggaggggctggcccacctcatccagtcctgtggcctgggaggcatgcggcataactccgtggtgctgggctggccctacggctggcgacagagcgaggacccccgtgcctggaagaccttcattggtgtgtgaaggcctggggcctggtgggcaggggtgaagtgaggtggcagtgggcggagggccacagactggtggtcagccgtgctcctcctccccagacaccgtgcgctgcactacggctgcccacctggccctgctcgtgcccaagaacatcgccttctaccccagcaaccacgagcgctacctggagggccacatagacgtgtggtggatcgtgcacgatggtggcatgctcatgcttctgcccttcctgctgcgccagcataaggtagaccagggggtgggtgcagatgagaggggctaggcccttggaggagcagctgtgaccaaaccgcccacctggtcccttgcctcaggtctggaggaagtgccggatgcgcatcttcacagtggcccagatggatgacaacagcatccagatgaagaaggacctggctgtctttctgtaccatctgcgccttgaggccgaggtggaggtggtggagatggtgagccctctgccctgccctggccccgtggataccatgtcccgtgcagctgggtcctcacggccaaccctgtccccagcataacagtgacatctctgcatacacctacgagcggacgctgatgatggagcagcggtcgcagatgctgcggcagatgagactgaccaagactgagcgggagcgagaagtcagtgccctttgtggttcacgccagggcgggtggcagggtcaggcctttggagaccgcatcggtgggtgcggaggaatcagaatgactcaccgcagccctacccaagctagtgctcatttcccggaggcaaggtggtcacattgggccagacaggccccatcccccttttcctatgggaccaaggctatctcctgcaattgtcctcaggcccagctggtcaaggatcggcactcggccctgcggctggagagcctgtactcggacgaggaagatgagtctgcagtgggggctgacaagatccagatgacgtggaccagggacaagtacatgactgagacctgggaccccagccatgcccctgacaatttccgggagctggtgcacattaagccgtgagtgcagcaaaaacagccccagcggcactggaatctaggggtggaggtggggtggggcagacaagtagtgttagatgggccaggggtggggaccctccttgcaggatggctcatggcgacctgtgactggctacactacgtgtagggaccaatccaatgtgcggcgcatgcacactgctgtgaagctcaatgaagtcattgtcacgcgctcccacgacgcccgcctggttctcctaaacatgcctggcccacccaggaacagtgagggcgacgagaactgtatccctttgtggagaggcaggcagttgggaggtggatagcatgggaggtcaagccagcggcttctctcctgggcacccctgggtgggcatggcccaggtggcccgggttgcccgttgattctgttgttgcctccttgacttgaggccctgcagacatggagttcctcgaggtgctgaccgagggccttgagcgggtgctgttggtgcgcggtggtggccgtgaagtcatcaccatctactcctgagcccagtgtcatcttgtggcctggagtcgaggtcttggccaggacataacaagctgtggtctggggtaacagcctcttcccagcacccacctgccagccctgcttgcctggccctgtcctggacccagctttgctaggtctccttggaaaccaggcctgggcctcaaaatggagatggatcccaggtcttgtgggaccctgggatgtttggggactttactatctagcaccccagtaggcctgtcctggccagagaagactggtaggggccgagtggggtttgaaggcagccggcccggcccagcccaggagcgctatttattgcatatttattgtttggatgtcaccatcagagacgaagggaagggtagccagggagggagtccagcccagctgcctgcaggaagatctggctcagtctactatgggcagggccccccaccaagctgagccgaatggagacagctgagctgaggcctgactttttcaataaaacattgtgtagttctgggcctcctgctgccccggctctgtttcccctggcgccaagagaagaaggcggaactgaacccaggcccagagccggctccctgaggctgtgcccctttccggcaatctctggccacaacccccactggccaggccgtccctcccactggccctagggcccctcccactcccacaccagataaggacagcccagtgccgctttctctggcagtaggcaccagggctggaatggggccgcccggctccccatggcagtgggtgacgctgctgctggggctgctgctccctcctgccgcccccttctggctcctcaatgtgctcttccccccgcacaccacgcccaaggctgagctcagtaaccacacacggcccgtcatcctcggtaagcccccaccaggcccctgatgcaccacgccagaccctggggagcctgggccccagcccctggcagctgacctggccaaagcccttctgccctgcataagccccgacataagtacctgccctggtgtggggaggggccaaaagcttgtcccttagaggaatgacgtcccttctcccaccacactgtgactctcagttgtctaacccagggggggcggagtgggggacggggtgtgcctgaggtcttggctggggcatcacaagctgtggtcagtcacagccacaccagactctgggccaagccccaccactccttccttggcccccacccaccaaggacaagatgcccagcccaggatcggtgagcaggagaggcccatccatgcccggcccctattaggcccagcccccatgcccccagacctatctgttcccaccttggactttggcaataaaggagcgccagactgggtgtttgctctgcagaggcaggggtcagcggccttggcctcagcacctcagcgccttcccttcctcagggaagcctgggctttggctactggggggacagcagggagagggggtgtaagcaggggagggtaagtgtgctttgtacctgggggttgagggtatgggaggtggggggtgggtctggtcactgcagcatctggggtgacgggggtaagggtcacggggggaatccagagtccagagtgagggctgctgctcacagtgcccggctgcctggggaatcagctagaagccaagctggacaaaccagatgtggtgaactggatgtgctaccgcaagacagaggacttcttcaccatctggctggatctcaacatgttcctaccccttggggtagactgctggatcgataacaccaggtacagccatgtgctccaccctagccccaacacgctgccccttggctactggctgct

SEQ ID NO: 1885 - DNA, 6000 bp, Homo sapiens
ggtgggaggccctgggcaggtggcttctgcagtcctgggccggtccggcctaccctgccccgtccctaagtaacagagcgcttcgtaagcccagggcgcagagccaggacactccgcgacccatctcacggagccctaaaacaaccccgaggtggaagtgtgtttcccccattttacaaatgttgcatctggggctcagagagggcggcctctcacccgaggtcacacaggaatcgggcccgcccccaggccgtggagccactaggagtgctcccgcccaggggtcttcccgccaccagggcccccgctctgggaggagccggccgagcccctcccgctctccgcccccgaggggcggcccggggggcgggcggaggaagtgagcgcagcggggaggaatgcgagcgggcggggcgtgtcggcccggggcggcggggacagcggcggggacagcggcgggcggctgggacggcgggtgcggcggggccgagcccgcacgatgcctcacttcaccgtggtgccagtggacgggccgaggcgcggcgactatgacaacctcgaggggctcagttgggtggactacggggagcgcgccgagctggatgactcggacggtgagggcgcgttctgaggggccgtggcggggcagcggggcctgccacccggggccgccatcccgggcccgcgcccgcacctatcccgggaccttgcgcgcacacgtcggtgcggactcaactttttttggaccgcgccgctgccactggctccccgccctgcgcgcgcagacacgattttcctcggcccccggcgcccgcgcccggccgctttctccaccccagctcctcccctgtgggccccgggcgggggctgcagacgtggccgcccagggaggccagccggccgggccgcccggcttggggacagggccgagaccccatctcaggcccttcccggcccttcaacttcggtgaatcccacatccttttctcgcctcggttcctcatttgagattcagcgtctttgcctttgagacgatccgctccccaactgcccaaacccctccgtgtgcctctctgcgcctacctgcactctggccagagtgtgcctactggggggtctatgggtaactgcccgtgagtgcgccggtgtagatctgtagggacagtgggcctcagtgaagcactcacatggagccggacgtgtctaggcacttgaagtgagttaactcgtttaatcctccagcatcacccttgggataagtactgttactctcattaggaagcagtgaagggaggggtggcggttatataacttgcccaggggcagtcaagcctgggtttgagattccagcaccttaactctttaacttaggtgccagggccgagaggtaagccccatctccctcctccttcctcccaggtgcccgcgtctctccacagccctttctctatctcctaccccaggaggccccccagagggctgttcttgttaaggcccaccctcggagcacgaacacggctgaggacatgtgtctgtgtacgtagtggcatatgcatgtgtaattgtgcttgtacaagtgtgtagctgtgggtatcacagggtgaaggctggttcaggtcagggcattctcacagcccctgtttcctgcagggttgacagtgatgaggatggtgatttgactgatgataaatgcctgtgatatctgtgaccgatcatgatggagatatgtaggaagtgtgtggttgacacgtgtcaggtgacgttgtctggacctctgatccatctgtgatggtgacacgactgagatgatccatgcccaatgtgaatgatggctatgtgtgtgtatcacttgactgccatgtgcagaggtagcacaggacagtggcatgggctgctggacattgcagaggttttacaggcttgacagctgtgtgagtgccccagcctccatgcccttgtctgcccctagcttgattcaagtggtcaaagcaaaagccagcattcctgcttccctaaccctgggaggacctctctccccagagggtagactgggctgcatccccaggatcagcctggaccagtgggcaggcagagctgagcctagctgctggccccaccttggccacgccttggcccctacagggtgactggagggacctggagctacattggctgagtcctgctagatccccgcaagctaggccagctcctcccactgcctcccttcctctttctcctcctcttactcctttccagccagaccttggctgtctacaggatgggggacaccctgagccccggtgagtgattttgatccttggtggggactgcaaagggtcagagggcacaaagcacagtgagcctcagatctatctcctgccccttccccagttcagtgcccacacctctgctctgggaggcctagatgggcttgctcatccagcccaccttggcctgtgggcagggggtagggaggtgctggagggggcacctcaggcagatgtccgtgtacacagggatcaggagggtcacctggatccccacctgccactggtgcagtcacagttgctggtgggaacacagttgtgtagctcacaggcagtccctaggcctaggccatattcagatttactggggatctcaggtggtgtctgagcagcttcagcctggcaggcatgtccagacctgccctggaatttttggaatggctgaggccagaacaggaggtctgaagccgagggcagtacagacatccaggcactacttagacccttacattcccacaagcccttgggagctttgggggaactccgaggagtgcccactgggcgtctggcactaactgtcccttttctagtgcatctgggcagttggaaaaacaagtgttacaatctccacttcatagaagaggaaaccaaggccgcacagggagtaagcatgtctccctgggtcacacgggggaaggtctgggaatccaagccagtctgccgcagtctgaatgcccagaggcctaggtatgcgtaccctggccaaattgcagcactcttctctatttttaaagattgtgctgcatagatggactggagtctgtagtaggaacggaacctgcagctccgcccctacagggctctgatggaccctgggacccagatgtggccttctccctgggtgaccttgcctctgaacatctttgagcttcactctccttgtccctaaaaggtagtaaatgctctctactggaatgttgctgtgagaactagagacaacttttggaagggccccgagccatcctagagtgatagctgaagggacaagggataggctaggtcttagaggaccatttacaggcatttgtggggagctgctgtgtgctcagctgtatattttctggatagcaatacagtctacccagaaagaccaggcaacagtgatggggcaggctgtagtacatgagtttagaataaattataattgatttccagcctacttccacaaaagaatcagaagaaatagccaacaaaagtgtctccccaagtgattgttactctcaggaagattgaaaaccatgcagaggaagggggcaagcactcaggtgagacagatggtgactttatctaaagagtaaatttagcttggagattcctggcagccaaagcagaaagagaagtaagacgagctgtataactggcattttctgacaaaatgaagcacctgatttatcaaagggagacactttttttgtcacaaaaatccaaaagtaattttcaaaggcttttcactgaagagccattaatgtcattaatgtaagaggcagagtgttactgggttttcagatttttcttgggactccttctgatcctgaacaagcatggagggtacagcagatatcatagagtgtccgacatgaccccgcctggctttaacatgacacggtggactgtcttgacctctggctgcctttgtccactgtgccattggcattgacctatgtgaatgtggggctgagctgcttggctcacttagctagtccaggttgctgggtgtagcaggtgtgccactttcacatgctgtgggaaggaagaactgactttgccccagaaactgtcatgggcacacttgatttgttagtttccttgggggataaagaatccacagcacagcacctgctgagtggttgttggctcagagaaagcaattgaagcctcatgctgatagcaagagatgtatcagatacaggaggatgcctcaatcagcattctcagctgcagtcaagaaaaatgaattgtggcctatgtaaacagaaaaggttggcgggcatggccagtgcatggcccaatcacaccactagcctgggctggtggtgacagttctgttgccatctccatcactggacaccatgccagtccttctcatgtcagaactacatactgctgccatccaacaccaagatgtgtgctttccatttgctgtgaggccttgagccagggccggggctgcgagggtagctggggtggagggaacactcagcacctagaaaacgagtgcttggcgttctgcttggtgggaagctgggaatggcacccaccgagactcataagggacaagagttggaaaacagggaagaatgaatgataggaggccagaaaaaacagtcgagctttgggagttgaggcaggcttattgaaaaggagcatttcactccttttggcgagatttctcagagctggggcactggctcatcagcctagggctgtaggcggaggtttgcctggggcaagcggcgggatctgcgggcaagggggccattgtgttgctcctgccagcagtcccagctcccatttttctccctgctcagtccgacacccacccgtccgactttcttaggcaaccctagaaggctcctggaatccacttccgctctccacggcctggggcttgccccacctcccggcatgccccgggctgccctgcaggacgccccccgcgcagtgcatggtggggtagccagccggccacctttgggccatggcagccgaaggtgctgtgtgcggcttcgtctatctggagggcactgcctgggcggtccctgaggacaccgaacccttggcatcctgcacattgggtactccggaaagaccgggaaagggactggggcgtggaggcgatctgggggcgggtcaaacgctggccccgcccctctgcaggccccgtccctcagtgtccatacgtgcttgtgctagggcgcctgcgccctcacctggattcccttcactggagggaatgatgtcccaggttttggtcactggcctctctctggctatccctgggccttcaagagcattggcacggtgccatgtgaaaactgagttgcaacctggtgacactgcagctccaaagtgctccacagaaatgatttggggactggctttctgggaaggggcccaggctggggggctcaggaagcaggccctgattgtccctctctcttcacaggacatggcaaccacagagagagcagcccttttctttcccccttggaggcttccagaggaattgactactatgacaggaacctggcactgtttgaggtagctgaggagccattttgggccacaggtttggcacacagaggctttagctaagcaggcaggctggacacgtgggcctcctctgtcttgctcttcctctcatctcctcttgtgttcctggttctcatggcagccgggctgcagttcccttggccctttcaactgaaactgcctttccagaggccactcacaatcccacccccattgctacctccagggtggttcacctctgacttccttacaacccctcagcaaggaaacgcccgcttaggatttcccaactcaggatttctcctcttccttccactcctggttcttctccaagtccatggttcttcgctctcccatggattcttccttgtctttcttggttgacccttccagctctgtccctctctagttccctgagtcc

SEQ ID NO: 1886 - DNA, 6000 bp, Homo sapiens
tgagtagctgggactacaggcgcctgccaccacgcccggctaattttttgtatttttagtagagaccgggtttcaccatgttagccaggatggtctcaatctcctgacctcgtgatccgcccacctcagcctcccaaagtgctgggatcacaggtgtgagccaccgcgcccagctaaaattaaccattttaaagtaagcagctcagtggctttagtacattcacaatgttgtgcagccaccacttctatctagttccaaaacattttcatcttaacaggaaaccctacacccaccctatacccatgaagcagttaacccccttatgctttttttttttttttctttgagatggagtcttgctcttgtcgcccaggctggagtgcaatggccagatctcagctcactgcaacctccgcctgccaggttccagtgattctcctgccttagtctcccaagtagctgggattacaggcacgcgccaccacacccagcaaatttttgtatttttagtagagatgaggtttcaccatgttggccaggctggtctcaaactcctgacctcaggtgatcctccccccttggcctcccaaagtgctgggattacaggcatgagccactccgcccaccagagaccctgtctttaaaaaaaaatgaaagaaaaagaacaagcagaaatgtaagacccaggcatggtagtgtgtgcctgtagtcccaggcacccaccctatacccattaagcagttaaccaccacatgcttttttctgttttttgagacggagttttgctcttgttgcccgggctggagtgcaatggtgcgatcttgactcactgcaacctccacctcctaggttcaagcaattctcctgcctcagcctcccaagtagctgggattacaggtgcctgccatcacgcccaactaatttttgtatttttagtagaaacgaggtttcaccatgttggtcaggatggtcttgaactcctgacctcaggtgatccaaccaccttgacctcccaaagtgctaggattacaggcatgagccatggtgcctggcctgctttttttttttttttttttgagacggagtcctgctcagtcgcccaggctggagtacagtggcatgatctcagctcactgcaacctccgcctcccaggtttaagcaattcttgtgcctcagcctccggagtagctggaattacagacatgtgccaccacacctggctaatttttctttttcagacagagtctcgctctgtctcccaggctggaatgcagtggcccgatcttggctcactgcaacctccatctcctgggttcaagtgattatcctgcctcagcctcctagatagctgggactacaggcacatgccaccacgccaggctaattgttttattttatttatttatttattttatttatttatttttattattattattttgagatggagtcttgttctgtcgcccaggctggagtgcagttgcccaggcaacttgcactgttgcccaggctggagtgcagtggtgccatctcagctcactgcaacttccacctcccaggtttaagcaattctcccacctcagcctcccaagtagctgggattacaggtgcttgccaccacacccatccaaattttgtatttttagtagggatggggtttcaccatgttgaccaggctggtctcgaactcctgacctcaggtgatctgcctgcctcggcctcccaaagtgctgggattataggtgggagccaccactcccaactgaattttgaattttcgatctagatattctagatattcctgatttatggttttttttttttgagacagagtctcactctgtcgcccaggctggagtgccagtggcgccatctccgctcaccgcaagctccacctcccgggtacacgccattctcctgcctcagccttcccagtagctgggactacaggcgcccgccaccacacccagctaatttttttatatttttagtagagacggggtttcaccgtgttaggcaggatagtctcgatctcctgacctcgtgatctgcccacctcagccttccaaagggctgggattacaggcgtgagccaccgcgcccggcctaatgtctatgctcctcaaatgtcttttgagtttggcctgtgaggttatttttcctgtgatggctgtgatattggagaagatgtgtactggcctcggagttccccatcgtcccctctgtgtttgtcagttgggctctagtggcctatctccctggcacaacaccccaccctacccctgaggctgcagggtgtgcagtgccagggtgggagctatacggaaactttgcagagcaaagaggtagactaagagggcacctgttcattctttatttgaaaaatgtgttgggaccgggagcagtggctcacgactgtaatcctagcactttaggagaggccaaggtgggaggatcgctgagcccaggagtttgagaccagcctgtgcagcaaagtgagaccctgtctctatgagaaatgaataaataaaattagctgggcatggtggcatcttagctacttgggaggctgaggggagaggatcatttgaggagtttgaggctgcagtgagctgtgattgcaccactgcactccagcccaaagtgacagagcaagaccctctctctaaattaaaacaaacaaacaaacacctctaagatcttaaaaaaaaaaaatgtgttggggccagccaggttttgaggataccagagtgacaagaccgacagggtcctgcccttgcaaagtccacagtatagatagaatcttaatcagtgatttccaccaatccatttctgcctgcaatgggaactatgaagggaaaggctcagggcagcccagtccagatgaggggtggggtggggtggcagggcatgtgtctgagaaatctgaggggaggtggtgctccccaccaagacctcctggatcaggaggttttttgtttgtttgtttgtttttgagatagagtcttgctctgttgcccaggctggagtgcaatggcactatctcggctcactgcaacctctgcctccgtggttcaagtgattctcctgcctcagcctcccgagtagctgggattacaggcacctgccaccacacccagctaatttttgtatttttattagagacggggtttcaccatgctggccaggctggtctcgaactcccagcctcaggcgatccacccgccttggcctcccaaagttctgggattacaggcttgagccaccaggccggccttggaggttttttgtctgtttgagacagtgtttcgctcttgctggagtgcaatggcgccatctcggttcactgaaacctctgcctcccgggttcaagtgattctcctgcctcagcctcccaactagctgggattacaagcacccgccaccacgcccagctaatttttttgtatttttagtagagacggggtttcactatttgaccacgctggtctcaaactcctgacctcaggtgatcctcccgcctcagcctcccaaagtgttgggattaccggcgtgagccaccgcgccaggcctggatcaggaatttgataagtgagggtagggacagaggctaggtagatgtcccccagagtgaacagtgggtgatgcccagaaactataggtctcaggtgagagagagagatttgaagggctgaggctgcgaggtgggtggcgagggatgcgcctgcagaggtcggggtccggccgcattgggcagggccttatgggcccggagctagtaggattttccttcagaagaggcggctctacgtgagcaggggcgagggcagggagtccagtaggaaggccgctactgtgggcggccgaaggtggcgtgaggggcgggggggtcaggtcggcgggcccgctgcgggggccctgggggaggggtcagagggtggtaagctcgggggtcgtcttgcggggcccagcggctctgattccgtaccccccaccccaagggctggaggctggcagtaggcgtagtcagaggacgccacccgagccacgcgagggagaagagtggagatagacaagtaagatgggctctggggttttctgatagagaaaaaaatagtaaagccagctagataagtaatctgaagcagtggagaagaaagtgaaagaaacgttaaaagcaaataagtaaacggcttggatagaggaacacccaggaggcgagatagagaaagttaaaatgaagggacttggctacagcacccagtgcactgtcccaaaaaggcaagcgaggcaagcggggcggggaagggtgggtgtgcgtgttcttcctgcggaggacgcagcagcccctggggagggaccgagaatccccagctgcctccaacaggagaggctgcagctagagggcccagggctgggacgggaccttcgcgggggtctggttcccagggtcgcggagaaatgggatgcagacgctggaaatgggaaggaggtatacggggttggtgggaggccctgggcaggtggcttctgcagtcctgggccggtccggcctaccctgccccgtccctaagtaacagagcgcttcgtaagcccagggcgcagagccaggacactccgcgacccatctcacggagccctaaaacaaccccgaggtggaagtgtgtttcccccattttacaaatgttgcatctggggctcagagagggcggcctctcacccgaggtcacacaggaatcgggcccgcccccaggccgtggagccactaggagtgctcccgcccaggggtcttcccgccaccagggcccccgctctgggaggagccggccgagcccctcccgctctccgcccccgaggggcggcccggggggcgggcggaggaagtgagcgcagcggggaggaatgcgagcgggcggggcgtgtcggcccggggcggcggggacagcggcggggacagcggcgggcggctgggacggcgggtgcggcggggccgagcccgcacgatgcctcacttcaccgtggtgccagtggacgggccgaggcgcggcgactatgacaacctcgaggggctcagttgggtggactacggggagcgcgccgagctggatgactcggacggtgagggcgcgttctgaggggccgtggcggggcagcggggcctgccacccggggccgccatcccgggcccgcgcccgcacctatcccgggaccttgcgcgcacacgtcggtgcggactcaactttttttggaccgcgccgctgccactggctccccgccctgcgcgcgcagacacgattttcctcggcccccggcgcccgcgcccggccgctttctccaccccagctcctcccctgtgggccccgggcgggggctgcagacgtggccgcccagggaggccagccggccgggccgcccggcttggggacagggccgagaccccatctcaggcccttcccggcccttcaacttcggtgaatcccacatccttttctcgcctcggttcctcatttgagattcagcgtctttgcctttgagacgatccgctccccaactgcccaaacccctccgtgtgcctctctgcgcctacctgcactctggccagagtgtgcctactggggggtctatgggtaactgcccgtgagtgcgccggtgtagatctgtagggacagtgggcctcagtgaagcactcacatggagccggacgtgtctaggcacttgaagtgagttaactcgtttaatcctccagcatcacccttgggataagtactgttactctcattaggaagcagtgaagggaggggtggcggttatataacttgcccaggggcagtcaagcctgggtttgagattccagcaccttaactctttaacttaggtgccagggccgagaggtaagccccatctccctcctccttcctcccaggtgcccgcgtctctccacagccctttctctatctcctaccccaggaggccccccagagggctgttcttgttaagg

SEQ ID NO: 1887 - DNA, 6000 bp, Homo sapiens
caccagtgacctttttgttgctaaattttgtatttgttttttcagatcttggcttatctgaaggtacttcaccccacttcctccctgtggcttctgtggcaccccaccctatgattttcttccaatctctctgactggtctcaccttttcctctgggttcctctttctctacttgccccctaaatgatggtatttcccaaggaattttgttcatttctttgaccctctctactgaaggatccattcattcccatggcttcaattatgatctatatggtgataatttgataatttatgactctatcccttaaccagatccctctcataagctccgaaccacctcctagacatcttgtttggacatatcacacccaattcaaacttacctacttctcttcctgcctaaacttgctcctttactgtgtcacatctcaggggatagcacccccatccatcccctagttacccaaggcagacacctaagcatcatctttgacttttactagtttcctccacgccctcagctctcattcacaaagtcctcggaatatttaccttcttaataactctgtgatgagctacttaaaaaagatgggaaacttgatgaactattaatatttaaagaacaaacaaataaataaatataaaactatctctcagatctaccccctcttttccactcaccatgctggatcaccgcagcaccttcccgatccacatcccagcctcatcttctcctggccattctccaagcagcccctagaccttttcaaaatgcacatctccctaaaaaccttcattagctttagaataaaattatattctcagcctagaataccaagctcttcaggacccagccctggtcaatcactctaacccctcagtgtctgagattcagcattctagttaatctcctctttacttactgagaagacccatggaacttcactgagatcttttcttccccaagaagaagggagaaggccagcactgtgttcccctggaatctttcactactctagcttcgaagtatttagaattccattcattcctttagggttctgtgccctaaaaccaccccttaaaaatgacaaaacaaatatattgagcattttctcatatgagtcaggccttttatcacatttaaccctcacaattctgaagaacacattttaatttcacaaatgagaaaactgagacccagaacaattaaatattaaataacctaatcaaagtcatacaattagtaagagagagaaaggggattcaaactcagattacccaagaaattatctcctgtttattcatggtcaaaccaatttctggtaatccaagaagaataatgtgaaaacagactaacatttggtaagtgcttaatatttataaagtactttacataaggaatctcatttatcccttatgacattttcaaataaacagactgcaaatccaaggaggtagtttaggcaaggtcacacagctagtaagtagctttgaatttccctacctccacccttaaaaaaaatttctttttttttagagacaggtcttgctctgtcactcaggctactagaatgcagtggtgtgattgatcatagttcactgcagcctcaaactcctgggctcaagcaaccctcccaccccaacctcctgagtagctgggactacaggcatgcgccactgcactgagttattttttttttttttaatttttagtacaggcagagtctcactatgtagcccaagctggtctcaaatccctggcctccagcaatcctcctgccttggcctgtcaaactgctgagattacatgtgtgagccactacacccagccccacctccagccttattagctgctacctaacaccaataaacagcattttacaactgaaaaaacagctccagcccaggatcacacatctaatcagaggcaaagtcaggattaggatccaggtttcctaactctacttggctgtgcagatgctgttatagtctctgggtgctgccagaattgtggaaccctgactttttcctatttataacaatttgccaaaactgaaattggattccagtggtagatggatggtggtacactacttctgaaggggtaaacggacctccacagggtttcagctctggcttcaggtggacttatttggtatccctctgcaatactcgggtgatactctgctgatgcccacctggtggcatggtcctccctgatccacttttccaacagcctctgctctcactgcatccactgaatgaggcactctgctttagcacacgtcccatttccccctgcctccttaccgttttctcttcagtaataagaccccatctgttcacccagctccaattgccttccctgatggtttagccaggatcaaagcccctctgccatgcctcttaaagtcctgttggttcttccctaaatgccatctgttttactcactcccccaccctagccttcccttcctggatgttactaactcaaggatgacagagctgctttctctcaggctctgtctctttggtttgaattaggtccagagtaaaagtccccttggttatttccttcttggccatgagttaattattcccatatattaaggcattctccccagagtgtatcagctgacatacacaaaaaaacatctggagaaggtgataaaatgaaatgtgtagattaactaggccatctagccaacatcagaatgtttagtggagaaatattcaggaaagatgctacctagcaaggtgggacatcaccaatgaggcctaagatgctgagcagagggttgaaagaagagcaggaggccgggcacagtggctcacacctgtaatgccagcacttggggagaccaaggtgggcctaggtggcagaggctgcagtgagctgagatcgcgccattgcactccagccattgcactccaggcaacaagagcgaaactccgtcgaaaaaaaaaaaaaagagagagaaagaaagaaagaaaaaagaaagagcaggaatcttaggacatctttacttcataactgacagggcagaagatctttctcagaaaaggagtgggaggtagggcatttaggcacagaaacgagtagggccaacagctagaaatagcggaacatgaagaactgatgacatttcagggagaactgacaggaataataggcatgggtctatcaatctctagcatcataggattaaaagggtactcaaagcattcaggtaaaatcccaacccactgtacaaatgaaataaacatttcttcaagggggcggcatgcctctaactgaacacctccagcaatgagaaatgcccaactttaggaaatcagagttttggaggtgtatgtgaatgaggttcctttattttcttttttttaattttattctttttctctttttttttttttttttttgagacagggtctcactctgttgtccaggctggagtgtagtggtgcaatctcgactcactgcaacctccacctcccggggttcaagcgattctcccgcctcagcctcctgaatagctgggattacaggcacgtgccaccacgcccagctaatttttgtatttttagtagagactgggtttcaccattttggtcagacttgtctcgaactcctgacctagtgatccacctgcctcggcctcccaaagttctgggattacaggcgtgagccaccacgcccggcccaattcattttcaattcaacaaatatctatatttatatctcaatagctagtgagtgcctactacgtgccagatactagacactggactgtaagtatgaataatatagacatggcccctcccctgtggatcttataatgaggaagacgagcacataaacatgcaagtagaacaggggaagtagagggtgctgctcaaacacagggtggggcactcaacagacagcccagcatctagatgtcttcacaaaacaggcaatgtctaggctggggcttgccgacgagttagctgagggcagggtggagaggcccaagggagtaggaggcttcccagcttccaaagaagttaagagtgttgcaaaaaagtggagtccagatcttgaaggggagagtgggcttaggtccgggggcatgtgaagcgccctccgtctgctgcgctgggggagatgctgcggtatcctggagtggtgtgaaggaggccaggacctgcgatgggaagacggagacgggaaggccctggtggcccaagggatgaccaaaagtgaagcgctcctctatgacaagattgagacaaaaataaaggaataaagttctgaatgcggtgggagagtctcctccgtcctccctcacctttgctgggcaggaaccaaacctgcttgccctcggtttgccccatcaccgacgggtgtggtcgggggcacagctcttcgcccttcttctcagataggaaaactgaggcccagggtcctgaggcagaaatcaaggttttctcctcgaaatggcctcccaagaggctgcccggggtctcacacgatccttcgagggtcctgcggcctgccccacgcctccgccagccatcctcggctggtcgtctttgctatggaaacggtcctcccgccctgctccgcgcctccgtgtcttcagtgcactctgggaaatgcagtcccgctctgtttgcctacccgcggcgtgagcccactccgcgtccttaaagaactataagtcccagaaggctgtgcgaaactccgccggtctctgggggatgtggtcttgaaggagagacccaggaacctgcgggcggggccggagggagaggggaggacgcccccaatgggcagactcctgggcggggtccgggtcaccattggctccggcggcgcgagggaggcggggtcagaggaatgaagcgcggagctgttcgccgctccaggtgctgagtctgagggaggctccggacccgagagccgcgagagccgccgccgctgcggccgccgccagatctgcggccgggagcccgggctgtgaggagccgggaggagcggggtgcgctgccgggcgctgaccgccctcccgcccgccgtcagaggtcagtgctgctgaattcgcttttgttttcttggggagcgggcgaaccgaggcgtgaggggctggggagttgacgggacgtgttctcgttgctctcaggaccgcgggtcccggacagccgccgactgactaggggcctcccgtggccgggcgccggaggtcggagcagcttgggttagttttcgttttatcatggagaaggctcttgggtatgaggggcgagggctgggggtcacccccaccccccatctctcctgggagagcgaggaggcttggaccctccctcccgctgtgcctggcgacggggctgctcggattactcaggacgggaggatgaggtgttgtgggatgaagggactcgaggcagggggacccctccccgcaacacttcggctgctcgaggttacaaaggagtctggtggtgatggatgagatcgcggaccgctcccctagcccagaccctcccaggggtattcaggaagggctgcttgggatgcagggaagacccttgcccaggccccttcctccacactcgcccccctccctattcccccctcctcccttggccctagggttttgtaaagaggaggatcgaggatgtggaagagacagaggactcttacccctcccacttggaccctcctaggttactggtgaagggtggaattggaatgtggcagggaaacgctgggagacccctccccatccttctcggagtcgcgggtggaggaaagcactgacactcggaatcccccgcgctcgggcccgcgccgagggttgggtggcctgggtgtgagaggtagtgtagggggatgtacgaggacaggagggacccctccccacctctccccacctgggccttatctcccaggccctccctacctggatccaggcctggggctctaagtcgagacgacccgccctagcccac

SEQ ID NO: 1888 - DNA, 6000 bp, Homo sapiens
cccgtctcggcctcccaaagtgctgggattacaggcatgagccaccgcgcttggccttttttttttttttgagacagagtcctgctttgtcgcccaggctggagtgcagtggcacaatctcggctcactgcaagctctgccccccgggttcacatgcccggccgattattaacttttaaaacctttctagtggaggctgggcgtggtggctcacgcctataatcccagcactttgggaggccgaggtgggcagattgcctgaggtcaggagttcgagaccagcctgaccaacatgggaaaaccccatctctactaaaaacacaaacaaattagcgggtgtggtggtgggcgcctgtaatcccaactacttgggaggctgaggcaggagaatctcttgaatacgggaaacggaggttgcagtgagccgagatcacaccattgcactccagcctgggcaacagagcgagactctgcctcaaaaaacaaaacaaaacaaaaaaccttgctagtgaccaggcgtggtggctcacgcctgtaatcccagcactttgggaggccgaggtgggtggatcacctcaggtcaggagttcaagaccagcctgaccaatatggtgaaaccccatctctgctaaaaaatacaaaattagctgggtgcggtggtgcatgcctgtaatcccagctacttaggaggctgaggcaggagaatcgcttgaacccaggaggtggaggttgcagtgagccgagatcacaccgttgcactccagcctgggcaacaagagcgaaactccgtctcaaaaacaaaaacaaaaacaaacaaaaaaaaccttgctaggcccagcttggtggctcagacctgtaatctcagcactttgggaggcctaggcgggaagactgcctgagcccaggagtttgagaccagcctggccaacatggcaaaaccctgtcgctacaaaaaaataaaaaaataataattggccagatatggtggcatgtacctgtagtcccggctactcaggaggctgaggaaggaggatcactggagcccaggaggtcgaggctgcggtgagccatgatcacaccactgcactctggcctgggtgacagagcaagatcttgtctcaaaaaaaaaaaccttgctagcttgattggcatgtgtcaggcaattttttttttttttgagactgagtttcgctcttttcgcccaggctggcatgcaatggcatgttctcggctcactgcaacctccacctccttggttcaagtgattctcctgcctcagcctcccaagtagctgggattacaggtgcccaccaccatgcccggttaattttgtatttttagtagacatggggtttcaccatgttggccaggctggtcttgaactcctgaactcaggtggtcctcccaccatggcctcctaaagtgctgggattacaggcgtgacccaccgtgcctggccagttattattatcattattattattactattgttattttaagacagagctcactctatccaggctggagtgtagtggtaccatctcagctcactgcaacctctgcctcccaagcgattctcatgtcttggcttcccaaagtgctgggattacagtcgtgagccaccgcacccagcattgtcagacattatttacaggccttatttcatctttattttttaagacggagtctggctctgttgcccaggctggagtgcggtggcgggatcctggctcactgcaacctccgcctcccaggatcaagcaattctcctgcctcagcctcccgagtagctgggattacaggcttcagctaccacacccagttaatttttgtatttttagtacagatggggtttcaccatgttggccaggttggtctccaactcctgacctcaggttatccacccaccttggcctccgaaagtgctgggattacaggtgtcagccacagcgcccggccggtataagctgtttttattaactcatccaggacctgcctagaaagtctcctactctcctctatcaaaaaaaactcatttttcttttattttttcaaaattaaggtatgacttacataaagtgcgcaaatcataagtgtcctgcttgatggattttctcctcatttttcaaagtcccatcatcctctggttatcccaaaatcattctcttctttatctaccacaaatacccaactgtctctttaagggaacttctttgaaaaccttaagtgcttcctgctttcctgtaatcccagctactcgggaggctgaggcaggagaatcaattgaacctgggagatggaggttgcagtgagccgagattgcgccattacactcaagcctgggcgacaagagcaaaactctgtctcaaaaaacaaacaaacaaacaaaaaacagtttacacttactgagcccttaccacaagctgagcccttcgctaaaggcattagaaatagcaactcattgacttttcgtataatttccaagaggtaccttcattatttgtgcttgacagatgtggaaacagaggcacagagacagttaagggatttgttcaaggttacacagctagcaagtagaggagttagcactggccaggcgcagtggctcacgcctataatctcagcactttgggaggccacaatgggtggatcacttgaggccaggagttcgagacagcgtggccaacatggtgaaaccccgtctctactaaaaatacaaaaattagccaggcgtggtggcacacgcctgtaatcccagctactcgggaggctgaggcaggagaatcacttgaacccgggaggcggaggttgcagtgagccaagatcgtgccactgcactccagcctgggcaacagaacaagactctgtctcagaaaaaaaaaaaaaaagttagaattgaaaggcaagtgatttggcaccaggcatagtagctcaaccctgaaatccccagcactttaggagaccagggtgggaggagtgcttgaggccaggagttcgagaccagcctgggcaacacggcaagacccctaattctacgaaaaaaaatttcaaattacccaggcatggtggcacacgctggtagtcttagctacttgggaggttgaggcaggaggatcacttgagcccaggagttcaaggctgcagtgagcacgattgtgccactgcactccaacctgcattacagagtgaaactttctcaaaaaaactaaaataaaggcaagtgatttggttcctggttaaggcaagcaggctggaatggaaaagcagccatgggccgggcgcagtggctcacgcctgtaatcccagcactttgggagaccgaggcgggcggatcacgaggtcaggagatggagaccatcctggctaacacagtgaaaccccgtctctactaaaaatacaaaaaattagctgggcatggtagtgggcgcctgtagtcccagccactcgggaggctgaggcaggagaatggcatgaacccagaggcggagcttgcagtgagccgagatcgtgccactgcactccagcttgggcgacagaacgagattccatctcaagaaaaacaaagaaaaaaaagaaaagcagctatgatcaccaaagatcagtcagacctagaggcctcttctctcatcccggaacgtgtacctcatagaacttttggctttccaggatactatacatattaaggtcctgatattaattcacaggtccagcatgggattcacatcctcaaggacatggccacctgcacttctgagttgtctttgagtggccccaaactggatctttgcaggttccagactagtggggctggtaggacaatctttgaagctagaccagttactgggcctctcaggaagaggcacccacaaccaccatcctgaactaaggtctgagctggaggttctccatttggtcaagtgccagttggtgaattccaagagtatcagagatatctgaaagtgactcagaccctctatgggactatgggtggtccttttgcttatttttctaattgttctacaacaaaatgtgttatttttgtgattacaaagagtatatgtctagcggctgggttgccaggtgcattctatttattggtatcacactggtctttgctttataattacagtatttgttaaaatacaaatttgtttaaagactttcctctgtgtatgctctcttccacaattttcaaagtgtttaataaggtgcacatatttggttttcttttttttcttttcttttttttgagacggagtttcgctcttgttgcccagactggagtgcaatggcgcgatctcggctcaccgcaacctccgcctcgcgggttcaagcgagtctcctgcctcagcctcctgagtagctaggattacaggcatgcgccaccacgtctggctaattttgtatttttagtagagatggggtttctccatgttggtcaggctggtctcgaactcccgacctcaggtgatccacccgcctcagcctcccaaagtgctgggattacaggcgtagagccaccgatcccggcctgtttttcagtctctaatacactgttccgcgtccctagcatagtagctgttttctgtaaattcggagcgaagttgactgcaaaacccgccgggttcaccggcctgggcggtgtggacttcaagccccaggaggcattgcggccggcacatcgggaactacggcgtctgagaagggggccgggccctccggtcctttccctcccagaagcccgcgggcggctcggaacgctgtttctatcatggccgcgggagccgggacggcgggccccgcttccggcccgggcgtcgtgcgtgacccagcggcgtcacagccgaggaagcggcccggccgggagggcggggagggcgcgcggcgatcggacacgatggcgggaggaggcgggagtagcgacggcagcgggcgggcagctggcaggcgggcgtcccgcagtagcgggcgggcccggcgggggcgccacgagccggggctggggggcccggcggagcgcggcgcgggggaggcacggctggaagaggcagtcaatcgctgggtgctcaagttctacttccacgaggcgctgcgggcctttcggggtagccggtacggggacttcagacagatccgggacatcatgcagggtgagggccgggccgggggaggggggttggagcgccggggaagggggtccgggggaccgggagtcgggactgggggtcgcccagccaacgatgtcttctctcccagctttgcttgtcaggcccttggggaaggagcacaccgtgtcccgattgctgcgggttatgcagtgtctgtcgcggattgaagaaggggaaaatttaggtatggctatttttgtgttcttctctgggcttacttgcgtagggttttgttttaaaacttatatctagaactgaaggattccaggttaaagtgcgatagtttccatcagagtggtctttttcattctacgatgggtctgttttctggctcgactggctctagttttctccggttaaggttgtcttggctgcttttctgtgttttttttaaatcttctcccacctgttaattgctcaccccaactttgctcctgtctaaagtgagttatgttcatatggacatcttttttcccccatggtagagagtttttcagagtggaagtactctgacatttttcccctctgaatttaacttgaaagctatttagctgttgtcagtttcttgccactcgtatctgaggaggatgggtatattctgaatttgagaggcaaatgcaggtatttaaaaataatttttttgcctgtcttgacaggtgttaaaaaatggtcacgttaaattcattgatttgaatttggacccttatcgtgtatgtcaacctgtagcaaatatgtcaaaaaattaaatgcaaatcttaccatatttgcatgctccatttccataaatatatatatataatttttggacataacttttttacccttagaaaa

SEQ ID NO: 1889 - DNA, 6000 bp, Homo sapiens
gcatgtatctataacggttaagatcggttttgacagtttttaaagatatctcaatttttaatggtccaggatgtatttttcctttttttctttttttgagacaaagtcttgctctgtcgcccaggctggagtacagtggtgtgatcttggctcactgcaacctctgcctcccgggtacaagtgattctcctgcctcagcctaccgaatagctgggattataggtacccaccaccaccccaggctaatttttgtatttttagtagggatggggtttcaccatgttggccaggctggtctcgaactcctgacctcaagtaatctgcctgcctcagcctcccaaagtactgggattacaggtatgagccactgcacctagccaatggtccagtttgcattctgtgtttatgacaacattttaagggatatttactttatctctacaaacacacccttcttggatataagtagttctttttaataaacacttcttctacctccagctccctattctttcctaccatttggaaaactggccattcagcaaaccagcctctcaccttacaggaaccatatccaccccaagtgcagagctgtgcccacctgactcagaaccaactatcccaagatgttcatggtagaatcgggaattctgactcaatgcctcagcaatctcactgaagacgagagtcactcactctgccttttatacacttgaatcctcacaagccaccaaaacagtgagtctacctttaggtcgatgtcgtgggctctcgggttcatttcttctgctgctacgctctgaccctccatctcgctctgatctgctgctgtgcctacttctatcccgctcatctatgaagagtcacacgaagcttaaaaacatgcatcccatcctaaggtatacacatcttcaccctagagaaaggacaggctgcccactcactcacaggtgcaacctgcactgctcgaatgtgatccgtggactcctgaaactcacctatccccattctcccaagggggaaaaatagttactgcctagaaaatttcaaacccacagtaacagttattttccagcaagaattcaaaaaatactagtgcgagtttacagtgaatcattttttttaatagttacaattctatcagctataaaacttaatactgagcaaggacagcattggatttttttgtctagctttgttccatagcactgtcctttctctatcaccaatactattagaaatgctggtctcttatacatatttacccattatctcctttatcatcaattttcataataaaacgaagaccacacactcaaggagagcagctatgttacaggcaacagctcttttcttaaactagtattcccaatcccagcagggtcaaaaccactcaggcggacatcatgcaaataggactccctaacaaatgggtgttgcaaaaactcctgcaacaagaaaaaggctgacacatttattcgaatgctaatggacaataggaactgtgctggacagtttacctctgtccctcttgcggtcatagtctcgatcccgcgatttctccttcttccaatccttttcttctttggacgaggcatagacaccatgttcccgccgctcccgctctctctgccgactgcgttcccaaaactcttcgctcacaccacccggatgggatggagtctctacccgagcagaccgataatgtctgaaacagggagagcaactggtaaaggcccctccataggagaaaaactctgccctaaaacctttggctgtccaaacaagtgatctgtccttttccactttctctccctgggacgcaggctcacatatggcaacaacccaaggcatttctaacctctaccatctcgtctttattcacctttgtttttccccacaaattcctacctaccttcagtattacagaatcataataaaatcataaagctctaaatctccaacaggaaaactgagagataaacatgagctgttattttccagcctccgttcgcttccctctgggctaacccatactaaggcctttacctgtctttccggatattttggccagcctggtcaccgccctcttcctcagcatccttctggtcatccttgctctcttcccagtccttgtaggaggagactttggacttcttcttgtcctccccatcgtccttctcctctcgctctctccgtttcagggaagccagcaagtccagtccgagtaatgaagggcggggagcaggagccttgaagacatgctgctcgctggccgcacttttggacttgcaaataagaccaccaacctgacagtccagatcagtgccttccaatcgatggatcgaggcatcctcactggtgtcccccatcacaggatctgggatttctctggaaggaaggcaaaccatttggtactagagaaggctcagctctactatatcccacaataaatgcagttatggttatatgtaggtgattaaccttccccatctccccttaagaccaggactacttttgctccctctctccaagacctttccatcaagtcactgcctatctccaaagattctcctattccaacccccaataaacaccaaaatagatacacacacacacacacacacacacacaccccatacattcctccccagcccccacaaagatccaagaggcaataaaaagtctcactaagggacactttctagagcctgatgtcagcagctgtaacagggatgtagggaaaacaccactaaatttgaatcagaaacctcaattagaaaccaggctcttgacactttctacctgtatgatggtaagcaaataacttaatctttgtttagccataatttcatatctattaaatggaaaaaatttttaccttatctaatccatgaagctattgtgagaatcaaacaaaaagtgtatgtgaaaccataaagagtagctctttatgtaaccataacagttaacataaatgtaactgctacattgtattatttgctatcctcctatatactgttggtccctcacccatttttttacatgagttctacctcttcctctctttaaacaacaggtacagcagcacagagatggggcagaaggctaccgtccatgttctccatactttagtggcttttcttggcctagctgcgttttacagaaaacaatttactcacagcagccaaaatcagtttaataacaatccatgttcaccaaaaatatttatgagaaacaccaggttaggaaaaggtgttactgagaagtatttaagtggctacaagacttctggcactcaagttggaacaagctcctctttacctctcactacacatctgccactcatcaacatatatcagttctggatgcttggataattcctctcattccaacaagttagcaaagcaaaggagatgccaccagaatccagaattgtttaccaaactctaattaaatgcacagctctacagagtattgccaaacagactggacacataatattaatgcagaaacaagagttacattttgaaaatgccatcaggcagaacagaaaaaaagaaagctgcatattggtgacatctgtgcgcatgtgaggaaatccacacaagaaggtaaagatatacaggctctactcaatagttgtctaaactaggaaaggtaccctggactgccattctacgcagttgagagaacactggatgtgttgttgactgctgtagctcaatgtctagcaaaataagcgtttgataaattaaaaaatgaattaatttaaacttattaaaggaggacaggaacccaaacatttctggagacagcaagggaagattccagcaacacaggacaaggagacagccagagagaacttcattagctgctgagacgaacaaataaggagctaaagagcaagattcttgagaaggattaatggcaaagaaactacaaggcgtacgagaaagccagggaagaaagaacctggattcattcattcaacaattattcactgagggtgtccctgagccaattgctgttctcggcgatagcaacagagaacaagacaaaaatccccgcccacctggagctgacattctagtagaagagatcgcccaccagattgcctggtataaatgacactgtgagagagcagaggaagacacaaggagtcctactcgggctcggtgacagtctggggtgggttaaagcggaggcctgggagagggaccaaggccactccaggcagcatccctggatctcagcgaggccgctccaggcagcaggatttgaccagagcaaggaggaaggccaaggcggccaggacggatgcagcatccctgaggtgagtaaggcaaggtgggtgacagggacgacagaggaactccccaaactggggcccggacctgagcaggggaccaatatccgccgcctagagccgccatgattacagaagggcaggccaggaaggaagaagggactctcacctcaccaagcgcgactcttgggacccttctgtcccggattctggggcgccggcgctgccacccctcgctcagacaggctcaaggagccaaaatccacaccttgaaagcggccattattgtcccttaatactttgcgcgccccctctatccgcccaaagctaccatagagagcagcctggaacacgcccgattcctggatccaagtgtggaacggtacgccaacaggctctcaaggcctcctctggggctctgatcagacacttccgagtctccttgtgaccaatcactcttagcctaagagactacatcccgcctctagtctgggggcaggaaaaggaggggaaaaaggtcgaccatctttaatacgggcggaggtgacgcctagcttccggtcagagccgagcaaggtgggcggtgactagaagctcttccgtttattgggctgttgagcgggggccgaccgacggccaggagtttcttttctgcgcttgtgcgttttctgttcggtttccttcccgctagcggggccacgagggttgctaggcaacagcccctgggtgacttggtcttagggtcctgtccggcttggggctgatgaaaggagctgtccgcgcccgggctcttccgagaagtggttgctgacagccacaaagtgaaagggagtgaggcggcgtggacgagtaaggtaagtgctggggtcccttagcgcttgtgggccaggagcagcgcaacacaggtgactttaaatatgtatatcggatattttggaaaatggagatgcgcgcccggctgtaaataaaaatcacccatgcgttcacacgcagagatgaccactgatttccagttgtttttctggaatacattgtagtaagattctgtacaaaagtgagttcaagctttttttctttttttggtgtttctgcagttgtggcgcgcgcctgaggttccagctactcgggaggctgaggcgggaggattgcttgagcctggggagttgagaccagcctgggcaacatagcgaaaccccgcctcagaaaaagagagggagagaggaaagcagtggagttattggtcaaagagtatgtcagttttctttccagaaaggttttgtgtctgcattccagcaggaactccctgtgcctgcccctaccactatcttgtttaatttttgccaattcagtgactttgtaaacatatgttttaatttgcttttctttgcttactggtaaagcttaactttttagtttatttactgtccatttgtacgtcttcttttgggaattctctgtgggtatcatttactatggacattttcttagatgtggtctcagttttcctctcctgcttccaacgtttgtccagttgcacccctagcctcaccactaacaactttgttctccccttactttctcctttcgatcagtaacacggaggaactgctgtttgtttgaattctagtgggacagatccgtcttctctttgaccttccctttcattggtaatttgttctgctgctcacatc

SEQ ID NO: 1890 - DNA, 6000 bp, Homo sapiens
ccattgaagaaaaagacagtagatggaatataactgatgtcaaaatactgtgtataaactgcagtttggtccacatctaccaggtatatagcagccattttacttaagtcagaagaggtcttagaaagctgcaaatgacgagagagacaaaggttacaatatgagaggcagcttaatgtttcttctgtgaaacttgttactacaacagagtgttttgtttgaaaaaactcctgggccaacaatgcagcccatgtggctcccacattagacaaagcataaccccatcctccagagtctcattcactgcaacggggttaggagggaatcttggggaaaactgtatgaggttaggaagggaccttggggaaaactgtgtgaggttagaaggggaccttggggaaaactgtgtgagtttaggagggtgacagcatgggagtattcctgtctattcattgtggagagagacctaacccagaactaagacctctacccgccatttctactgctgccatcccgtgttaagagctgagcatacaaatccttggggaaaactgtgtgaatctatttcttcctttaatttctttctttgaatgcttttataaaagtagcccatgctcatttaaaacaacacaacttagaaatatgttatgtggatactgaaattccctaacgtctccttcctcccaatcctcccagaaatgaaaaccacgataattagtagcagacacttatataacattactatgtggtaactgtcctaagtgcttaacatttgttaactcatttaatccttacatcattcttataaggtatatgctatcagagtccccattttatagatagggaaactgaggcacaggaaggtaaagtaatttgccccaggtcacacagctcctgagcagtagggctggggtttgaactttggcagtgtggcttcagtgtctacatcactgacctctgtggtatttcctcctgcttatgactgagggtagaatcctctggtccttttttccccaagctaacacatcacaccctcattgtaaccacggaaatgaggatttgtacgctcagctcttacacgggatggtagcagtagaaatggcggtaagaggtcttagttctgggttaggtctctctctgcatcaggcacatactggaggcagcacactagaaaagattatttgcagctacagaaaactgagttcaaatctcaactctgcaatatagtggatctgcacctgtgggaaattacttgacctctctggttttttttttcctactgggaaatggggctactattatcccactattgcgagcactgaaaagatagtgttcacagatgcttgttaatagttttctgctcttccatcaccttgttggtgaaacagcattgacagcttctagtgggtaaggacatccaagacagattcagcacacacagatttgggggcttggttcagggcaggcacacaatcagctcttagtgaactaacaaatgaacagctatatacccaaccctgactactccctctcatgtactactcagatgctgaagtgagaatatacagattattaataaaaaccaattattttagacattcacttacaatatcatctagctgcagacagacaggatcttcatctctcccaaacctgagaaccaacaccttctcagcagtactttttatcgcctggtctacttcctttttgctagtcagcttgggcagtaggaagctcatcttgaaataacccaaatgtgaatcctcactgtcactcctgaaataaaggtgcaatgtttaaagacagtttagattaagtgcgtgagccctcattaaaaaaaattaattcacagagtagctaatgtattcacatggtatgaaagaaacatcatagaaaggtaacactgtggagtttccctctctttgtccctgctccttggaaccagttttcattgttccctcccccgggccagataactgctttcattagtttctcatgtatctttcagagttttgttatgcattcaccaaaaaatacaaatatgcgttccgatattttttttctctctctccccacccccaaaagatagcctattgtatcagtgttccagcaggaaagcgatgacactctcaactttggtaatttgaaggcagtttaattaaggcaggtgtagaaaaacaatacggtaaagtgtactactttggggctagtaacagcgggatgctgtacccatccctaggccatgggaggaagaagccacggtaggaagcagttataagaattgtgtggcagaaagaggtgagtggagaggacagtgtataggagggcagcctgctgttaggtgttgcagccactctcctccctccctctgacctttgctcatgcaaccaccggctgactccaactggaaccagagggcaggggcctgttgaggcaggcaaacctccctgtcccagagcagtctagaggaggatgaagaatggctgtggagggaccaatggcagatgttcagcacacacactttatctactcttcagcacttttcattatttcaaacctaacctatgaagattgccccatatctctatatagagaacatccatattctctgtcatggcagcatattatttcttgcatgtgttacactttttaaacagtcctttattgtatactttatattattacaagtcctggcttaaagattcttcgtgtgcaccttactaggtgcacctcattacacggcaaacagatcaattaagagtgtgtgtgaaaactacaataccataaacaaataataaaatactgaggtacaagggacctaatacaaccccgtcattttacaaactagcttgcttacagttgcactttctactacaatgacaaggactagaatacaggccaccaaatttctagtccaggggtccttctactacaataatctattttcatgattggtagaaatttcatttttgagaaactctttgacaaagaagcttagttttgtggtcatctataagagactccattgagatggtcggtattttgaattcagttccaaatatgaaaagggaggatttcttttcctattttttttgtcacaagtcacattttaagatacgaattaggccaggctcacccctgtaatcccagcactttgggaggccaaggagggtggatcacctatggccaggaattcgagaccagcctggccaacatggtgaaaccccgtctctactaaaaatacaaaaaattagccgggcgtggtggcagatgccacctgtaatccaagctactcaggaggctgaggcaggagaattgcttgaaccctggaggcggaggttgcagtgagctaggatcgctccactgcactccagcctgggcaaggcaacaagagcgaagctccgtctccaaaaaaaaaaaaaggaattatttaactaaaattcacataggaaataagattgttccagctataggtcatactttaaacagggacattgatggcccaaagggacgtcatcagatgtgagcagcagaacaaattaccaatgaaagggaaggtcaaagagaagacggatctgtcccactagaattcaaacaaacagcagttcctccgtgttactgatcgaaaggagaaagtaaggggagaacaaagttgttagtggtgaggctaggggtgcaactggacaaacgttggaagcaggagaggaaaactgagaccacatctaagaaaatgtccatagtaaatgatacccacagagaattcccaaaagaagacgtacaaatggacagtaaataaactaaaaagttaagctttaccagtaagcaaagaaaagcaaattaaaacatatgtttacaaagtcactgaattggcaaaaattaaacaagatagtggtaggggcaggcacagggagttcctgctggaatgcagacacaaaacctttctggaaagaaaactgacatactctttgaccaataactccactgctttcctctctccctctctttttctgaggcggggtttcgctatgttgcccaggctggtctcaactccccaggctcaagcaatcctcccgcctcagcctcccgagtagctggaacctcaggcgcgcgccacaactgcagaaacaccaaaaaaagaaaaaaagcttgaactcacttttgtacagaatcttactacaatgtattccagaaaaacaactggaaatcagtggtcatctctgcgtgtgaacgcatgggtgatttttatttacagccgggcgcgcatctccattttccaaaatatccgatatacatatttaaagtcacctgtgttgcgctgctcctggcccacaagcgctaagggaccccagcacttaccttactcgtccacgccgcctcactccctttcactttgtggctgtcagcaaccacttctcggaagagcccgggcgcggacagctcctttcatcagccccaagccggacaggaccctaagaccaagtcacccaggggctgttgcctagcaaccctcgtggccccgctagcgggaaggaaaccgaacagaaaacgcacaagcgcagaaaagaaactcctggccgtcggtcggcccccgctcaacagcccaataaacggaagagcttctagtcaccgcccaccttgctcggctctgaccggaagctaggcgtcacctccgcccgtattaaagatggtcgacctttttcccctccttttcctgcccccagactagaggcgggatgtagtctcttaggctaagagtgattggtcacaaggagactcggaagtgtctgatcagagccccagaggaggccttgagagcctgttggcgtaccgttccacacttggatccaggaatcgggcgtgttccaggctgctctctatggtagctttgggcggatagagggggcgcgcaaagtattaagggacaataatggccgctttcaaggtgtggattttggctccttgagcctgtctgagcgaggggtggcagcgccggcgccccagaatccgggacagaagggtcccaagagtcgcgcttggtgaggtgagagtcccttcttccttcctggcctgcccttctgtaatcatggcggctctaggcggcggatattggtcccctgctcaggtccgggccccagtttggggagttcctctgtcgtccctgtcacccaccttgccttactcacctcagggatgctgcatccgtcctggccgccttggccttcctccttgctctggtcaaatcctgctgcctggagcggcctcgctgagatccagggatgctgcctggagtggccttggtccctctcccaggcctccgctttaacccaccccagactgtcaccgagcccgagtaggactccttgtgtcttcctctgctctctcacagtgtcatttataccaggcaatctggtgggcgatctcttctactagaatgtcagctccaggtgggcggggatttttgtcttgttctctgttgctatcgccgagaacagcaattggctcagggacaccctcagtgaataattgttgaatgaatgaatccaggttctttcttccctggctttctcgtacgccttgtagtttctttgccattaatccttctcaagaatcttgctctttagctccttatttgttcgtctcagcagctaatgaagttctctctggctgtctccttgtcctgtgttgctggaatcttcccttgctgtctccagaaatgtttgggttcctgtcctcctttaataagtttaaattaattcattttttaatttatcaaacgcttattttgctagacattgagctacagcagtcaacaacacatccagtgttctctcaactgcgtagaatggcagtccagggtacctttcctagtttagacaactattgagtagagcctgtatatctttaccttcttgtgtggatttcctcacatgcgcacagatgtcaccaatatgcagctttctttttttctgttctgcctgatggcattttcaaaatgtaact

SEQ ID NO: 1891 - DNA, 6000 bp, Homo sapiens
gaagaaaaagaggtttaattggacttacaatttaaaaagagatttaattagacttactccacatggctgaggaggcctcagaatcatggcgggaggtgaaaggcacttcttccatggtggtggcaagagaaaatgaggacgaagcaaaagtggaaacccctgataaacccatcatatctcatgagacttactcacttcacgagaatagcatgggaaagaccagctctcatgattcagttacctcctgctgggtccctctcacaacatgtgggaattttgggagataaaattcaagttgagatttgagtggagacacagccaaaccatatcaatgtggtgtttggttttctgttcatgtgttagtttgcagaggacagtggcttccacctccatacgtgtgcctgctaaggacataatcttgttccttttcatggctacatagtattccatggggtatatgtaccacattttctttatccagtctatcatcgatgggcatttgggttattctatgtctttgttattgtgaatagtgctgcaatgaacatatgcgtccatgtatctttataatagaatgatttctgttactttgggtatataccaagtaatggaattgctgggtcaaatggtatttctgcctctaggtctttgaggaattgccacactgtcttccacaacggttaaactaatttacactctcacaaagggtgtaaaagtgtttctttttctccacaacattgccagcatctgctgttttttgactttttaataattgcccttctgattggcatgagatggtatctcaatgtggttttgatttgcatatctctaatgatcactgatgttgagctttttttcatatgtttcttggctgcatgaatgtcttgagaagtgtctgttcatgtcctttgcccactttttaatgggattgtttaaaacaaactattcttaaggctttcttagggtaacatttggagaacattggctcattcccaaacataagccttctcaaaccgattaaaatctaatcctcaccaagttaagtagggcttgcctgctgatagatcctcatcagagcaaagtcaaagctaaagttcagggggacagaaactgagtaaacagaggaagccagtaaggagagagcagaaaatgtagcccatgggagggaggagacaaacctcaagaggaaaaagttcccaacacttgcatgtcttacttctttaacctcatagaacccaacaaataagttataagaaagggagaagaggccgggagtggtggctcatgtttgtaattccagcactttgggaggccagggcgggtggatcacaaggtcaggagttcaagaccagcctggccaagatgatggggaaaccccgtctctactaaaattacaaaaattagctgagtgtggtgacgctcacctatagtcccagctacttgggaggctgaggcaggagaatcacttgaacccgggaggtggagattgcagtgagccaagattgtgccactgctctccagcctggtgaccgagtgagactctgtctcaaaaaaaaaaaaaaaaatggagaagaaaatgtgatcatgataaccattcccgccattactggagcctggaccagccggccagatttccacaggatgtctctgacctgcagaggggctggcaaggtgggaggcatccagaccatgttacagaactcagtaatcagagcctgtgctggagccaccagcatcccaggaccaccatgtgaacctcctgacaggagcaggctcctcaatgactgaaatgaatctcagcagaactcctgtgattcataagtgactcatttactaacttattgtcagtatagattctccactgggagaagacgggcaacttctggagacatttttggttgttacaactaggagaggggcatctactactcgcatctagtgggtagaggccagagatgctgctaaacatcctactgtacagccccaccacaaagaatgatctggctccaagtatcggtaatgtcgaggttgagaaaccctggtgtcagcagtgggagaagccttagagggaatttccaaagtggtaggatcagcacaggatagaccctgaagtttaaacttcttccagggggaccgttacccagtttggggaacaccatggtatatcactagctgtgggctgatgccaagttacaggtaacagatgccagcagaagctctgggcagaggaaaccaagataaacctaagcagacagtccttgtgaaactgaacagagtcaaagataatgaatggagaaactgaggctaatcagtttgacctcattccttcctctccccacaatcaggggatcttatgactgaatttcttacaaatagcaaaggaataagtaggcttaggtgagaggggaaaggggctaaattgaggggagcagtggagcaacagattagtggtagcagatttatttttatttatctttttttgttgttgttgttaagacagaatcttactctgtcacccaggctggagtgcagtggtacaatcatggctctctgtacccttgaactcctatgctagagcctaggagtaaatactaggattactagagtaatcctccgacctcagcctcccgaatagctgagactacagacatgcaccaccacactggctaacttttaaattttttgtagagatggggtggtgggggtcggcggggggggggggggggtctcactatattgcccaggctggtcttgaactcctgggctcaagcaattctcctgccttggcctcccatagtgctgggattacagttgtgagccactacgcccaatccaatggtagcagatttaaacacaggtggatttggaaaaaaaatcttacgataggtttaatatgagtcagcaggcctgttgaaacaaaacagtgctttgttaagcttgtttttggttggtcaaatgtagaaaggcaggtgtctccgctaatgagtacgtagagcaggaatcctaagcaatcatccatttcagaacatgaagacaaaaagcagctgcccctcccatacactgcccattaaaatacatacttttaaaattccttattttcaattttatttttttgctctctcagaagaatcaaatatatgtaattattctgatggaggcttgcattctttgggacctaggcctgagaaatcacggtcagtagatttccctataacatggggctggggagcaagtgccaaacagggaatgttctgaaaactccttaggcacaagctgaagatatgtttgaggttttggatacagaacatttataggatatcttttggtggtccaagaggacttgagtgtaccttgtaaatacaggattttgtttttaattagattgattcacagagaaccaaacctaaggaatcacatcattcattcatttgttcatttaataaatttgtaggttgaagcatttaccaagtgctggcaatagaaagaagtcccgggtgtgctttgtcagtttagtcgggactacacaaatgagtcaataactgtagtggagtgatgcgatctcaactgccaggaatcccccggctctcctctcttcctgtgcctcttcaggtaattagctatcctttctttcttttattttccttccttccttccttccttccttccttccttccttccttccttccttccttccttcctccctccctccctccctccctccctttctttccagattctggacctattccagacttactaaaggaaattctctaaaggtgaggcagttttttaaagacagcagctctctctgtcgtccatgctggagtgcagtggcccgatcatagctcactgcagcctcgacttcttgggctcaagtgatcctcccccttcagcctcaatgagtagctgggactaccgatgtgcactaccacgcccggcaaactaaaaaaataattatttttggtaaagacaggggtcttgcgatgttgcccaggctgttctcaaactcctggcctcaagtgatcctcctgcctcagcctcctaatgtgtttggattacaggcatgagccactgagcccggcctagctaccctgtctgagttgtgcccactacacaaaggtgtcagctacatgtgatgtctgtgcatttctggcctggaccgcacattaagtgctccgtaaacatcagtctctattatcaacagtctctattatcaatcagtctctattatcatcagtctctattatcatgagtctctattaaacaacagtctctattatcacagtctctattatgtgttttggctgaaagaaagttctctaaaaccaggaaatcaggaatcagcagttttaagttctccaggttatattttaacattgtgttcatatgcaaaacaaaggttgtgaatcagcacgaatgctggcaagccctggaaggtttgtgatcacggactttcacgagaccccaaggcaaggagagacagaagcccaggacaacagcatgggcgccgctttttagtcgggcgccgctttttggtcaggcgccacctggactacatttcccatatccaattgccgggctcctgcaggattggccagaacaacgcggaagtgattacgggtcgcccagcaacgggcggagtcctggcccgaaactggatgcgcacgccccttccctgcggcggggaggctgacaaggctccgctctatctctagcgcctcggagcgctctccggctttgctgtctagcccggcggcagcgcgatctcttaggcactttcaccgccttcctctccaggccctgcccctttgacgccggccgtcgcgatattgcggagactggatttcagcttcgtggtcggcggagcggcccctggagggcgcagtgcgcaggcgtgagcggtcgggccccgacgcgcgcgggtctcgtttggagcgggagtgagttcctgagcgagtggacccggcagcgggcgataggggggccaggtgcctccacagtcagccatggcagcgctgcgctacgcggggctggacgacacggacagtgaggacgagctgcctccgggctgggaggagagaaccaccaaggacggctgggtttactacgccaagtaagggggccgcagtggggccgcggacgcacctgggaccctgcacagcccacggacgccacctgcgcggggaggacgcgcactccagcgcagcgcgtgcggtgcaaagtgaaagtaactgttaaggagcttcagggaaaagggtccagggttcccagtaggggccggcccccttggtgggcctcgggtccagcgggggtcacctggtggcttcccggcgcgccctctgctgttcaggatgcagcactgcgcggcgcggcgagggcaaagcggcctcatccccgccaaaaaataaagatgttttaaaaagcgcacatgctcagctccctcctgcaggctctgggttgcagggataggagttttgttgtgttttgttttgttttgtccagaccggtattgctcagtcatccaggctggagtgcaggggtgccatcatagcccactgtagcctctacctactgggttcagacaatcctctcatctcagcctcttgagtggctgggactacaagcgtgcactactatgcccgactaattttttaagtatttgtagagactagggtcgcaccatgttgcccaggctggtctcgaactactgggctcaagcaggccacctgcctcagcctccagaattgagattacaggcgtgagccactgcgcctagccaggagtattttttagtagcagtcctagatagcttcactatcatttcctgggaaagttttggaaaccccagcagagccttcatctttaactgtgtgaccttgggccattgaaataacgtttaatcttggttttttcacctgtaaaatgggttgatacgagggtcagttcaggcactgtgcgtaaagcacatagcaccgtgtctagtaggtactctctgttcct

SEQ ID NO: 1892 - DNA, 6000 bp, Homo sapiens
ataatttggtatacataattaaaaggtccagctaactctatatagtttccaaatactggctgatcatcagaatcatccagagaatcagcaatgtttttggttttgatgtgttttaatttttcatgatctttctcataacaacttactgatgtttaggaattacctagatgtcatataaggccatttccagtactaatgttctgatttaaccaagacatccacgaaaaggtaataagtaaccgaaggtaagagcagaaggaatgccttatactactacattgttaggctggttaacctggagtaacaatttgcatgtaacaggtagccaaaaaaaaaaaatacttgatgaataaatcagggaagcagaaagagggagcacattttgcgagatggatttgatgttggacatgagttcggaactcacactcaaccatttgtctgtccttccagctgtctcaacagaactctcatcctgctttaagtggatatgtccttggcattgctgttgtggctagtatagtgactatctctgaggaacagcacccaatttctctttaaagaattaccctcccccattgtgtatagtcttcttgaaattgtaaatcaggtcctgccctcccttagctgagacataacaaaactctctccttgattttgaaaacttgagtaaagtgtccaaagagcagagaaatcaattggtgctcaccattcttgctgtgtcattaagttccttggaatgccctggtttctgttcttttaacttagccttgttatcaagccttctcaacacctatgaactacccagtatccttctaaatcaccattttgtttaacaagtcttttcaatatctggtacctacaaacagacaaatgaacaaaaactaatacttaatataccaccttcattgtctcattgcataaaagagttccttcctgtgctcaccccagattctcctccagtttctgcactaggaaggtatgcatagccattgcagtatttaaaaaaaaaaaagaaaagaaaaaaatgcaagccacacatgtaattttatattttctagcagccacattttaaaaagtaaacagaaacagatgaaattagttttaaggctatattttatttaaacaaatatatctttattattaatatataatatgaaaaaatattgagattttttttagagtaagtcttttgaagtgtggtatgtcttttacacttacagcacatctcaatgcagatgctaaattttgaaaagttaaagtgatatatgttccttccaaaacaatatagcctcatatacagaaaaataactcacactgttacttttaacatttaaattgctgggcatggtggctcaagcctataatcccagcatgttgggagcccaaggcaggcagattgcttgaggccaggagttcgagaccagcctggtcaacatggtgaaactccatctctgccaaaaattcaaaaattagctgggtgtggtggtgggcacctgttatcccagctactcaggaggctgaagcatgagaattgcttgaacccaggaggcgaggttgcagtgagccaagattgcaccacgacactccagcctgggtgatagagcaagactctgtctcaaaataataataataataataatataataaaatttaatttaaattaactaaaatattcagttcctcagttgcactagccccatttcaagtgctcactagtcacatatgacaagcatctatgcactaggcaccacagccttagatctgctatgggagtgaagagtcacagggaaccttttcttgatggatatagtagttggcaggaattggaggctttcatacttccaacaaattccattatgacaggactcaaaactgtgtgaagacctatttgaaacatttcttccctcaaaatgatgtttctttggctgggtaactacaacaggttaacacattattgattgtgagatctatcctctgtgctctgcaattcaggtgcatagaaagatcaaggaattatcttgtcaggtagttttcaaagttaaaattacactattactcttaaatcacttctcatttataacatgttgaggggtgggaaaagacttgggggattcattttaattataaggattttcaccatcaaatagaaaaatagaattttgagtggcaggttgaagaaggtgagctttatctctcagacaataacagatattgtaaattttagagtgaaagaataacataataatgtcaatgtttcagaaaaacaaatcagaacacagactggtacaacaggggtccatagagaaggtgtggcgcttccagcatccttacatgatagatatatgctcttatttcgccgggaatgctgttttcctcttctgaagctgacaagacatgtgttcatcctagttcagtcgccccttagtttcccaagtgcagaaggcagactgagtcacttctcccttcacctctactctcacagcagttctttgagaatcccacagaaaaaccaaacttatagagacagaaagtagtcgtgaggacctgaggaattagtgtttaatgggaacaagagttttcattttgcaagatgaagagtcctatggtggtaaaagcagcataacaatgtgaatgattggtgggccttttccctgattaactcctctctacgtttaggagagtcctcatttccaggccagaatggtttaggtaccctcgttgtaccctttcatgaccctcaaactttccttaccgggctctcatcacaactgtcatctacagctaattgtatggtatattagtctgctacggttactataagaaaacactacacactgggtgccctatacagactggttgtgattttctcacagtgctggaggctagaggtctaagatcaaggtgttggcaggtttggtttctcctgagagattttttaaattttttttatttttttggctttcagatagtctttcctttatgcaaacacaaccttggtgtctgtgtccaaatttcctcttcttatgacgacatcagtcagactggattagggctcaccctaagggtcttgttttaatcacctctttaaaaaggactgtctccaaatacattcacattctgaggcactgggagttggaacttcaacatatgaattttgggggatgcaatgtggcttatgattaacctctactgtttccacttgtaaaacttttaacacggactttgtcttgttcatatctgaggacctttacagttgatgctgtcttctgagcacactctacctccaactcttcataaaacacgtttttctcaactttcaagccttagcaccatcatctgacaagggccgttccaaaccacctggtctaaagtaaccctaagcgttactctgtcacatcactgttttctctctttcatagcagtcgccacttacttacgtccagaatatcagcttcaggaaaggtggggatatgtgtttttacacgctattatacccccggcatctcacacacagtcacaagtgaatgagattctgtagccacttggtacattacaatgattttatttacccctgggaaaacctaaagggcttttaacatccaaatcggtgtttgaatttcagctctaacatggattagctgtgtgaacaccaagtgcgttacccactctgtgtctcagaatccttaacaacacgatgacaataccttctttccggttcttatggggattaagtgaactaattagccctaaggtgaccaggtcaacaatctgacgtagaactcatggtatcagccgagatgctattagcttgagggtgttccaaagcgtcggacctgggaatggttttcgaaaacgtgtttaggtggtacccagagcattaaacaccagggtaggaacgctaccctattttcagtggttttttaaattcttttttgttttgttgttttgtttttgagacaaagcctcactctgtagcccagactggagtccagtggcgggatgtcagctcactgcagcctcgacgtcccgggttccagtgattctccagcctcagcctcccaagtagtggagaccacagatccgtgccaccacacccagctatttttgttgtatcttttgtacattttttgtatattttgtatatattttttgtatgtatattttgtatattttttgtgtatatatatatatatatatatatatattttttttttttttttttttttttttttttttgtagaggtggggtctccctatgttgcccctcgctatggtcttttcaattctttggatcaaaaccaggctttgttctcattcatgtgtctttggcacccatccctgcctccatcccttgccatttcttgagattcttctgtttagcagagatcactcggccagacacgcatcggcagcagcctgggaatgaagccagcctgcctggggcggcccccgccgcgctcccccgggactccgggctgctgtgaggaaagcagcaactcgtggggtcctggtgaagagaaaacgacctggaccctgcaaagcgacccagaacaaagggagcccgccacccacgttatgaagacaaaacacgtgggtaacacggcccaggcgggtggcaggcgtggcggaaacctctctgaggctggcgaggactactgagtgtggagggggtccctgaggaagggagtccccgagggaggatgggcctccgagggggccaggccgacgtcccgggaaggcgacccgcggctcggggaagccaagttctgggtcgtcctctgacttcggcttttttgcggtctgccgcgctcatccccgcgcccgccaccccgcgagcttacccgagcctctcagtcagcagagcgcccgctgagtggccgcgcccgcgcgcaagacacaggggaggggcggggcggggcggcgcgcactacgcgagggacgcagctgcgcacgcggctccgcgcatgtgcggtgaggctcgcggccggagtgcggcgctgggcggaagctaccatggcggccgagcgaaagacaaggttgtccaagaatctactgcgcatgaaggtgcggggacgctgagagcgccactccgggcggtaggggcacccggtccttccaacctggccggggccgaggcggcgggcggacaagggacaccagagaggcctcagagggcttccagctctcgtgctcattcattcacttagcgcctgctctgcactgtttactgggaaccagcttacgaattaggccgactctctcaggaggcccgcgggcggatgggagcttgagtacacagaagcagtcagggtacagcttacccagtgcagtgagggtagaagcgctggggaccttggggactcaccgagcttctcgagaagttgttgcttacttatatatgcaataaatatgatatatgggaagtgtaactccttagctgggtaatttaggtaaattcacttctttctctgaatatctcttttcctcatctttaaaaagaagagcattaggctacatgagttcaagctcctttttaattttgataatacttcttttagtagagttcttcagagaaacagaatcaacaagatgtatatgtgtatatatgtgtatggagagagggggtatttttaaaactggatcacacgactgtggagatgcaagtctaaaatctgcagggtgggccagtaggctggagacccagagaagtactcagtccaagtccaaagacagtctgctggcagaactccctcttcttccagggagaagagggtgagtctcgcagggtagtctctaggttactgggagggtggaaggcacagcgtcctaaactaggagaaactgagttcagaagtctgagaggcaagaaagaaaaagaaaaccatggaaatttccaagaattagagacaattcagtatgtctggaaggcaagtactaagaaatggggttgcagagtaggcaatggtcacaacgtgcagggaatttgaggccagattaaag

SEQ ID NO: 1893 - DNA, 6000 bp, Homo sapiens
tattgccacagagcccccttcacccccagccacactcccgatggccccccagggggtgctggatctggcttcccttccccaccagcagcaaggacagaggtgcccacagaaaccggtttaatgtgaatccaccaggtgagccccatgaaggggcccaccgcccgcagccagagaccctcgggctgtgcagcctgcagcccacatctgcctctggccctcaggggcgctggggaaaggaaggccaaagtgtatcatgttcataaaagaaaatgctggtgggcccaggccagcgagcttctgaagcccacgtctgtccacagtggcccccaggctcacagcccctcctcagcacgtgtctggtgggccaggcgtgcagtgatgtgggcgaggtccgcggccttgtccagcttgacgtaggtgtcggtgcggatgcggtggaggctgagccagtccggcagcagctcggagaggagcagcaggtgcttctccatttcccctgggggaggagaggaggacactgaggctggtgctgggccccagccctgcacgggcagcacttgaaaccagcctgaccacccaacctctgtgcctgcctggtcgccctcagggccccatcaccaggacttagggcagaggtggttctgatcagaggcccaggtctgggtggtgtgaacagtgaccggagagagccaggcctacagttgaggccctgtgaggaggcaccgagcatggaggccgccagcccatgaaagccctgaggcaggaggtgccctgtagcgtcaggacccctatgtgctcagggcctggtcaccagaggcctgggaggcagtggagggtgcatgtggggccccttctgaccaaggactgcaggtggtcagggaaagggccagagctgtgagggggaagctgcctccagaggctgcaggtgtggaggggccgggcggaggctcaggggtggctccaaggagggcagagcgcccaggacacaccagtgcaagaggccagcgcccactgcacatctgaacagaacagatcagtgacagacacctctgctcagaaagctggggaggcagctgcagcaccaggcaattccaccctgcacgccccttcaccccgccctgcacgtaccagggctcatgatagtacaacagctgcccaccatcctggcacaggccacctccatgctgagcgcaggcttgcgttcggacacaaagacgctccgcagcacgcgggccagctcaggcagccgttctaagcgctgcagccgctgctcctgctccgggcaccgcgtcatctgtgccagctgcttctgtgcctccttggctcggatctgcagcaggtaccgggacctggttagtgggcagcaggtcaccaggcgcccacccgccatcactggggacgactcacccgctccagcagatcctgggacacccccttcagagcactgggagaggctgcaggcggggtggctggtggggtagccggcagtgctggcctgggagacccggggctgctgggcgcagcagagcgcagggccaattgactcaaggccttctccatctgcgggagggacaggttggactggagaggtcacaagatgcaacgtgcccctggctgtctgcccaggagtccccggtatctctcaaggcacaagttcacccagcacactgggtggtctgtgccggtcaatgcagtgtcccagtgtgcagcatcgcctgcccaggccaactccccacatggggctagtggcagagccaggcttagaggctgcagctggggacagagggcaaatgccaccaactctctggatccgccagccaaggaggaagccagatgaggcgtcaagctcatcaccaaggcttccacctcttaagcctggggtcaggctggcccacccacccgggagaaatgggctgcccaagcctcgcagtctcaccctgggtgaaatcaggttgcgggcccgggccagcacctcctgagcagtggtgagcttctccgtggcgggtggctggggcagcgcggccggctcgatgtcgggtacttcatccacgttgaagcgcgggtgccagcgggtcagctggtcctccggcaccaccatggcggggctcagggaggccaggaaggcctggggagaaggagtagatgggtgaccctgggcacatctgagacaagggcagactgcatgtgaggtaggcctgtgcttacgtcccagccgggccgcctcgggcaagtcactcagcctctgcccagtgctcagcttggagggagagcacaaggcctcccatggtccgcgctcgctgaacgccttggggacctcctcagtgcctgcggctgcaccctgagcacaccagccctcagctcagggtgaacccagcccagttccatcccgggagaagctgtgagtggcagggatgctccaagcacagggttaggtgctgaggcagtgctggtgccaccatcttcacacagcggggccgggggccgctcaccttgtggtgctccttgacatgctccaccagcttctggctgaagatctgccgtcgctgcaggaggcgcgaggccgtgagctggggggctgctccgtcagcctctgtgggacgagtccaggcctaagtccccaccaggccacccagccacccacccgtgaccagtcctgggccagatgcccagcacctcacacccaccctggaaactgtgcggctcacagatggggaaaccgaggtcccgcacccagcactcaccctgctccagcagtggctcgatggtgagctggtaatctgacctcctggtgccatccttgaaggtggggacactgcgctcctggcggaagcggtaggaggccgggtacacggttttgatctggccaacattgcactcctcaaaacgcctatgggaggatgggggcggctcaggaggcaggcccgggcccacccccaactccaggacagccacagcccacccccggccactcacctacgcatcatgtcctggacgccccgctggaccttggcaaaggtgggcgtctcggagcggttgtggagcatgcccacgatggtgtccatgctgcggaacatctccgccagcacctggtacttgtagggcagcacgagtcccggcaggccgggctgggccagggcatggaagcgctggtaggcgggcgccttctcgccactgtcagggagggaggagcctcatgagaagcagtaggcccctacccctccaacgccacagcaggcccctcggccagggagaccctccgatggggcctgccatgccacacacgatggctttcgcggcccttgcacacccaccagcactggcaccgttaggggtagcagtggtgacgggaaagcccggctccacaccccagctctgctgtgtccacgcagctcccccagggaagctctgccctctccccagcgcagtttcgtcagctctcaggggcagaggcagacaacacaccaatgcatcaggagcatttgaaacctgccagagtccccgaggcaggagctgccccccgcaggagggactgagggcacagcgccagcagtgcccgggacctttttctcaggggtctgggtccgcgccctggtgacctcaccaccaccctccctggaaggagcagacctgggcctctgacaggctcgctgggccacgcctgccaccaacccggcctttgccggggcctcgtggccgcccacccagcactcaccatggctcctcagggcggccctcggcctctggggtgcaggactccccagcatcctgggcactggccttcagcgcccggactcttgcccccagctcccgggcccgttgcaggcatgacgcaagctcagagatggtgtccttcagggggatcaggggacacggtgccgtcaggcaggcaggcaggccggcaccactcagccctcccgcatctgccccaggccccgcccctcacctggtcctgcgcggatgtcaggtggggcggctgacctgctgccggggtggatttctttatcttctggcccggagaagggcaggctgggatgtctggggcctcgggggtactggggctggaaacctggtgggagggaccccaagggtgaactcatgacaagacctggtgctcctggctctgcagaggaccccgaaggatcagaagccgctctgagttaactgggacgggcatggctggggggcttaggacttcccgtagatggtggtctgtgctaaggccggggacacagccttgctctcgtcttccggggccgtttccaggtcggacccctgccctggcctcgcagagaagctggacttccagccccatcatcggatcccggtgcaagccccccagtgcctcctgctcatctcaggagccagccaagtccccagtggtggcagggcgcccccaggatcccccggcctgtcccagagttccctgcgccccgtcccccccgcctgtttccccgcccccgtccctccgcctcagtttccccgagccctgccccccgggcctcagtctccccgcccccaactccccggcctcagtctccccacgcccctcacctcgtccaccgacagccgcagtctcctgcgggccggtggcctggcctggtcgcgtccgggggcggcgggcgggcgggcgcgcttgcggctgccactggtagcggaggccggggcgcggagtgcgggcctggcggggctgggggtgcggcaggccagcttgggcggcgcgatgcgggggggcccggggcggcggcgcgcgaagaagtcggtgacgcggcgctgctccatggcggcggagtgcgcggcgaaagcaaggaaagaaggaagggaggaagaggcgggcgcggttcccgccaaatttcccgcgggcgccctggccccgcccccggcgcggaccgaaccatcggggcagagcacggggggagggaagggacggggcgcgcatgcgcgctggtgggcgcgggcaccggcttggccgcgcgcatgcgccgacgtgcgggcgtggactcgccggcgggcgccgtcgtgcgtgggactttagcgcggtctccggatcccgcgtgtggctcccacttttcagggcgtgtcagtggggccgctggcttcagggtcagaatgagcgcaatccaggcaaacagcagcgcgcgcctgacaaaaccccggcgctgcccgggggagccgaggacggcgcggcctggggggctgcaggctcgagctggtaaaggcgcttcccccgcgggccgcacgctccttatttctttttttaaaactatttctggctgggcgcggtggctcacgcctgtaatcccagtactttgggaggccgaggcgggcggatcatgaggtcaggagatcgagaccatcctggctaacacggtgaaaccccgtctctactaaaaatacaaaaaattagccgggcgtggtggtgggcacctgtggtcccagctactcaaaaggctgaggcctgagaatggcgtgaaccccgtggggcggagcctgcagtgagccgagatcgcgccactgcactccagcctgggcgacagcgagactccgtctcaaaaaaaaaaaaaaaactatttctatcgaggcggagattacgttgccgggtggtctcgaactccccggttcagtgatccgctctcttggaactgccccctcccaaagcgctgcgatcacaggcgtggcctccgcgatccgcgttgctcgctttttaaaagggtggatttgatatgtgaattatttctcaatcaagctattacatggaaacgaagaaaaggggccgggcgcgatggttcacgcctgtaatcccagcactttgaaaggccgaggcgggcggatcacctgaggtcaggagttcgagaccagcctgaccaacatggtaaaaccccctctctactaaaaatacaaaaattagccaggcgtggtggcgggcgcctgtaattccaactgcttggggggctgaggcagcagaatcgcttgaacccgggaggcgaaatggcgccactgcac

SEQ ID NO: 1894 - DNA, 6000 bp, Homo sapiens
gcctggatggaacagagcagaaaagggccttcacctcccttacactagactctatatttctactaatgcagcctcatatagatcaacccttgtgaccatgctttaattacagcatcttgggttagaagagctagaaacccactcagaggcacttcaggcaaaagaggcaaatatatgggcaggaataggctacttcattaaaatctagggcagcctggagggctggcaggcctctcaagagaccacactggaaactcttcaaagccatctgggctagcagctgtgtctggctgcctctgtcttcacaccacaatgaaaggcagccaatagcttactcctactggaggctccagtcccaggacaggatctgattggctcagctgtgcacctctagcccaatcagttgtgactgggaggcagggctatacagcacaaatgtgcagctgaatgaactccatcactgcaggtgaacaaggcaattttccaaggacccctccaaggcagaagtcatcctgaatggcctactctccaggggtgacattgaaaatactgagcagttgccatggctggatcctgagccaccataattgacatgggccattgcactcaggccgggcatggcccccaaggcactgggtgcccccttccaacctgttggttgtgagttgtgaacaccggccccaccctcagcctcccagctcccaacacttctgaagcctggccccttgccccacacagagccagacccaagctacattcatgcctgcactcttaccagcccctgtgcactgtacttctgggtccaagctcattccagagcctgcttctgcccccggctggagccccagggctggccacgatgacagcaactgccatggccccttccctcccaggaggctcgggagccacctcttgaggtgagtggtgacaggtgctgctgtgctgaagtcaggaaggaagcccccatcctgaggtggtctctgggagcatctcatgaccatgggcctaaccttggcccctggcatggctccaggagtccagcgcagtaccctgtggttccggctggtgcgtgggcaggtggcaggagagaagaaatgctggagtcgccttggcattttgaaggccttggagacgcttctggcagcatcctgtccatcagcttatctatggaaggcagggaccgggccaaacggttgcaccagcagccagatgtggagcagttgcttgtggttaagtgccgctaacgctgcctctctgagaccagctgtttccttattctcaatgggagacagagtggggagccgccacgtcaccaggggaggtgacagctccctcctacctgacaaacggttacgatgtcaaggatttgcaaggtccccttactgcagatggtcctaaggagaggatgcgtctgtaattcatgctcccattacagctctaacattttacattttccctctttcatacgtagccgacttctatttggtttgtgttccactatgactcccagatcactttctgccccctttgagaaaagccaggatccccatcttgattagaacagaatggaatattacagctgaagagactcccaagcaagggtcgccacgcagagctgtgccagctaaggcctgcacaagggttcctggccaagggagcagcgggggctgagatccccgtggctccacttgtcaagccgtttttcacaaaggtgccttatgagctaactgccctgctggaggttgtctggtcccaggggccttcaaactcttttgtccaaaacccacagtgcgaaatacgccttttcaagacgttctattttcaaaaaattcaaacatccagagaagttgaatctcatttacccctcagactctatcttaatgttctacactgttctttttgttgttgttgttgagatggagtctcgctgtcaccaggctgcagtgcagtggcaggatctcagttcattacaacctccacctcccgggttcaagcgattctcctgcctcagcctcccgactagctgggattacagatgcccgccaccacacccagctaatttttgtatttttggtagagatggggttttaccatgttggccaggctggtctcgaactcctgacctcagatgatccacccgcctcggcctcgcaaagtgctgggattacaggtgtgagtcactgcgcccagcctgtccatcttatttgatgcattttaaagtgtcagacatctgttattcctaaacacttctgcatgcatgtcattgactagagttcgatatttgctgataatttggcttttaaataaatttacataccataaaatacacaaatcttaagctaccctcagattttgataaattcatacacttatgtgacccaaacctgtcatgatctagaccatttctatcaccctagaaaattgcctcgtgctccttccaagtcagttcctgccccaacctgcaactagttttgactgaagaaatacattgtttgtttaatgtgtggtgtggccaggtgtggtggctcacgcctgtagccccagctacttgggaggccgaggcagggagatcgcttcagtccaggagttcgagaccagcctgggtaacatggtgagatgccgtctctacaaaaaaacaaaaacaaaaaacaaacatttagccacgcgtggtggctcacgcctgtagccccagctacttgggaggccaaggcagggggattcctttagcccaggagtggaggctaagctacttcactccagcctgggtgatcaaaaaaaaaaaaaaaaaaagcacgtgtaccaaaacaaaacttttcaacaaaacgtagctttaaaaaatgtgggtctcagtcttccatatttatttcttgacccactaaaaatttgctaccagctgcttgcaaaacacaggtctaggtgctgatcccttatatacagatggaaaacaaatgcctcaccacgccctccccatccccccacttatgaacgtcctcacttttgaggtgttttgttttggagatggagtctcgctctgttgcccaggctgctggagtgtagtggcgggatcctgagtagcagagattacaggtgcctgccatcacgtccggctaatttttgtatttattgtagagacggggttttgccatgttggccaggctggtcttgaactcctgacctcaagtgatccgcccgcctcgacttcccaaagtgctgggattacaggcgtgagccaccgtgcaggccacctttgaggtattttgcaagcaccagttgcatcatcaaaccggtttctattcctttaacttaaaaaaaaataggcacaattcacgctttttacagaaaacttggaaaatgggaaaacagaagccctcctctgagccctggccgcctccacccgcgtccccttccctcgcaggcctccaggccccggcggcccgcattgctttgcgggggacttccgcagcgctgcgcctggccctgcttattggcgtctctggaaggagtggctgtggctcgggctctccagataaaccgcgctctaggccgtttcccagataggagcgctataggttttaagaactaaaactttaaaatctcagccctcagccatgctaaaggcagtttcttttctttccttttttttttttttttttttttttgagacggagtttctcgctctttcgctcaggctgaagtgcagtggcgccatttcgcctcccgggttcaagcgattctgctgcctcagccccccaagcagttggaattacaggcgcccgccaccacgcctggctaatttttgtatttttagtagagagggggttttaccatgttggtcaggctggtctcgaactcctgacctcaggtgatccgcccgcctcggcctttcaaagtgctgggattacaggcgtgaaccatcgcgcccggccccttttcttcgtttccatgtaatagcttgattgagaaataattcacatatcaaatccacccttttaaaaagcgagcaacgcggatcgcggaggccacgcctgtgatcgcagcgctttgggagggggcagttccaagagagcggatcactgaaccggggagttcgagaccacccggcaacgtaatctccgcctcgatagaaatagttttttttttttttttgagacggagtctcgctgtcgcccaggctggagtgcagtggcgcgatctcggctcactgcaggctccgccccacggggttcacgccattctcaggcctcagccttttgagtagctgggaccacaggtgcccaccaccacgcccggctaattttttgtatttttagtagagacggggtttcaccgtgttagccaggatggtctcgatctcctgacctcatgatccgcccgcctcggcctcccaaagtactgggattacaggcgtgagccaccgcgcccagccagaaatagttttaaaaaaagaaataaggagcgtgcggcccgcgggggaagcgcctttaccagctcgagcctgcagccccccaggccgcgccgtcctcggctcccccgggcagcgccggggttttgtcaggcgcgcgctgctgtttgcctggattgcgctcattctgaccctgaagccagcggccccactgacacgccctgaaaagtgggagccacacgcgggatccggagaccgcgctaaagtcccacgcacgacggcgcccgccggcgagtccacgcccgcacgtcggcgcatgcgcgcggccaagccggtgcccgcgcccaccagcgcgcatgcgcgccccgtcccttccctccccccgtgctctgccccgatggttcggtccgcgccgggggcggggccagggcgcccgcgggaaatttggcgggaaccgcgcccgcctcttcctcccttccttctttccttgctttcgccgcgcactccgccgccatggagcagcgccgcgtcaccgacttcttcgcgcgccgccgccccgggcccccccgcatcgcgccgcccaagctggcctgccgcacccccagccccgccaggcccgcactccgcgccccggcctccgctaccagtggcagccgcaagcgcgcccgcccgcccgccgcccccggacgcgaccaggccaggccaccggcccgcaggagactgcggctgtcggtggacgaggtgaggggcgtggggagactgaggccggggagttgggggcggggagactgaggcccggggggcagggctcggggaaactgaggcggagggacgggggcggggaaacaggcgggggggacggggcgcagggaactctgggacaggccgggggatcctgggggcgccctgccaccactggggacttggctggctcctgagatgagcaggaggcactggggggcttgcaccgggatccgatgatggggctggaagtccagcttctctgcgaggccagggcaggggtccgacctggaaacggccccggaagacgagagcaaggctgtgtccccggccttagcacagaccaccatctacgggaagtcctaagccccccagccatgcccgtcccagttaactcagagcggcttctgatccttcggggtcctctgcagagccaggagcaccaggtcttgtcatgagttcacccttggggtccctcccaccaggtttccagccccagtacccccgaggccccagacatcccagcctgcccttctccgggccagaagataaagaaatccaccccggcagcaggtcagccgccccacctgacatccgcgcaggaccaggtgaggggcggggcctggggcagatgcgggagggctgagtggtgccggcctgcctgcctgcctgacggcaccgtgtcccctgatccccctgaaggacaccatctctgagcttgcgtcatgcctgcaacgggcccgggagctgggggcaagagtccgggcgctgaaggccagtgcccaggatgctggggagtcctgcaccccagaggccgagggccgccctgaggagccatggtgagtgctgggtgggcg

SEQ ID NO: 1895 - DNA, 6000 bp, Homo sapiens
cctcttgaggtgagtggtgacaggtgctgctgtgctgaagtcaggaaggaagcccccatcctgaggtggtctctgggagcatctcatgaccatgggcctaaccttggcccctggcatggctccaggagtccagcgcagtaccctgtggttccggctggtgcgtgggcaggtggcaggagagaagaaatgctggagtcgccttggcattttgaaggccttggagacgcttctggcagcatcctgtccatcagcttatctatggaaggcagggaccgggccaaacggttgcaccagcagccagatgtggagcagttgcttgtggttaagtgccgctaacgctgcctctctgagaccagctgtttccttattctcaatgggagacagagtggggagccgccacgtcaccaggggaggtgacagctccctcctacctgacaaacggttacgatgtcaaggatttgcaaggtccccttactgcagatggtcctaaggagaggatgcgtctgtaattcatgctcccattacagctctaacattttacattttccctctttcatacgtagccgacttctatttggtttgtgttccactatgactcccagatcactttctgccccctttgagaaaagccaggatccccatcttgattagaacagaatggaatattacagctgaagagactcccaagcaagggtcgccacgcagagctgtgccagctaaggcctgcacaagggttcctggccaagggagcagcgggggctgagatccccgtggctccacttgtcaagccgtttttcacaaaggtgccttatgagctaactgccctgctggaggttgtctggtcccaggggccttcaaactcttttgtccaaaacccacagtgcgaaatacgccttttcaagacgttctattttcaaaaaattcaaacatccagagaagttgaatctcatttacccctcagactctatcttaatgttctacactgttctttttgttgttgttgttgagatggagtctcgctgtcaccaggctgcagtgcagtggcaggatctcagttcattacaacctccacctcccgggttcaagcgattctcctgcctcagcctcccgactagctgggattacagatgcccgccaccacacccagctaatttttgtatttttggtagagatggggttttaccatgttggccaggctggtctcgaactcctgacctcagatgatccacccgcctcggcctcgcaaagtgctgggattacaggtgtgagtcactgcgcccagcctgtccatcttatttgatgcattttaaagtgtcagacatctgttattcctaaacacttctgcatgcatgtcattgactagagttcgatatttgctgataatttggcttttaaataaatttacataccataaaatacacaaatcttaagctaccctcagattttgataaattcatacacttatgtgacccaaacctgtcatgatctagaccatttctatcaccctagaaaattgcctcgtgctccttccaagtcagttcctgccccaacctgcaactagttttgactgaagaaatacattgtttgtttaatgtgtggtgtggccaggtgtggtggctcacgcctgtagccccagctacttgggaggccgaggcagggagatcgcttcagtccaggagttcgagaccagcctgggtaacatggtgagatgccgtctctacaaaaaaacaaaaacaaaaaacaaacatttagccacgcgtggtggctcacgcctgtagccccagctacttgggaggccaaggcagggggattcctttagcccaggagtggaggctaagctacttcactccagcctgggtgatcaaaaaaaaaaaaaaaaaaagcacgtgtaccaaaacaaaacttttcaacaaaacgtagctttaaaaaatgtgggtctcagtcttccatatttatttcttgacccactaaaaatttgctaccagctgcttgcaaaacacaggtctaggtgctgatcccttatatacagatggaaaacaaatgcctcaccacgccctccccatccccccacttatgaacgtcctcacttttgaggtgttttgttttggagatggagtctcgctctgttgcccaggctgctggagtgtagtggcgggatcctgagtagcagagattacaggtgcctgccatcacgtccggctaatttttgtatttattgtagagacggggttttgccatgttggccaggctggtcttgaactcctgacctcaagtgatccgcccgcctcgacttcccaaagtgctgggattacaggcgtgagccaccgtgcaggccacctttgaggtattttgcaagcaccagttgcatcatcaaaccggtttctattcctttaacttaaaaaaaaataggcacaattcacgctttttacagaaaacttggaaaatgggaaaacagaagccctcctctgagccctggccgcctccacccgcgtccccttccctcgcaggcctccaggccccggcggcccgcattgctttgcgggggacttccgcagcgctgcgcctggccctgcttattggcgtctctggaaggagtggctgtggctcgggctctccagataaaccgcgctctaggccgtttcccagataggagcgctataggttttaagaactaaaactttaaaatctcagccctcagccatgctaaaggcagtttcttttctttccttttttttttttttttttttttttgagacggagtttctcgctctttcgctcaggctgaagtgcagtggcgccatttcgcctcccgggttcaagcgattctgctgcctcagccccccaagcagttggaattacaggcgcccgccaccacgcctggctaatttttgtatttttagtagagagggggttttaccatgttggtcaggctggtctcgaactcctgacctcaggtgatccgcccgcctcggcctttcaaagtgctgggattacaggcgtgaaccatcgcgcccggccccttttcttcgtttccatgtaatagcttgattgagaaataattcacatatcaaatccacccttttaaaaagcgagcaacgcggatcgcggaggccacgcctgtgatcgcagcgctttgggagggggcagttccaagagagcggatcactgaaccggggagttcgagaccacccggcaacgtaatctccgcctcgatagaaatagttttttttttttttttgagacggagtctcgctgtcgcccaggctggagtgcagtggcgcgatctcggctcactgcaggctccgccccacggggttcacgccattctcaggcctcagccttttgagtagctgggaccacaggtgcccaccaccacgcccggctaattttttgtatttttagtagagacggggtttcaccgtgttagccaggatggtctcgatctcctgacctcatgatccgcccgcctcggcctcccaaagtactgggattacaggcgtgagccaccgcgcccagccagaaatagttttaaaaaaagaaataaggagcgtgcggcccgcgggggaagcgcctttaccagctcgagcctgcagccccccaggccgcgccgtcctcggctcccccgggcagcgccggggttttgtcaggcgcgcgctgctgtttgcctggattgcgctcattctgaccctgaagccagcggccccactgacacgccctgaaaagtgggagccacacgcgggatccggagaccgcgctaaagtcccacgcacgacggcgcccgccggcgagtccacgcccgcacgtcggcgcatgcgcgcggccaagccggtgcccgcgcccaccagcgcgcatgcgcgccccgtcccttccctccccccgtgctctgccccgatggttcggtccgcgccgggggcggggccagggcgcccgcgggaaatttggcgggaaccgcgcccgcctcttcctcccttccttctttccttgctttcgccgcgcactccgccgccatggagcagcgccgcgtcaccgacttcttcgcgcgccgccgccccgggcccccccgcatcgcgccgcccaagctggcctgccgcacccccagccccgccaggcccgcactccgcgccccggcctccgctaccagtggcagccgcaagcgcgcccgcccgcccgccgcccccggacgcgaccaggccaggccaccggcccgcaggagactgcggctgtcggtggacgaggtgaggggcgtggggagactgaggccggggagttgggggcggggagactgaggcccggggggcagggctcggggaaactgaggcggagggacgggggcggggaaacaggcgggggggacggggcgcagggaactctgggacaggccgggggatcctgggggcgccctgccaccactggggacttggctggctcctgagatgagcaggaggcactggggggcttgcaccgggatccgatgatggggctggaagtccagcttctctgcgaggccagggcaggggtccgacctggaaacggccccggaagacgagagcaaggctgtgtccccggccttagcacagaccaccatctacgggaagtcctaagccccccagccatgcccgtcccagttaactcagagcggcttctgatccttcggggtcctctgcagagccaggagcaccaggtcttgtcatgagttcacccttggggtccctcccaccaggtttccagccccagtacccccgaggccccagacatcccagcctgcccttctccgggccagaagataaagaaatccaccccggcagcaggtcagccgccccacctgacatccgcgcaggaccaggtgaggggcggggcctggggcagatgcgggagggctgagtggtgccggcctgcctgcctgcctgacggcaccgtgtcccctgatccccctgaaggacaccatctctgagcttgcgtcatgcctgcaacgggcccgggagctgggggcaagagtccgggcgctgaaggccagtgcccaggatgctggggagtcctgcaccccagaggccgagggccgccctgaggagccatggtgagtgctgggtgggcggccacgaggccccggcaaaggccgggttggtggcaggcgtggcccagcgagcctgtcagaggcccaggtctgctccttccagggagggtggtggtgaggtcaccagggcgcggacccagacccctgagaaaaaggtcccgggcactgctggcgctgtgccctcagtccctcctgcggggggcagctcctgcctcggggactctggcaggtttcaaatgctcctgatgcattggtgtgttgtctgcctctgcccctgagagctgacgaaactgcgctggggagagggcagagcttccctgggggagctgcgtggacacagcagagctggggtgtggagccgggctttcccgtcaccactgctacccctaacggtgccagtgctggtgggtgtgcaagggccgcgaaagccatcgtgtgtggcatggcaggccccatcggagggtctccctggccgaggggcctgctgtggcgttggaggggtaggggcctactgcttctcatgaggctcctccctccctgacagtggcgagaaggcgcccgcctaccagcgcttccatgccctggcccagcccggcctgccgggactcgtgctgccctacaagtaccaggtgctggcggagatgttccgcagcatggacaccatcgtgggcatgctccacaaccgctccgagacgcccacctttgccaaggtccagcggggcgtccaggacatgatgcgtaggtgagtggccgggggtgggctgtggctgtcctggagttgggggtgggcccgggcctgcctcctgagccgcccccatcctcccataggcgttttgaggagtgcaatgttggccagatcaaaaccgtgtacccggcctcctaccgcttccgccaggagcgcagtgtccccaccttcaaggatggcacca

SEQ ID NO: 1896 - DNA, 6000 bp, Homo sapiens
gaaacctcatctctactaaaaatacaaaaaaaattagctgggcgtcatggcgggcgcctgtaatcccagctacttgggaggctgaggcaggagaatcacttgaacttgggaggcggaggctacagtgagttgagacccgagatcatgccattgcactccagcctgggcaacaagaaggaaactccatttcaaaaaaaaaaaaaagtgttcaaacacacaagaaaatagaatagtgaatgagcacctgcacctatagagcactcagcttcaatcagtattttgttatcttgttctttcttcgtttttttcctgagtatcttttttttttttgagatggagtctcactccattgcccaggctggagtgcagtgggatgatcgtggctcactgcaacctctgcttcctgggttccagctattctcttgcttcagcctccaaagtagttggaattacaggtgtgcaccaccacacccagctaatttttttgtattttttgtagagacagggtttcaccatgttggccatgctggtctcgaactcctgacctcaagtgatccacccgtctcggcctcccaaagtgctgggatgacagcatgagccaccatgcctggcattctgagtatctttaaggaatttcagacatatgattttacccataaatgttgcagtgtatttattagatagggattgtgttttagcgtaactataatagcattcccacatctaagaaaattaacacggactcatcctcaaatacccaatctgactgtctcaggagtgacggagcccaggtctgagaaaattaacactgactcatcctcagataccccatctgactgtctcaggcgtgactgagcccaggtctaggtcgctcagatttccttctaacatcccctccttttttttcaagttctttatttgtggtagaatttccaacattgtggaataaggtgactgtaaatctgtgatgttagttctctataatgtttgtatgtttgtgaattttgtaatgcaaaaatttaagcatatacagaagtagtaggggtaacagtataatacatctatctgtattagtccgttttcatgctgctaataaagacataccagagactgaataatttacacaggaagaaggtttaatggacttacagttccacatggctggggacgcctcacaatcacggcggaaggtagggaggagcgagtcacatcttacatggatggcagcaggcagagagagagcttatgcaggaaactcccgtttttaaaaccatcggatctcgtgacactcattcactatcacgaaaacagcacaggaaagacctgcccccataattcaatcacctcccacccagttcctcccacatgtgggaattcaaaatgagatttgggtgaggacacagccaagccacatcaatatcctaacagctgccacagtgattaacttatggccaaactttctccccatcatggcccttctgttcttctcactactgcttcatagtaacttaccccaaacctcagcagtttaaaacgattttcttttctctggattttatgggttcaggacacgtttggcaggacaggtatcacgtgtggttgtccaggcagttggaggcatgtgaagactcactgagacgtacagggaagctcttggggctggacactgatgctggctccccctgaggtgcatgccccaagctgagaagactcaaggttccagccagagcctggaatcactaaaggcttgtttgctcacaggtctggctcctgggctggaagggcttagggaccaggactactaaactgcagtgcttcccatgttcagattcaggtcgaaaaccatttccatcaccctccaaagtcctcttgtgctcagctgtggccggctcccatttctgcccagcaaccactcatctgcttctctctgtaaatgtgccttttctggacattccatggaaagggaactgcaacatgagtggtctttcctctggcttgtctcactcagtgtcccacctttgggactccttcacggtgtggcaagggagtcagcagcctgctcctcactgtcgctcagcccgtcactgcatggagagcgtgcacacttcattttatctgctgaaactctgttctcactcttgctctgctgttttcccttcatgtccaccttcctcccccaccctctggtgtgacagacactgctggggcccttccaacaggcggtcctccttcccccacttccgttactggcagaggtcctgcccactcccatgcttcacagctccctccagcccctggtgaatttgcaccattgaatgagtcctgcagaggctgggcaggcgaagccttcctgggaaaggtttccttgctaatatgaagcaaggagcaatgcctttgcagtagatgcagtcctgcctgcgtgtggggggctgtacactcatcgggggctgtggacactgagagtggtcaagaagagacacgcaaagtctttgatgtcactgttgtgctaacaagccaacctggaagctccacctctgacccttcattcgtgagacattaaatccctgtgttaaagctgcgtttagtgagcttttctgtaactttcagctaaaagcaccgtgacagacaggtagcattttccaaactgccacccaagggtgatgctattcctgcagggttccatcctccggtggggggttgcgccctcctgtgaggggttccaccctccagtgggaggttccaaagttgggaattcaaatccaagtctttcttccaagtccaaggcccagagcctcctactttcagcccttgatcctacaagcgtgtcagtgtgaagcagtccaggcccagctcctctgcctagcaggccagtcatccccctgacattctttcttgtctgacccgagtggttctctccttattatttttttttttttctgagacagagtctcactctgtagcccaggctggagtgcagtggtgcgatctcgctcaccactacttctgcctcccgggtcccggttcaaggttcgagcaattctcctgcctcagcctcctgagtagctgggattacaggcacatgccaccacgcccagctaatttttgtatttttagtagagacagggtttcaccacgttggccaggctggtcttgaactcctgaccttaagtgatccacacgcctcggcctcccaaagtgctgggattacaggcgtgagccactgcgcccagccgagtggttcattcttgtgatgaaacttaaaacacctcctcctggcacaggcccccaatctcctcggacggcaggctctgcgggttctccctgcctgacccttctgcaattcctactgcaaggccttgctggctcccactgggccacagcaatgggtctctgaccgggccacctcccctgcgaactggcttcccctgttggtaggcacagacctcatcatgccgcccttgttttttatttttaaatatttattttttgtagagacagggtctcactatgttgcccaagctggtcttgaactcctgggctcaaaagatcctcctgcctcggccaaataactgggaggacaggtgtgaactaccgccccaggcagcacctccgttgtttaaaatatttaacgcttccagctccacgtggtaaaactgatggaaaactttgtattctagcttcttcctacttttggggcctcatcttccccacacacacccaaaggtctggccacactaggctgttataaaagacacctttgtcgcacccaggttctactcctcggtcaccctccgcaatgtacttatccccacagccctcggagagctacagtccagcctgggacggcctcccaatgctctgttccagtgtgcggaggctcagggattctcagtggcaccaagatacccagccctcgaggagaacctcaggtgagacacacgcacactgccccagcccctcgaccacctggtacgcacttatcactcgggaactgacctacattttcattaaacttatgttttcaactaagatttctggatatttacctcctacataaagttcccaaaacaaaccagtttcatctttacggcgcgtgcctgctactagtgtccatccggtagggtcttacagtaggctcctcaccccagccccagatcctccaagccactgacctcgcttcgctccctcccgccgtctcctaccttccagcgaagctgccggcggcgggtgcttggctgtcccggcccccgggtggaggctgtccacaggcttctccgactccctgtctgcctgcctggcttcctgggaatgcttctccatcaacttctccttagattttggaactgaataggtggatcccttcttttgctcctcacctgaaatatatggatcatccgttagacccgggacttaccgaatgcagggcagtgggtcccatcgtcttcagtcgcctgcgtggatccagaataagctggcttcaagtctcgagtctccgcgtttccgtaaccgcctcaggcgggaaacgcgccgtccgtggcggactcggcggcaggaacggttcgcaccgggccgagcctggcgcctgcgctcacaccgccccgcccagcccagccccgccctgggcccgcgcccaggggcggagacgcggggagcccagcgcctgcgcctcctttacctttcctgggtttctctttgcttttggaaaggcccatgggtgagcccaccgccccctccgacgcaagcccgggtccccacacctccgcggccgcggagccgggagcgactcacaaaaggtcctcgcgccagcggcgtgcgtcaccatggcgaccgcgcgccgcgcagccgcgccccgcccctctggcgggaccggccaccatcctctcgcgagagcatcccgtgcgaccggaagtggggcggcgaccccggaagtccccgccgggtgcagcttggtcggttcgatcgccgccgggacctgacaccgcccggagttggcgtcccttctccctctccgagtgctgctcctgtcattgtggccatggacggtaagaggtcgcggccgtcctccggggactcgcgcgcggggcggggccgcttctcccactggcgtgggctccgcccacctggggccgcgggcaggactcaggagagctcgggcctcgaccgtcgatcccccgggaccccatccccagggcctcgaccaccgacctgggaccccttttcccggtcgtcgtcccccgatccccgacccggaccccatccccagggcctcgaccaccgacctgggaccccttttcccgagcctcgtcccccgatacccgacccggaaccccttccccagggcctagaccaccaacccgggaccccttttcccgggcctcgaccctcgatccccgacccggaaccccttccccagggcctctaccaccgacccgggaccccttctcccgggcctcgacccccgaccaccgaccgggacccttcccaggcccccgacccccaacccgagatcctttaccccgggcctcgaccctcgacccgggacccctccccccaggcctcgatccccgacccccgattcgggaccccttccccggggcctccatccccaaatctcaacccggtatgccttccccggggcctcgacctctgacccccaaccatggacccgggacctagactcccgacccaggaccccttgcccagggcctggacccccgaccaccgacccaggaccctttcccccgcccctggcactcctcagcgtcaggcgccctttcccgccagctcggtaggggggactgtgcgatgcctgttcggcctttcgggacttggaatgtcgggtcagagggcaccagaaaaagtgacagttgcaccccctgccccaaacagcatcactgcaaatcagaaggactcagacagaaagcgctccctgagtgccaggccctggtcacagcagctctttgcgtccattctccatgtggggaagcagaggtttgagca

SEQ ID NO: 1897 - DNA, 6000 bp, Homo sapiens
ggttcacgccattctccggcctcagcctcctgagtagctgggactacaggtgcctgccaccgcgcccggctaatttttttgtgtgtttttagtagagatggggtttcactgtggtctccatctcctgaccttgtgatccaccccacctcggtctcccaaagtgctgggattacaggcgtgagccaccgcgcctggccccaagttgtctttcttaagataacactccgggccaggcacagtggctcacgcctgtaatcccagcactttaggaggccgaggtaggcggatcacgaggtgaagagatcgagaccatcctggccaacgtggtgaaaccccgtctctattaaaaatgtaaaaaaaaattagctgggcatggtggtgggcgcctgtagtcccagctactcaggaggctaaggcaggagaatcgcttgaacccgggaggcagaggttgcagtgagccgagatcacgccaatgcactccagcctgggcgacggagtgagacgccgtctcaaaaaaaaaaaaaaaaaaaaaaaagataacactatttctttcatggctttcatggatgaccctaaggatctgcctccacttagcctcagataagaaaagagctaatatgtcaccaaggtggctcaataatcccctccttggtcagcagtctgagccctgtgtggcggtcactcaactgttatataatctgcccgactgtttctgtggctctgagtgagcgtggcttatactatctgtcctcaccagaacagggctggggtgaacggccattcggtacataccttcaactggaacagggtatctgcaaagaaagagggaattaatggtttgaggattgggaatgggacgttacacttctggcaggcaggactcactaggttccttctagacaccaggagctagaacacacacacagaccacacctgcctggggccttcggggagccccccccaacaggggaggcacgagacagattcgtgtgccagccctggctccttgctagccacagggcccagcaaatgcagaccctccctccctgtttccttgttgggaacatgagggtggtaccagccaatctcaaagggttagtgtgaggacagaagaggtcatggacgcagcatcttttggccatggttagaatccaaaagatggtggtttataattaatgcaactttgcaaatgtcccttgggattctttcccaatttaaaagttcacctgtaatcccagcactctgggggtgccgaggccagtggatcacttaaagccagggtttgaggccagcctgggccaatttaaaagttcagtacttgacagtttactttttacagactctttctcctcaaaggtaaatggataaaaatagcaaggtggtaactcttagacatcaaagagctgatttccagcggtacagtcgctcacgcctgtaatcacagcactctgggaggctgaggcgggcagatcacttgaggtcaggagttccagaccagcctagggaatatagtcagacctcatctctattagaaaaatatatatttttttgccgggtgcggtggctcacgcctgtaatcccagcactttgggaggccgaggccggcggaacatgaggtcaggagatcgagaccatcctggctaacacggtaaaagcccgtctctaccaaaaaatacaaaaaattagccaggcgtggtggcgggcgcctgtagtcccagctactcaggaggctgaggcaggagaatggcgtgaacccgggaggcagagcttgcagtgagccgagattgcgccactgcactccagcctgggcaacagtgcaagactccgtctcaaaaaaaaaaagaaaaaatattttttttaaaaagtaggattgatctcaattcattcaactgctaaatttggagagcgaccctgaccccagattcctgaaagggctttaccacactagccacaacgaggaaatggagcctgtaaaagaatgaggttactgagtgttcacaaatgcacaccaaggctccaagatgagatctcccggggttccagaaagctctgggcatcgttcaatctatcgcctgtcagtgcaggcgtggtcaaggccaagttcaacctgtcatctatcagttcaggtgtggtcacggccaaggttatctgtgactggaaaacagccagcctgacccagatggcacagtgcaggccaggcgggccgtcccacccaactcactgtgggatgctggccaaaccgccctcctcatctcagctttccctcacctcagctttccctcacctcagctttccctcacctcagctttccctcacctcagctctcctcacctcagctttcctcacctcagctttccctcacctcagctttcctcacctcagctttctcttccagccgtgtgtggcagcacaaaaacccagctaaggcaaaatctgactctgaggaaatctgacatgggcttgagagaagtcccctcaaaagagttgagtgagctgtggagtgaaaagccacaatttttcttttttttttttgagacggagtctcactctatcacccaggctagagtgcaacggcaccatcttggctcactgcaacctctgcctcccaggtttaagcgattctcctgtctcagcctcccaagtagttagaattacacgtgcacgccaccaggcccagctaatttttgtatttttagaagagacggggtttcaccatgttggccaggctggtctcaaactcctgacctcaggtgatcaaccaacctcggcctcccaaagtgttggggttacaggcgtgagccaccacatccggcctcccaaagtgctggaattacagccgtgagccaccgcgcccggcctcccagagtgctggggttacaggcctgagccaccacacccggcctggccagcatattttttgtggcgggaggtagatgttatctttcatcttctctcagggcagaaaatctctacacatttccttcatgatgatgacacggtggtactatagcttttcacacttctaactaaaagaattttttttgagacggagtctcgctctgtcgcccaggctggagtgaagtggcgcgatctcggctcactgcaagctccgcctcccgggttcacgccattctcctgcctcagcctcccgagtagctgggactacaggcacccgccaccacgcctggctaatatttttgtatttctagtagagatggggtttcactgtgttagccaggatggtctcgatctcctgaccttgcgatccgccggcctcggcctcccaaagtgctgggattacaggcgtgagccaccgcgcccagcccttcaaaaagtatttttaaaagcctgcccatcacaccagcccaacgatgtttcagcaaacataggacttcattttgccagattcttcctgttctttggtatccctgagcacacagccggctagccccagatgtagaaggtaagaattagggcgacccattgagcacagaaacgcttgtgctggctcctgctcaaacctctgcttccccacatggagaatggacgcaaagagctgctgtgaccagggcctggcactcagggagcgctttctgtctgagtccttctgatttgcagtgatgctgtttggggcagggggtgcaactgtcactttttctggtgccctctgacccgacattccaagtcccgaaaggccgaacaggcatcgcacagtcccccctaccgagctggcgggaaagggcgcctgacgctgaggagtgccaggggcgggggaaagggtcctgggtcggtggtcgggggtccaggccctgggcaaggggtcctgggtcgggagtctaggtcccgggtccatggttgggggtcagaggtcgaggccccggggaaggcataccgggttgagatttggggatggaggccccggggaaggggtcccgaatcgggggtcggggatcgaggcctggggggaggggtcccgggtcgagggtcgaggcccggggtaaaggatctcgggttgggggtcgggggcctgggaagggtcccggtcggtggtcgggggtcgaggcccgggagaaggggtcccgggtcggtggtagaggccctggggaaggggttccgggtcggggatcgagggtcgaggcccgggaaaaggggtcccgggttggtggtctaggccctggggaaggggttccgggtcgggtatcgggggacgaggctcgggaaaaggggtcccaggtcggtggtcgaggccctggggatggggtccgggtcggggatcgggggacgacgaccgggaaaaggggtcccaggtcggtggtcgaggccctggggatggggtcccgggggatcgacggtcgaggcccgagctctcctgagtcctgcccgcggccccaggtgggcggagcccacgccagtgggagaagcggccccgccccgcgcgcgagtccccggaggacggccgcgacctcttaccgtccatggccacaatgacaggagcagcactcggagagggagaagggacgccaactccgggcggtgtcaggtcccggcggcgatcgaaccgaccaagctgcacccggcggggacttccggggtcgccgccccacttccggtcgcacgggatgctctcgcgagaggatggtggccggtcccgccagaggggcggggcgcggctgcgcggcgcgcggtcgccatggtgacgcacgccgctggcgcgaggaccttttgtgagtcgctcccggctccgcggccgcggaggtgtggggacccgggcttgcgtcggagggggcggtgggctcacccatgggcctttccaaaagcaaagagaaacccaggaaaggtaaaggaggcgcaggcgctgggctccccgcgtctccgcccctgggcgcgggcccagggcggggctgggctgggcggggcggtgtgagcgcaggcgccaggctcggcccggtgcgaaccgttcctgccgccgagtccgccacggacggcgcgtttcccgcctgaggcggttacggaaacgcggagactcgagacttgaagccagcttattctggatccacgcaggcgactgaagacgatgggacccactgccctgcattcggtaagtcccgggtctaacggatgatccatatatttcaggtgaggagcaaaagaagggatccacctattcagttccaaaatctaaggagaagttgatggagaagcattcccaggaagccaggcaggcagacagggagtcggagaagcctgtggacagcctccacccgggggccgggacagccaagcacccgccgccggcagcttcgctggaaggtaggagacggcgggagggagcgaagcgaggtcagtggcttggaggatctggggctggggtgaggagcctactgtaagaccctaccggatggacactagtagcaggcacgcgccgtaaagatgaaactggtttgttttgggaactttatgtaggaggtaaatatccagaaatcttagttgaaaacataagtttaatgaaaatgtaggtcagttcccgagtgataagtgcgtaccaggtggtcgaggggctggggcagtgtgcgtgtgtctcacctgaggttctcctcgagggctgggtatcttggtgccactgagaatccctgagcctccgcacactggaacagagcattgggaggccgtcccaggctggactgtagctctccgagggctgtggggataagtacattgcggagggtgaccgaggagtagaacctgggtgcgacaaaggtgtcttttataacagcctagtgtggccagacctttgggtgtgtgtggggaagatgaggccccaaaagtaggaagaagctagaatacaaagttttccatcagttttaccacgtggagctggaagcgttaaatattttaaacaacggaggtgctgcctggggcggtagttcacacctgtcctcccagttatttggccgaggcaggaggatcttttgagcccaggagttcaagaccagcttgggc

SEQ ID NO: 1898 - DNA, 6000 bp, Homo sapiens
ggcctcccaaagttctgggattacaggtaacattcatttttaatgtccctctaacacacccagactctccctctgtattttgagatgtaaattttgctatctgatttttcacctaagagttcttcctttggtatgtcaatttagggctatcaagctgaaaattgcctaagacaatgaaacaggttatcaagaaattggaagtttaggccgggcgcaatggttcacgcctgtaatcccaacaaattgggaggccaaggcgggcagatcacttgaggtcaggagttcgagaccagcctggccaagatggtgaaaccccatctttactaaaaatacaaaaattagctgggtgtggtggcacgtacctgtaatcccagctacttgggaggctgaggcaggagaatcgcttgaacctgggaggcggaggttgcagtgagctgagattgcgccattgtactccagcctgggcaacaagagcaaaactccatcttaaaaaaaaaaaaatacaaaaattagccgggcgtggtggcaggtgcctgtaatcccagctacccaggaggctgaggcaggagaatctcttgaacccaagaggtggaggttgcagtgagttgagactgtgccactgtactccagcctgggtgacaaagtgagactccaactcaaaaaaaaaaagaaaaagatcgaaagaaagaaattgtaagtttaaaatagtagaaaaaaaagaaggggtcttatgcatcttctgtgtgtcgaatgcatctatgtatctatgagtcatgtatacaatgtttcactaccaaaaatatataaaagagttttaattaattgggttaaaggaaaaaaaagcacttaaatactgtatcagaaaaatataaacttttttttttttttttttttttggagacagaatgttgctctatcacccaggctggagtgcaggggcacgatctcggctcactgcaagctccgcctccagtgttctcacgccattctcctgcctcagcctcccgagtagctgggactacaggagcccgccaccacgcccggctaattttttgtatttttagtagagacggcgtttcaccgtgttagccaggatggtctcgatctcctgaccttgtgatccccccgcctcagcctcccaaagtgctgggattacaggtgtgagccaccatgcctggccagaaaaatagaaactttaagcccaaatgctttttcaggttcatgtgacttaagtaaatccttaaaaaataagctagttttaaaattattggtaaaataaaatagaaatgccttcagaattgtcaacatacattattgtttagatttattggtaaaggagttcaatatttatcattacgagatactgtaagttgtcaaaatttggcatgagggttataaggcttgcaacacaaaagggaattatgtttgactaatttcttgataaataaggcatttaatattgtttaatggaaagagataaatcctgagttgctggcaaaaaaaaaaagaggaacatttatttaaccataaggttcttacttaggtaaacacctaaaattcacaggctataaaaatggttaggccaggtatggtggctcacgtctgtaatcccagcaatttgggagtctgaggtgggcagatcacctcagatcaggaattcaagaccagcctggccaacatggtaaaaccccgtctctactaaaaatacaaaaattagctgggcatggtggcaggtgcctgtaatcccagctacttgggaggctgaggcagcagaatcacttgaacccaggaggcggaggttgcagtgagccaagatcacaccattgtactccaacctgggcaaaaagatcaaaagaaaactccatctcagaaaaaaaaaaaaaaagaaaatggttaacagagaaataactttaaatgaagactatcacagttttctttcctttttcttttttttttttgagaagagttcactctgtcacccaagctcgaacgcaatggcgtgatcttggctcaccgcagtctccgcctcccaggttcaagctattctcccacctcagcctcccaagtagctgggattataggtgcccacaaccacgcctggctaattttttttttttttttttttgagacagagtctcgctctgtctcccaggctggagtgcagtggtgctatctcggctcactgcaagctccgcctcccgggttcatgccattctcctgcctcagcctcctgagtagctgggactacaggcacctgccaccacgcctggctaattttttgtatttttaatagagatggggtttcaccgtgttagccaggatggtcttgatctcctgaccttgtgatccgcccagtctggctaatttaaaaaaaatatttttatagtaggctgaggcgtgagaatggcatgaatctgggaggcggagcttgcagtgagccgagactatgccactgcactccagcctgggcaacagagtgagacaccatctcaaaaaaaaatttattttaaataaacaaataaataattacagatgtaaagatagttataaggagatatttttagtatgaaaagttaaaaggaaaataatttcatatgagaaagaatcttgtgtggtaaatttttgttctaaaatggctagttattttggaaagagggatgttcagaataaaacaggaagtccaagtatatcataaatggtttgtgtaagttttgataaagtttgtaaaaagctttttttttttttttttaagatggagtctcgctttgttgtctgggctggagtacagtggtgcaattttggcctatgtcagattaacaaggctttcttggagcattaacccactctttaattaaaaaaaaaaagttataaaaatgtttatggaaattatcttttttgtttttgaggcagagtttcgctcttgttgcctaagttggagtacagtggtgtgatctcagctcactgcaacctctgcctcctaggttcaagcaattcttctggctcaggctcccaagtagctgagattacaggcgcccacaaccatgcctggctaatttttgtatttttggtagatacgtggtttctccatgttggccaggctggtctcgaactcctgacctcaggtgatcgacctgcctcggcctcccaaagtgctgagattacaggtgtgagccaccgcacccagccttatggccttattttttttgtttttttttagatggagtcttgttctgtcacccaggctgaagtgcagtggtgtgatctcggctcactgcaacctccacctcccaggttcaagcagttctcctggctcagcctcccaagtagctgggatcacagacgcacactaccatgcctggctactttttgtatttttaggaaagatgaggtttgccatgttggtcaggctggtcttgaactcctgacctcaagtgatccgcctgccttggcctcccaaagtactaggattacaggcgtgagccaccacacccagcctgaaaattatatcttgtgctcaagatgattacaatttaatagatttgtttataaaattttagagagatttaattggccttatgctgtctttatcttttgagaagaaattccctcaaagaataaaggtttctacatttttttttgaaatctttgagttatctcagcaccataggaaaggtaaaaacagaaaaaaaaaaagaaaataaaaaaagaaatctgtgagttatcactgtggctaagtgaatgacttattttacaatgacctgtgatcctatttagtgatagcaactgttttaaaactttttctaggccaggcacggtggctcacacctgtaatcccagcactttgggaggctgagatgggcaaatcaagaggtcaggaaatcaagaccatcctaactaacatggtgaaaccctgtctctactgaaaatacaaaaaattagctgggcgtggttgcaggcgcctgtagtctcagctgcttgggagactgaggcaggagaatggcgtgaacccgggaggcagagcttgcagtgagccaagattgcagcactgcactccagcctgggtaacagagcgagactctgtctcaaataaaaacaaaaacaaaacaaaacactttttatatttgacaaactttccaaaatcaaattctttcttcagtcctcattaatttttgtgtgtgtgtgtctgatggagtctcactctgttgccccagctggagtgcagtggcacaatctcggctcacttcaacctccacctcccaggttcaagcgattctcctgcttcagcctcccaagtagctggaactacaggtgcccgccaccacacctggctaatttttatatatttttttctttttgagatagagtcttgctctgtcaccaaggctggagtgcagtggcacgatctcagctcactgcaagctccgcctcccgggttcataccattctcctgtctcagtctcttgagtagctgggactacaggcgcctgccaccacgcccagctaattttttttttttgtattttttagttgagacagggtttcactgtgttagccaggatagtctccatctcctgacctcatgatccacctgcctcagcttcccaaagtgctgggattacaggcgtgagtcacctgcctcagcctcccacagtgctgggattacaggtgtgagccactgcgccaggcctcccaaggtgttgggattacaggcgtgagccaccgctccgggcctcccacagtgctaggattacaggtgtgagctgctgcacctggcaattttttgatattaggtcccctgaagtccaaaaagagatatatggcttatttggtataatgaaatcatacaggaagcattgttaaaggtgaaatggtgtttttcttgggattatatttatataaatgtgttgttagtgtgtgttccaaaattgtatgagatgcctgtgattctgatacatcttagtatatggtattagtagtaattatgattattatgtaaaattgttgtatgccacataagtaaccaaatttgcttgtcaattatgtcttttttttttcttttttctgagacagagtcttgctctgtggcccaggctggagtgcagtggtacagtcttggctcactgcaacctctgcctcccaggttcaagcgattctcatacctcagcctccagagtagctggactgcaggcgcatgctaccacggccagataatttttgtatttttaatagagacggggtttcttttttttttttttccctgacagagttttgcttttgttgcccaggcttggagtgcaatggcgcgatcttggctcactgcaacctccacttcctgggttcaagcaattcttctgcctcagcctcccaagtagctgggattacaggtgtacaccaccatgcctggctaattttgcatttttttagtagagacatggtttcaccatgttgatcagggtcgtctcaaactcctgacctcaagtgatccacccgcctcagtctcccaaagttttgggattataaatgtgcgccactgcacccggtcaagacagggttttgccatgttagccagggaggtctcaaactcctgacctcaagttatccgccctgcttggtctcccaaagtgctgggattgcacacatgagccactgtgcctggcctcaattatgtctttaactgtggctgttctaagacttttgtcatccacaattgttgttttacttttatcctttcacagagcagtttataatcagctatagaactctgaggtactcttcaatctaagtttctgatcacttttgagattgtgccattggaatagagcaaaaaacttccaagactctcattgagagctgctatattcatgaggattgttcatccaatattgggcaaaatgagagttaattttatggactaaactaatataagactgaaataatctttttatgtttttgcttaaaacattactgattctttctgttctttcagaaccaagaaaactt

SEQ ID NO: 1899 - DNA, 6000 bp, Homo sapiens
cacatgctccctagggcccaatgtgcagaccaggagaccacgtacctctccaggtggttccccacaaccacctccttcagctccacgatgttcggatgacgcaggcggagcagcagcgtgatctcccgcaagctgctgatggggatgcctggggagggaggtggcctcagcgagccccaccccagtgatggcggggaagccccaaccccagccactcttgggcttcacgaacacctgatagcaggtgctgcagtgtccccacctcagggagaattggggcgaccccaataagcatttttttttttttgagacggagtttcgctcgttgcccaggctggagtgcaatggcaccatctcggctcaccgcaacctctgcctcccgggttcaagcaattctcctgcctcagcctccctagtagctgggattacaggcatgtgccaccacgcctggctaattttgtatttttagtagagatggggtttctccatgttggtcaggctggtcttgaactgccgacctcaggtgatccgcctgcctcggcctcccaaagtgctgggattacaggcatgagccaccatgcccggcccaataagcacttttaactcttccttgaccaaatacgaatcggcacctctctaaacaccgtggacatctatgtggggcatggcagggccctgcctgcacaggcaggtgctgggggtggaggggacagcagagctgagcctgcagtgaggtggcctcaccagacaggagggggaggaggggatggagactgcagagccctcctggcagacagctgaggctgcgtgtggacctgggggtgatgtgctgggccacaccagaaccctcccagaggccggcccccgctacaagcaccgtgcagtcgctctgaggaaacttcaggtaactcacatccttctgcctcctcccagtgcgaggtcccaacaccccaatttcctgctcaccatccttctccttgtccatccgcaccttcttcagtgcgacaatctcatctgtctgggtgtcccgggcccgatctggaatggaaacacattggtgatgacatcatctcgatgcccctcgtgggctccctagcgctgaacgggaggctctccctgagccacaggggtccccgttctttcctctgacaacctcatgcccagtgacactcagtccccactctgtgcaacgcccctagcccgagacgcgttcccccggagggtttcctcatttgaactgggcagggggtgcccaactttgctctgtgctggaccctggcctccagccactcagttctgtggctccaggctctccatgtcctccttagcatgcagatcactgctttgtgctctcttgtaatgtcctaaaagcaaataaggtactctatgcagaaaaaagcaaaccttattttgtgtgaagatggctctacaaaacatcctgctaatgtgtgcagcttccagaatgacctacgccaatttcacatctgttataacctttagttgtgtgtggtgtttttggtttttttgagacagggtctcactctgttgccaaggctggggtgcagtggcgtgatcacagctcactgcagcctcaaactcctaggcttggccgggtgcagtggctcacacctgtaatcccagtgctttgggaggccgaggcaggaggatcatttgagcccagaagttcaagaccagcctgggcaacatagggagatcccatctctaccaaaaatttaaaaattagctgggtgtgcttatgtactcttgtggtcccagatactcaggaggctgaggtgggaggatcacttgagcctaggaggtcgaggccgcagtgagctatgatcatgccactgcactccagtctgggcaatagagcaagacccatctcaaaaacaaacaaaaagaaaaaacacctgggctcaggtgactcctccagagttgctgaggtgatagacatgagcaccatgtccagctcctgctgcttctggaaagttctgtattttatttctctaacagttctgtgtactctgcagtgacacgtttggattatgggcattagcaaccggatgcttacgtttacccagaaatggtacaatgtttgtgataactacatcaggaattgaagttcctgaacaggtttctgccctgtttcagagcacagggtctgagtcccttccagccccaacgcggctgctgcttcgacagtctcgtcccacactgtcacagccacgagctgcggccacatgtcctagccttggccactcacacacaatgccgtaggtaccctctccaatgcggttcagcttctcaaactccttcacactccggcatcgtcccagctgaaacagaagggtgttgccagtgtggaaatttggcagctgatggaacaactgaggaaatttcaaatggaatttgtaccagggagcccactcacgtcttgctcaccaaacagaaaggcaaccacacgtttgggctttttttttctttttttgagactgagtctcgctctgttgcccaggctggagtgcagtggcaagaacatggttcactgcaacctccgcctcctgggttcaagtgattctccggcctcagcctcctgagtagctgggattacaggcaggtgccaccacaaccgcctaattttctatttttagtagagactgggtttcaccatgttggccaggctggtcttgagctcctgacctcaagtgatctgcccgccttggcctcccaaagtgctgggattacaagcgtgagccaccgtacccggcctcttgggcttttctgatgagaaaaggtggtgacgatactgggccaatgctttgaaagaaatatcagaggcggccactcagatactccctttcaatcccacatacaaaaatacatctgtggcagaggctgctgtcccagcatccctgtatcactacctcctggaagttatgaaacgctacccagtggcatctggccttggaatgtgagctgaagggaccgtgtgacttccaggtgaaaggaagctttcacctcttctcacctcagtgacgggaagaaaaaatggaaccagaatgcctgacccacctgtgcaaaacaactgcttctctccagaatgttaggggagagtgaaaaaaggcatcatcttgaggccctgtattttggggtctctgaactagtagagtctgtatccttctccatggatctaagaagcacatgtaagccgggcgcagtggctcacgcctgtaatcccagcactttaggaggctgaggtgggtggatcacgaagtcaggagatctagagcaccctgactaacacggtgaaactccgtctctactaaaaatatgaaaaaattagctgggcgtggtggcgggcgcctgtagtcccagctgcttgggaggctgaggcaggaggatggcgtgaacccaggaggtggagcttgcagtgagccgagactgcgccactgcactccagcctgggtgacagaatgagactccgtctcaaaaaaaaaaaaaaaaaaaaaagcacacgtagcaaggtttgaaacctcacagcccccatttcccggcttcccttctcttaaccctcagtatcaaacctgggctcaagcaatcctcccacctcagcctcccagattgctgagattacaggtgtgagccactggccgcatttgtcctcagtctgattccttcctgacacctggggaccgagtcagaagcatctggcctgtcactcactgatggcctagtctcaaactccctttcccgccttaattccccttctcacatcctctgcttgtgctcttctcgacacgcttatttctgggtgtccaaatccttgtcacacttcctgaactcaaagaaatgccaggccaggctgggggcggtggctcacgcctgtaattccagcacttgggaggccgaggcaggaagatcacttgagcccaggaggctgacgatgcactgagccgtgatcacgccactgcattccagcctgggcgagagcgctagaccctgtctcaaaaaaacaacaaaaaagaaaaggccaactcactacttcaccccagagtccagcacacggctctcaacgcggtgagcgcctgctgcacgtctggatgagtaaagtgtggctcctgttgtcatccagccacgatctgttaatgattcttactgaacacgtggcttggcctctcagagcaccagccagcagttaaaaacacaaaccagcggccaaagttcagggctctccacccccaccagccgtgcacctgggcaacaccgcccaacgcccagaggctctctcctggtctctgcagagggaggcaccggcacctccgcaagggacgcgcccagggttcgcgtgaagccgccaggcagcgctggaccccgctccatgcagcccaagcccagcgggagccttcaagctcgaactcgtcgcgggtgtaaattctccccacaaacaagtggctcgcggctcagcctgcaaagcccagctcgggcgctgaacccagcagcgcccgagctggatcccggagcttgctcttcccaagtcccgggcccgtctctccgcgggcgcgaggcatccctgagcccgccccggcccctcagatctccagggaccggctgtcgggggtcctgagcccgccccgccccggcttccgcccccgccgcggggaactctgggactgtcgttcccgcccgtgccggaagcctcggcgcggcagcgcgacacgaggctccccagacccagccgggcagtgccgctagcgaggcgggcagagctgcccgggtggcaccccgcgcaccctgtgttccggaggcaccgtgaagaagccctccttacgaatacacttcagacggatctgctcgcactccagatctggctccgccatgccgagcgctggccccgcctctcttgcgcgcaggcgcagacgcggacggccccgcggcgcaggcgcgaaagctccttcccgggcttcctctccttagcaacggttaccaagagacgctcccgcgggtccgccctaggcgctgggctccagggatcggctccgactgctgcagttcgggccttattttagggtgaagcccgggcagccgacccggctgcgccgtagtgggaggccacggcgattacccaggtgaaggtcttccaggtgagacgggttcccccaggtaagaaggtcctccaggtgggagtccttcatgtggggaggtcctccaggtggggggggagggtcctctcggtggggggtcctccaggtaagaggatcctctaggtggggggggggggttccccaggtgaagggccctccaggtaagaggatcctctaggtggggggggggttccccaggtgaggggacctccaggtaagaggatcctctaggtgggggagtcccccaggtgaagggccctccaggtaagagggtcctccaggtgagagggtcctccagcggagggggtcccccaggtaagagggtcctccagttgggagtccttcaggtggggtggtcctccaggtgagagagtcttccaggtgagagggtcctccaggtgagaggtgaaggtgaaggtcctccaggtgagggtcaggtcacttggtccagggatgtggcttcagcaagcatttgggtgcctcctctgtgttcaggacatggggactccaggagactgaaggaagcaagtggcaatgtccatgctgtcaagttctgtcacagaaataagcaggagtgagtgaaagacaggagagaagctctgtgaggggtggcattcaagcttagcttctgggcaggaagaggcagctatgtcagcattccctaacaaggtttggcaaagtagatacctcccctcactcatggaagacctgacttcccaggctggtagaagcttctctcacaggcacctgcctctccaatctctttcacagcccagccctggaaggtggaaaaagaaaagttgacatggaatgtttaggaagcaccattggtccaggtccaggatcggggcagcca

SEQ ID NO: 1900 - DNA, 6000 bp, Homo sapiens
ctttctgttctttcagaaccaagaaaacttttttttttttttttttgagacagaatctcactctgtcgcccaggctggagtgcagtggcgccatctcggctcactgcaagctccgcctcccaggttcacaccattctcctgcttcagcctcccaagtagctgggactacaggcgcccaccaccgcgcccggctaattttttgtatttttagtagagacagggtttcaccgtgttagccaggatggtctcaatctcctgaccttgtgatccgcccacctcggcctcccagagtgctgggattacaggcgtgagccacggtgcccggctggtaacttttttaactttgagctatttgcagcttttagcaattgagtaaagtacactcctgtgaggaagatttggaacatatttctgttttcttttttgttttttatattttgcttgggtagcatatttctttctgatttctccaaaaattgggaactatctgtgagcactatttaaaaaaaaaaaaaaaacttttccctctcccttcccctatttgtattctaatgtcaatataatgatgtgtgcacgtgcagtaacaatctgttttctcttgtaataggacatagagacactgcatattttaccaaggctttgactggaatggcatgctttcaaatataaacagacggctttaaggaatcagagttgacctatagtgcccatcaaagcccttgggaaaactggcttcatactgtatccacccagtggattcttcttgcccagatggagcccatgtatcaaggtagggaaactgcaatagagaaagggtttaattcacacagagacaagtgaatgggagaccagaatttgatgattactgaaatcagtctccccaagaatttggggactagggtgttccaaaggtagtttgggggaaggggtggggtagcttggcagtgggtgcttgctgctgatgggttgtgggggcggggggccatcgtagggtgtgagacaggatcctcccgtgtgctgaaccgcttctgggtggggctgcaggagtagttggcaggtccaggtggagccatcatcagtcagtgggtcctgttggagccgtaggtatcagacatgcaaaaaacccttgcgaggtactgcaaaaggccaatcttaggttacaatagcattgttatctgcaggacctctggaataatggctgataattgtttatgtctacatcttagccaaattcaggctcctctcctctccctagcctggtggcccctcattagttttacaaatacagttgagttttggggaggggctattatcatgtaaactataaacatctcccaaagctagcccaagaataactgaaggcagcttgaaggctaaaggtcaaagggggtttggctacatcagatcttccccaattggcataattttctcaatgatacaatttttgtggccgggctcggtggctcacgcctgtaatcccagcactttgggaggccaaggcgggcagatcacgaagtcaggagattgcaaccatccttgtcaacacagtgaaaccccgtctctactaaaaatacacaaaaaattagccgggcgtggtggcgggcgtctgtagtcccagctacttgggaggttaaggcaggagaatggcgtgaacctgggaggcggagcttgcagtgagccgaggtcgcaccactgcactccagcctgggcgacagagcaagactccgtctcaaaaaaaaaaaaaaaaaaaaaagcctacatggtaaatatttattcttgctacagtttatacaaataaccaggccaagtacaataagactaaaacttattttgaaaacaaatcagtactacctgatttcactttggtaaaaataggagactagagagagaaaaattatgtttcaaaataaactatagtatacctgttattagattctagccttgcctaaggtttttcaacttttattattttctctttttttgtttgtttatttgttttttcagacagggtctcactctgtcacccgggcagtggtgtggtatcagttcactgcaacctctgcctcctgggttcaagtgattctcgtgcctcagcctcccgagtagctgggattattggtgtgcaccactatggccagctcatttttttgtatttttagtagagatgcgtttcaccatgttggccaggctagtctcgaactcctgacctcatgatccaccggcctcggcctcccaaagtgctgggattataggcatgagccactgcgccgggccaaagccgtgcttttcttaaagctctgcgaacgaaagctagacaacttaaacctcagaagagaataatggtacctatttatatacataaaccactttcacgcctgcctgctgtgtatggacttcagaggaacacagcctacgtcagttttctaggattgttctctccacgtgctctttgttttctttctttcttcttccctctattttcctccctccctcccttccttccttcctttcacaaagtctcactctgttacccaggctggagtgcagtggcacgattttggctcactgcaacctccgccttccgggttcaagcgattctcctgcctcagcctcccgagtacctgggactacaggcaaccaccaccacacccagctaattttgttagttttagtagagacggggtttcaccatgttggccaggctggtctcgaactcctgacctcaagtgatctgcctacctcggcctcccaaagtgttgggattataggcatgagccactgtgcctggtcacaacacctgcattttcttttttttttgtttttttttttgagacagagtctcactctgtcacccaggctggagtgtagtggtgtgatcttggctcactgcaagctccgccccgtgggttcacaccattctcctgcctcagcctcccgagtagctgcaactacaggcacccgccaccatgcctgcctaattttttgtattttttagtggagatggggtttcactgtgttagccaggatggtctctatctcctgacctcgtgatcgacccgcctcagactcccaaagtgctgggattacaggcatgagccaccacgcctggccaacacccccattttgtataccacactcaactcccccattttctacatgctgatcaaaaccaatctgaatggagtctaggtctggctgtgggctgttgggaagaggcccccaaatctggccatcaactggccgcaaaactggccataaacaaaatctctgctgcactgtgacatgctcatgatggccatgactcccacactggaatgagggcaaggaacacctggcccacccagggcggaaaaccgcttaaaggagttcctgaaccacaaacaatagcatgagcgatctgtgccttaaggacgtgctcctgctgcagataactagccagacccatccctttatttcccgtaagaagtgcttttaatctataatctatagaaacaatgcttatcactggcttgctgtcaataaatatgtgggtaaatctctgttcgaggctttcagcttcgaaggctgtgagacccctgatttcccactccacaccctatatttctgtgtgtgtttctttaattcctctagcgccgctgggttagggtctccacgaccgagctggtcccgcagtgggcagtggtttgggcccgaccgagctggtcccgcagtgggcggtggtttgggcccgaccgagctggtcccgcagtgggcggtggtttgggcccgaccgagctggtctcgcagtgggcggtggtttgggcccgaccgagctggtctcgcagtggtttgggccctgcttgctcgactggatttcaacagtgaagccagattagaggacatgctggctgccccgatcctggacctggaccaatggtgcttcctaaacattccatgtcaacttttctttttccaccttccagggctgggctgtgaaagagattggagaggcaggtgcctgtgagagaagcttctaccagcctgggaagtcaggtcttccatgagtgaggggaggtatctactttgccaaaccttgttagggaatgctgacatagctgcctcttcctgcccagaagctaagcttgaatgccacccctcacagagcttctctcctgtctttcactcactcctgcttatttctgtgacagaacttgacagcatggacattgccacttgcttccttcagtctcctggagtccccatgtcctgaacacagaggaggcacccaaatgcttgctgaagccacatccctggaccaagtgacctgaccctcacctggaggaccttcaccttcacctctcacctggaggaccctctcacctggaagactctctcacctggaggaccaccccacctgaaggactcccaactggaggaccctcttacctgggggaccccctccgctggaggaccctctcacctggaggaccctcttacctggagggcccttcacctgggggactcccccacctagaggatcctcttacctggaggtcccctcacctggggaaccccccccccacctagaggatcctcttacctggagggcccttcacctggggaaccccccccccccacctagaggatcctcttacctggaggaccccccaccgagaggaccctccccccccacctggaggacctccccacatgaaggactcccacctggaggaccttcttacctgggggaacccgtctcacctggaagaccttcacctgggtaatcgccgtggcctcccactacggcgcagccgggtcggctgcccgggcttcaccctaaaataaggcccgaactgcagcagtcggagccgatccctggagcccagcgcctagggcggacccgcgggagcgtctcttggtaaccgttgctaaggagaggaagcccgggaaggagctttcgcgcctgcgccgcggggccgtccgcgtctgcgcctgcgcgcaagagaggcggggccagcgctcggcatggcggagccagatctggagtgcgagcagatccgtctgaagtgtattcgtaaggagggcttcttcacggtgcctccggaacacagggtgcgcggggtgccacccgggcagctctgcccgcctcgctagcggcactgcccggctgggtctggggagcctcgtgtcgcgctgccgcgccgaggcttccggcacgggcgggaacgacagtcccagagttccccgcggcgggggcggaagccggggcggggcgggctcaggacccccgacagccggtccctggagatctgaggggccggggcgggctcagggatgcctcgcgcccgcggagagacgggcccgggacttgggaagagcaagctccgggatccagctcgggcgctgctgggttcagcgcccgagctgggctttgcaggctgagccgcgagccacttgtttgtggggagaatttacacccgcgacgagttcgagcttgaaggctcccgctgggcttgggctgcatggagcggggtccagcgctgcctggcggcttcacgcgaaccctgggcgcgtcccttgcggaggtgccggtgcctccctctgcagagaccaggagagagcctctgggcgttgggcggtgttgcccaggtgcacggctggtgggggtggagagccctgaactttggccgctggtttgtgtttttaactgctggctggtgctctgagaggccaagccacgtgttcagtaagaatcattaacagatcgtggctggatgacaacaggagccacactttactcatccagacgtgcagcaggcgctcaccgcgttgagagccgtgtgctggactctggggtgaagtagtgagttggccttttcttttttgttgtttttttgagacagggtctagcgctctcgcccaggctggaatgcagtggcgtgatcacggctcagtgcatcgtcagcctcctgggctcaagtgatcttcctgcctcggcctcccaagtgctggaattacagg

SEQ ID NO: 1901 - DNA, 6000 bp, Homo sapiens
atatacaataatatttttagagatccttgttcacacttcatccgcaccagaggacttcagcccctgtggtattcactcctctttagggctaatttgagaaactgtctcagattggaatccagcacctagagataggctgaggtgagcaggctgatctgttcagacgcttcgcggaccaggttaactttacaagctcattggcttccagagggttggggacccttcttatcctcctagctcagagggaaagattcaagagtttactcttcgcccaatgcccacttcagctaggggttcctggaagaacggggctgtggagtatctcagaaaactttcctccctctactgtcttcaggccccaggagacaaacctccttccaagcctcctggtcccagtggcttccctctcaccgaaatcgaaagaacccgagtcccagcccgaccccttctctcgccgagccctggctgggataccttggccgggaggacaggacggcctcaggctggccgccagacgcactccgcaggacgcgcgcgctcgagcctcggtggactcagccgccggccccgggaggccgcctccctgcgcagcacctcctgccacccgcgcgggcacgtgggatcttgactcgccgcccccgcctccttctgctccgcgtccccagcccgcggctcggggcgcggcgtggcgcggcgcgtgggcgtgctgcggggcgaccatggctgtagactgttacctccagttcccacagtaacaatcgaaagccacggttgccctggagacgcgggggcggggcgcgcggacggcgccggcgcggggcgggctgacgtcagggccgcgggggggcgggcggggcggcgggggctgaggagcgcgcgtgggccaccgcccctcgcagcccctagggacccggacggggcggcccgatggcggcgcctgcgttgatcagcaccgcggacagcggcggcgcaggcagcgggccgggggcggggccctgagggacggggactgggggtccccgggcgcggcggcggcggccggggccgcggtcctggggcggggccaggcgtcggtggccgtgactggagactgttactgagggcggcccgggcagtaagcagtctagagccaaggtgccggcgcgctgtccgggcggggtgccccggtcgccccggctgccccggctgggggctctgctgctccgcctcccctgcgtctcccgccctgccccgcccggcgctcgcgaccaggcacgcggcccctgacgtcagagggccgtgacgtcaaagatgtcccagagggggcacttccggcgggggcgtgggggcggggcgggacctgggaggccccgcccccccggtcctgagaggacagctccgctcgcagaggcgggaagccgtgggcgccgcgggacccgctggacgggacctgccgggaaggggcgcccgacgccatgcggggcgggggtcccaggagggccggggaagcgggggtgggcgtccgtctctcgcctgcacccccgctcagccggcccgggcagcgaggctgagtcaccgcgccgcagggagggagaggagggggcgcgtctcctggggcgccagcaccttcgcctcactttcctgggagaatggcgcaggagccccaagaaagccgggggggggtctccgaggtcggtcctccactcgatgctcctccgaagtagctgcgtgtccatcgggcgccggcaggtgctgcgcgggctcgtgtcgtctctggccccggctccgcagccgcgaggggaccccggtgccccccgtccgcccccatccccaccccggaggggccgccccacccgccgcctgcccgtcccctcctcgtcctcccgtccgtgtccgcacatctgtccctccgcggctggtccgtcccgcttacctggcgggccgcgtcgccactgcccggtcgcctcccgcagcctggccggcgcggcggcttttataggcgcgcgtagtactcgtgcggcggctcattcatgcggccgcggctcctacacactgacgcgctgccgacgtcagcggggaatttaggaaatgggaaaaggggctatttatagtggcgaggcggggggtggggaccgaggcgaccgggaggggaggagggggcgcggaagcggcggcggggtagggggagccgcgcccctgcccagccgacaaggggttaactttccggaaccgcgggcctggggccggggaggcggcgcggaggggcgcggcgggcccttcgagcttattcacgctctccttccggagccccgcggctcctgggggtcttcacgtggcagccccttccccctcctcagttcctggacctgacgtttctgccgtcacaccccgcaaggccactgcggtgtcgccaccctctcgtcctgcagggtgggcaggagaggaagctggactcccgtgggggcctggggcgcagcgagggctgtggcgtcgggggccgggagaagaagagtaggggagcccaaagtagcccaggagtctttagcggaggaacctgggcctgggagggaaggcccagcggggattcaggtaccacccaggagctggagacccgagggacggcagagaagttggggaaggtgggccaacctccccagaaatgatgagcaacgggatcctctatgagggagctgggggaacgcgccagaggtaggggtgagaggaatgggcagcctcagcaagggagagaggaaaggctgtcagtgccacgctccagagcctggcatccaggacccaccttcggaccatttgtggcacgatggacgctcccagagctcacgttagggtaatagagagtgaaggagaccagcagcttggccaagaggggcccccaggggatgaggaggacggtttcctggagaagttaatgttcccggagaccagaattggcagggagagcccatgacttgtggggcagttcccctggttgggagcggggaaatgcatggtcctggcccagcctggctccatcgagatggaggaagggtctaaatgagaggagtgtgttcagacgaggagctggaccaggatggggagggctgtgcaaggcatggccggaagagcggggcagggagagaaaggtcgaagagtgaagtgcacaggagggcaaggcggtcctcaccctgcctgggctggggcagggctgtgagaccctcccttacagaagcaatgagggcttgaggagggggttaggggcctgggctggggcagggctgtgagaccctcccttacagaagcaatgagggcttgaggagggggttaggggcctgggctggggcagggctgtgagaccctcccttacagaagcaatgagggcttgaggatggggttaggggcctgggctggggcagggctgtgagaccctcccttacagaagcaatgagggcttgaggagggggttaggggcctgggctggggcagggctgtgagaccctcccttacagaagcaatgagggcttgaggagggggttaggggcctgggctggggcagggctgtgagaccctcccttacagaagcaatgagggcttgaggagggggttaggggcctgggctggggcagggctgtgagaccctcccttacagaagcaatgagggcttgaggatggggttaggggcctgggctggggcagggctgtgagaccctcccttacagaagcaatgagggcttgaggatggggttaggggcctgggctggggcagggctgtgagaccctcccttacagaagcaatgagggcttgaggatggggttaggggcctgggctggggcagggctgtgagaccctcccttacagaagcaatgagggcttgaggatggggttaggggcagtaagttaacttggggagcggatgtgggggaacgctgaagaataaagactgtgggcacagcagacccctggggcaggttagcaatgcacagactccactgcacaagatacatggggcggaggggctctttggaagtcgggggtgggggatctgactctatcaaaaagagaaaagataaaagagatggggtcagagaggccctgcatagtctggatttggcctactagagctccagttttcttgccgctagcctttgttccagggattctgttattcacaaatgccttcctgctcggtagaagaactcctattcatccgtcaaagcccagctctaggagcacttatgaggagcctctccacctcccctcaacactccgtaacttccacctcaggccgcagcacgtccctcgggcgagatgtcggggtccgccttccctagagaccggcagctccggaggcctccgttttcctctttgggacctcactgcttctaaagtgaggatgctatggggagacatgggagagggagtgggtaagatggatccagaacatggggcggactcaggcagcggcgggaatcaggcggactcgtttggaccgaagcctccgccaggcaccgaagccgtgaagtcgcctgcgcagcaaagggagcctccggggggcgcccgagaccttggtgtcgctcgggggccgctggtagccgcgcccgctgcccctcgcccggtgactcagccggtacctctggcggggccatgggggccagaggacagcgcggggggcggcgagcgcggttgctaagctctccaaggcctcggagggacaggatctgggcgcacctcaccggttgccatggtaacgcagcgccccagcccctcgcgctccgcggtggagggaggcgcagccaatcggaagcggcggagttctcggggaccccccccccccccgctccacgccgtgtgtgggcgggggtcaggaggtgcggggcggaggcggagcgtgggccgcggagatccggcgttcgcaggaggcttggtgcgcggcggggctgcacggggccacttccggagtagtactgcgagcagcggcgcgacagtgcggggtcccctttctcccagaagagacgtcacccacacaaacctgaccttcacgtggggcgcgggaccttgcggggtcccagccgcaggcgcccctgttgtttccttcgggcgggtgggttggagaagaagtccacgcgggattcttcaaaacggcgtacagggggattctagggccccatggttacttctttggaccccccggaggcgctgtccagccacttccagtcgccctgatgactcgtcgtgggttcctttaggagacccgaaagttcagggcgggctgtgtgggtaacacctctgcccaggttcccggagggccctacgtggctgcccctggagtatcccagagcgctagggctgcgggaaggggcgggtgtgcttctggaaacatgagcgcctgttagtatcagtgcctggatagggctggggacaaatcagtttatgccgcgcacaccgaatccatgcgcctgagtgagggtgggtgtgttggggagtgcgtccaagtggacagtgccgtacagtaatgtctacggggagttccaggagagctcggctactcctgcgcaggataacctctcccccaccacccgagtcccgtgctcgcgggcaggacttttccgaactggggctgtgtgcctagaaatacgtacatgggagcgctcagctcaaagccccagggtttctgggactcgcgtgtccggggtcggggtcccaggtgggtacaggtgggagggcgaacctgcgggtagggtgggcccctccccgcgggctcagcatctgtgcgcctccagctcaggtgcgcgggaggaaggcagcggcctgccgcgcagagccctgcgcgcccgcgaggtggcgccatagccgcagcagcgcccgccggcccgggccgctccagataagagtgtgcggaaagcgcggcggggctgagacgcgaccaggacgcggggaggacggaccagcaggacagaccgaccgggggcccggcgggcggagggcagcgcagccacgtcccccctggatccgccgtcagccgggcc

SEQ ID NO: 1902 - DNA, 6000 bp, Homo sapiens
ggcggcgcctgcgttgatcagcaccgcggacagcggcggcgcaggcagcgggccgggggcggggccctgagggacggggactgggggtccccgggcgcggcggcggcggccggggccgcggtcctggggcggggccaggcgtcggtggccgtgactggagactgttactgagggcggcccgggcagtaagcagtctagagccaaggtgccggcgcgctgtccgggcggggtgccccggtcgccccggctgccccggctgggggctctgctgctccgcctcccctgcgtctcccgccctgccccgcccggcgctcgcgaccaggcacgcggcccctgacgtcagagggccgtgacgtcaaagatgtcccagagggggcacttccggcgggggcgtgggggcggggcgggacctgggaggccccgcccccccggtcctgagaggacagctccgctcgcagaggcgggaagccgtgggcgccgcgggacccgctggacgggacctgccgggaaggggcgcccgacgccatgcggggcgggggtcccaggagggccggggaagcgggggtgggcgtccgtctctcgcctgcacccccgctcagccggcccgggcagcgaggctgagtcaccgcgccgcagggagggagaggagggggcgcgtctcctggggcgccagcaccttcgcctcactttcctgggagaatggcgcaggagccccaagaaagccgggggggggtctccgaggtcggtcctccactcgatgctcctccgaagtagctgcgtgtccatcgggcgccggcaggtgctgcgcgggctcgtgtcgtctctggccccggctccgcagccgcgaggggaccccggtgccccccgtccgcccccatccccaccccggaggggccgccccacccgccgcctgcccgtcccctcctcgtcctcccgtccgtgtccgcacatctgtccctccgcggctggtccgtcccgcttacctggcgggccgcgtcgccactgcccggtcgcctcccgcagcctggccggcgcggcggcttttataggcgcgcgtagtactcgtgcggcggctcattcatgcggccgcggctcctacacactgacgcgctgccgacgtcagcggggaatttaggaaatgggaaaaggggctatttatagtggcgaggcggggggtggggaccgaggcgaccgggaggggaggagggggcgcggaagcggcggcggggtagggggagccgcgcccctgcccagccgacaaggggttaactttccggaaccgcgggcctggggccggggaggcggcgcggaggggcgcggcgggcccttcgagcttattcacgctctccttccggagccccgcggctcctgggggtcttcacgtggcagccccttccccctcctcagttcctggacctgacgtttctgccgtcacaccccgcaaggccactgcggtgtcgccaccctctcgtcctgcagggtgggcaggagaggaagctggactcccgtgggggcctggggcgcagcgagggctgtggcgtcgggggccgggagaagaagagtaggggagcccaaagtagcccaggagtctttagcggaggaacctgggcctgggagggaaggcccagcggggattcaggtaccacccaggagctggagacccgagggacggcagagaagttggggaaggtgggccaacctccccagaaatgatgagcaacgggatcctctatgagggagctgggggaacgcgccagaggtaggggtgagaggaatgggcagcctcagcaagggagagaggaaaggctgtcagtgccacgctccagagcctggcatccaggacccaccttcggaccatttgtggcacgatggacgctcccagagctcacgttagggtaatagagagtgaaggagaccagcagcttggccaagaggggcccccaggggatgaggaggacggtttcctggagaagttaatgttcccggagaccagaattggcagggagagcccatgacttgtggggcagttcccctggttgggagcggggaaatgcatggtcctggcccagcctggctccatcgagatggaggaagggtctaaatgagaggagtgtgttcagacgaggagctggaccaggatggggagggctgtgcaaggcatggccggaagagcggggcagggagagaaaggtcgaagagtgaagtgcacaggagggcaaggcggtcctcaccctgcctgggctggggcagggctgtgagaccctcccttacagaagcaatgagggcttgaggagggggttaggggcctgggctggggcagggctgtgagaccctcccttacagaagcaatgagggcttgaggagggggttaggggcctgggctggggcagggctgtgagaccctcccttacagaagcaatgagggcttgaggatggggttaggggcctgggctggggcagggctgtgagaccctcccttacagaagcaatgagggcttgaggagggggttaggggcctgggctggggcagggctgtgagaccctcccttacagaagcaatgagggcttgaggagggggttaggggcctgggctggggcagggctgtgagaccctcccttacagaagcaatgagggcttgaggagggggttaggggcctgggctggggcagggctgtgagaccctcccttacagaagcaatgagggcttgaggatggggttaggggcctgggctggggcagggctgtgagaccctcccttacagaagcaatgagggcttgaggatggggttaggggcctgggctggggcagggctgtgagaccctcccttacagaagcaatgagggcttgaggatggggttaggggcctgggctggggcagggctgtgagaccctcccttacagaagcaatgagggcttgaggatggggttaggggcagtaagttaacttggggagcggatgtgggggaacgctgaagaataaagactgtgggcacagcagacccctggggcaggttagcaatgcacagactccactgcacaagatacatggggcggaggggctctttggaagtcgggggtgggggatctgactctatcaaaaagagaaaagataaaagagatggggtcagagaggccctgcatagtctggatttggcctactagagctccagttttcttgccgctagcctttgttccagggattctgttattcacaaatgccttcctgctcggtagaagaactcctattcatccgtcaaagcccagctctaggagcacttatgaggagcctctccacctcccctcaacactccgtaacttccacctcaggccgcagcacgtccctcgggcgagatgtcggggtccgccttccctagagaccggcagctccggaggcctccgttttcctctttgggacctcactgcttctaaagtgaggatgctatggggagacatgggagagggagtgggtaagatggatccagaacatggggcggactcaggcagcggcgggaatcaggcggactcgtttggaccgaagcctccgccaggcaccgaagccgtgaagtcgcctgcgcagcaaagggagcctccggggggcgcccgagaccttggtgtcgctcgggggccgctggtagccgcgcccgctgcccctcgcccggtgactcagccggtacctctggcggggccatgggggccagaggacagcgcggggggcggcgagcgcggttgctaagctctccaaggcctcggagggacaggatctgggcgcacctcaccggttgccatggtaacgcagcgccccagcccctcgcgctccgcggtggagggaggcgcagccaatcggaagcggcggagttctcggggaccccccccccccccgctccacgccgtgtgtgggcgggggtcaggaggtgcggggcggaggcggagcgtgggccgcggagatccggcgttcgcaggaggcttggtgcgcggcggggctgcacggggccacttccggagtagtactgcgagcagcggcgcgacagtgcggggtcccctttctcccagaagagacgtcacccacacaaacctgaccttcacgtggggcgcgggaccttgcggggtcccagccgcaggcgcccctgttgtttccttcgggcgggtgggttggagaagaagtccacgcgggattcttcaaaacggcgtacagggggattctagggccccatggttacttctttggaccccccggaggcgctgtccagccacttccagtcgccctgatgactcgtcgtgggttcctttaggagacccgaaagttcagggcgggctgtgtgggtaacacctctgcccaggttcccggagggccctacgtggctgcccctggagtatcccagagcgctagggctgcgggaaggggcgggtgtgcttctggaaacatgagcgcctgttagtatcagtgcctggatagggctggggacaaatcagtttatgccgcgcacaccgaatccatgcgcctgagtgagggtgggtgtgttggggagtgcgtccaagtggacagtgccgtacagtaatgtctacggggagttccaggagagctcggctactcctgcgcaggataacctctcccccaccacccgagtcccgtgctcgcgggcaggacttttccgaactggggctgtgtgcctagaaatacgtacatgggagcgctcagctcaaagccccagggtttctgggactcgcgtgtccggggtcggggtcccaggtgggtacaggtgggagggcgaacctgcgggtagggtgggcccctccccgcgggctcagcatctgtgcgcctccagctcaggtgcgcgggaggaaggcagcggcctgccgcgcagagccctgcgcgcccgcgaggtggcgccatagccgcagcagcgcccgccggcccgggccgctccagataagagtgtgcggaaagcgcggcggggctgagacgcgaccaggacgcggggaggacggaccagcaggacagaccgaccgggggcccggcgggcggagggcagcgcagccacgtcccccctggatccgccgtcagccgggcccggggctttcgacatgccccccaggtgggtcctcgagccggggaccgggagggacgggggacccgggacagcccggtcctcgtgcgtcggccgcctcgggtgcatcttctggcgcgggtgccccatcgcggctggcggctggcgttcagggctccgggtgtcgtccctttcggactcaggaccaccgggccgcggctccgcgccgggttcacggcggggtcagcggcccggggccggctctgcccgcacatgggctggagaggcgaggggaagggaagggaaggggagctggcgggcggggctggcaggggcgctgccctggcacagctcggggcctggcagcggcgggtggggcatcggctaagagctgccaccgccgcggggaggggagcccggcccgccgggaccgcaggtaacgggccgcggggccccgcgggccaggaggggaacggggtcgggcgggcgagcagcgggcaggggagctcagggctcggctccgggctctgccgccggatttgggggccgcgaggaagagctgcgagccgagggcctggggccggcgcactcctcccgccctgtctgcagttggaaaacttttccccaagtttggggcggcggagttccgggggagaaggggccgggggagccgcggagggaggcgccgggcccgcgcgtgtagggcccaggccgaggccgggacgcgggtggggcgcaggcccgggtcagggccgcagccggctgtgcgccgtgcccgcccggggcgctgccccctccctcccctgggagctgcgtggctcccccctcccccccacctgcttcctgcctcagcctcctgccccgatataacgccctccccgcgccgggcccggccttcgcgctctgcccgccacggcagccgctgcctccgctccccgcgcggccgccgcccg

SEQ ID NO: 1903 - DNA, 6000 bp, Homo sapiens
cggagggacaggatctgggcgcacctcaccggttgccatggtaacgcagcgccccagcccctcgcgctccgcggtggagggaggcgcagccaatcggaagcggcggagttctcggggaccccccccccccccgctccacgccgtgtgtgggcgggggtcaggaggtgcggggcggaggcggagcgtgggccgcggagatccggcgttcgcaggaggcttggtgcgcggcggggctgcacggggccacttccggagtagtactgcgagcagcggcgcgacagtgcggggtcccctttctcccagaagagacgtcacccacacaaacctgaccttcacgtggggcgcgggaccttgcggggtcccagccgcaggcgcccctgttgtttccttcgggcgggtgggttggagaagaagtccacgcgggattcttcaaaacggcgtacagggggattctagggccccatggttacttctttggaccccccggaggcgctgtccagccacttccagtcgccctgatgactcgtcgtgggttcctttaggagacccgaaagttcagggcgggctgtgtgggtaacacctctgcccaggttcccggagggccctacgtggctgcccctggagtatcccagagcgctagggctgcgggaaggggcgggtgtgcttctggaaacatgagcgcctgttagtatcagtgcctggatagggctggggacaaatcagtttatgccgcgcacaccgaatccatgcgcctgagtgagggtgggtgtgttggggagtgcgtccaagtggacagtgccgtacagtaatgtctacggggagttccaggagagctcggctactcctgcgcaggataacctctcccccaccacccgagtcccgtgctcgcgggcaggacttttccgaactggggctgtgtgcctagaaatacgtacatgggagcgctcagctcaaagccccagggtttctgggactcgcgtgtccggggtcggggtcccaggtgggtacaggtgggagggcgaacctgcgggtagggtgggcccctccccgcgggctcagcatctgtgcgcctccagctcaggtgcgcgggaggaaggcagcggcctgccgcgcagagccctgcgcgcccgcgaggtggcgccatagccgcagcagcgcccgccggcccgggccgctccagataagagtgtgcggaaagcgcggcggggctgagacgcgaccaggacgcggggaggacggaccagcaggacagaccgaccgggggcccggcgggcggagggcagcgcagccacgtcccccctggatccgccgtcagccgggcccggggctttcgacatgccccccaggtgggtcctcgagccggggaccgggagggacgggggacccgggacagcccggtcctcgtgcgtcggccgcctcgggtgcatcttctggcgcgggtgccccatcgcggctggcggctggcgttcagggctccgggtgtcgtccctttcggactcaggaccaccgggccgcggctccgcgccgggttcacggcggggtcagcggcccggggccggctctgcccgcacatgggctggagaggcgaggggaagggaagggaaggggagctggcgggcggggctggcaggggcgctgccctggcacagctcggggcctggcagcggcgggtggggcatcggctaagagctgccaccgccgcggggaggggagcccggcccgccgggaccgcaggtaacgggccgcggggccccgcgggccaggaggggaacggggtcgggcgggcgagcagcgggcaggggagctcagggctcggctccgggctctgccgccggatttgggggccgcgaggaagagctgcgagccgagggcctggggccggcgcactcctcccgccctgtctgcagttggaaaacttttccccaagtttggggcggcggagttccgggggagaaggggccgggggagccgcggagggaggcgccgggcccgcgcgtgtagggcccaggccgaggccgggacgcgggtggggcgcaggcccgggtcagggccgcagccggctgtgcgccgtgcccgcccggggcgctgccccctccctcccctgggagctgcgtggctcccccctcccccccacctgcttcctgcctcagcctcctgccccgatataacgccctccccgcgccgggcccggccttcgcgctctgcccgccacggcagccgctgcctccgctccccgcgcggccgccgcccgggccccgaccgagggttgacagcccccggccagggcggcgccagggcgggcaccgcgctcccctcctccgtatcacttcccccaactggggcaacttctcccgaggcgggaggcgctggttcctcggctccctttctccctacttgggtaaagttctccgccctgaatgacttttcctgaagcggacattttacttaaatcgggtaactgtctccaaaagggtcactgcgcctgaacagttttcttctcggaagccccagcacccagccaggtgccctggggcgtgcaggccgccctggcctcccctccaccggcggccgctcacctcctgctccttctcctggtccgggcgggccggcctgggctcccactccagagggcagccggtccttcgccggtgcccaggccgcagggctgatgcccccgctcagctgagggaaggggaagtggaggggagaagtgccgggctggggccaggcggccagggcgccgcacggctctcacccggccggtgtgtgtccccgcaggagagtgtgctgggcagacgatgctggacacgatggaggcgcccggccactccaggcagctgctgctgcagctcaacaaccagcgcaccaagggcttcttgtgcgacgtgatcatcgtggtgcagaacgccctcttccgcgcgcacaagaacgtgctggcggccagcagcgcctacctcaagtccctggtggtgcatgacaacctgctcaacctggaccatgacatggtgagcccggccgtgttccgcctggtgctggacttcatctacaccggccgcctggctgacggcgcagaggcggctgcggccgcggccgtggccccgggggctgagccgagcctgggcgccgtgctggccgccgccagctacctgcagatccccgacctcgtggcgctgtgcaagaaacgcctcaagcgccacggcaagtactgccacctgcggggcggcggcggcggcggcggcggctacgcgccctatggtcggccgggccggggcctgcgggccgccacgccggtcatccaggcctgctacccgtccccagtcgggcctccgccgccgcctgccgcggagccgccctcgggcccagaggccgcggtcaacacgcactgcgccgagctgtacgcgtcgggacccggcccggccgccgcactctgtgcctcggagcgccgctgctcccctctttgtggcctggacctgtccaagaagagcccgccgggctccgcggcgccagagcggccgctggctgagcgcgagctgcccccgcgcccggacagccctcccagcgccggccccgccgcctacaaggagccgcctctcgccctgccgtcgctgccgccgctgcccttccagaagctggaggaggccgcaccgccttccgacccatttcgcggcggcagcggcagcccgggacccgagccccccggccgccccgacgggcctagtctcctctatcgctggatgaagcacgagccgggcctgggtagctatggcgacgagctgggccgggagcgcggctcccccagcgagcgctgcgaagagcgtggtggggacgcggccgtctcgcccggggggcccccgctcggcctggcgccgccgccgcgctaccctggcagcctggacgggcccggcgcgggcggcgacggcgacgactacaagagcagcagcgaggagaccggtagcagcgaggaccccagcccgcctggcggccacctcgagggctacccatgcccgcacctggcctatggcgagcccgagagcttcggtgacaacctgtacgtgtgcattccgtgcggcaagggcttccccagctctgagcagctgaacgcgcacgtggaggctcacgtggaggaggaggaagcgctgtacggcagggccgaggcggccgaagtggccgctggggccgccggcctagggcccccttttggaggcggcggggacaaggtcgccggggctccgggtggcctgggagagctgctgcggccctaccgctgcgcgtcgtgcgacaagagctacaaggacccggccacgctgcggcagcacgagaagacgcactggctgacccggccctacccatgcaccatctgcgggaagaagttcacgcagcgtgggaccatgacgcgccacatgcgcagccacctgggcctcaagcccttcgcgtgcgacgcgtgcggcatgcggttcacgcgccagtaccgcctcacggagcacatgcgcatccactcgggcgagaagccctacgagtgccaggtgtgcggcggcaagttcgcacagcaacgcaacctcatcagccacatgaagatgcacgccgtggggggcgcggccggcgcggccggggcgctggcgggcttgggggggctccccggcgtccccggccccgacggcaagggcaagctcgacttccccgagggcgtctttgctgtggctcgcctcacggccgagcagctgagcctgaagcagcaggacaaggcggccgcggccgagctgctggcgcagaccacgcacttcctgcacgaccccaaggtggcgctggagagcctctacccgctggccaagttcacggccgagctgggcctcagccccgacaaggcggccgaggtgctgagccagggcgctcacctggcggccgggcccgacggccggaccatcgaccgtttctctcccacctagagcgcccctcgccagcccgctctgtcgctgctgcgcggccctggcccgcaccccagggagcggcgggggcggcgcgcagggcccactgtgcccgggacaaccgcagcgtcgccacagtggcggctccacctctcggcggcctcacctggcctcactgcttcgtgccttagctcgggggtcgggggagaaccccgggacgggggtgggatggggtaagggaaatttatatttttgatatcagctttgaccaaaggagaccccaggcccctcccgcctcttcctgtggttcgtcggccccctcccccggctccgcgctgctcttagagggggaggggtgtcactgtcggggcactcctagccctacctccggcccttgcgaccacacccattctcactgtgaatctccccgctggggtcggagcgtcgggcagagttggggagtggggaggggactgagccggccggagggccccccgcacccccgctcccacccaccccgggactgataatgtgaagttcctcattttgcacaagtggcactagccccagggccaacccttccttcctcagtcaccaagggcggggagttctggagtcggaaggcgaagagcctaccaccaggtctcccactcccgcggtgccctcccttcccttccctgcggccccggaccatatttattgcatgcgccccggcggccccccatcccgagcccaggctgggctgggctggaacgcggtctctttagctccctcctcttcgtttgtatatttcctaccttgtacacaggctcttccagagccgcttccattttctatactcgaaccaaacagcaataaagcagtaaccaaggaccccgaccccgctgctctcttctgcccctgcacaaggacctggatgggctgcgcccgctgggtggaggagccagaaagggccaccctcacacaggtgcagaggcttggacctgcctccctccccagtcccagaaacagatcagcaagaggtcaggtatgtttcataactaaaaatttattaaggaaacaaaaccagtgctgcaaa

SEQ ID NO: 1904 - DNA, 6000 bp, Homo sapiens
gtaaatagttcttgtgctgtgttggtttttaaatttgtattattttttcttgtatattttccatttttttttcctgaatatttttgatccacggttagttgcctccatgggtgcggacccacggacacggaggctgcaccttctgaaatgagcatggcggcgccctctgggtcctcgtgtcgtcctgtctctggtgctgcatccagcacggtggcgaacagcagaactaatcttttgcaagttatcacagtggagtggagttccgctctgtttgcttttgccccgctctggcttaccagaggtcccctggccttggccacagcatacctagcctagtgcttggcacctcaggcacacaataaatatttatgaaatggatcttctctggtatgtcttgagtgtactagtcttctgttttttcctcttcatcctgcagccagcttcctcccatgggtcttgttttaatgatggtatgtgaaaagctccttagctgcttgcaaaagatgagacatcaggcttgaagggttgggatttcctgtgaacatctgtactttcggcttcacgccctttcccccatctcatgactcaggctttgtaggagtcagggcactgattttcatagctcttggagttgatactttgttaggtgagtggtgggggataggaagacagttccactaaggggatgtctctggctcagcatattaaaaaattggggaattggtgcttcttattgtggttggtgaaaaaaagaataaaagattaaaaaattggaggacataatggaatttgaactgggaggtggggtgcacaagactcggggaggaagactgaaaacggaaaccctctcgtgagaaactcacaatgatggacagcccagcttttctcctgctccaaggtactaagcacccagaagccatgaagaaacttaaggaacagccgggcgcggtggctcacgcctgtcatcccagccctttgggaggccaagacaggcagatcacttgaggtcaggagtttgagaccagcctggccaacatggtgaaaccccgtctctactaaaaatacaaaaattagccgggcgtggtggtgcgtgcttgtaatcccagctactccggaggctgaggcaggagaatcacttgaacctgggaggcagaagttgcagtgagccaagatcacaccactgcactccagcctgggcaacagagggagactctatctcaaaaaagaaaaaaagaaaaagaaacttaaggaacacctttttagagattgctggcctttggataattccccaaacctgctaacctttctgctgaaaccaaaaggacttatttctctttctcttgagtgagtacatttgccagcttctatcctggctccacccccttggaacaggaagctggggctaaaatattaaacagccctcctattcattcccctcttctttcatgccctcacatcgccatttataggtatctcccacccccactgtccattcctcaactggggaaagcttggttgatgaggtattgtttttggccattttcaggctcctgtaggcaacaataggtccagaaacagcctcccccaccctttttttttttttttttttttttttttggagacggagtctctctctgtggcccaggctggagtgcagtggtgtcatctcagctcactgcaacctccacctcccgggttcaagtgactctcctgccttaaccacccccagtagctgggattacaggcgcctgccaccacgcccagctaattttcttttttcttcctttttttttttttttttttagtagagacagggtttcaccacaccacgttggccaggattgtctcgaactccggacctcaagtgatccatgcacctcggcctcccaaagtgctgggattacaggcgtgagccaccgctcctggcctgcagcctcccttctaaacccttgtttttgtctaacatcccctggctgctgtccccacatgacccaaataaacagatgatcatgtgaagccagtaaggctgtttgttttaaatagcaaacatctccactaagctctggagcagatggagtattgggggcaatggagaggctggcattcaaatctgtgttcactctactcttaccttctgcttcctcacccctgaagcgaacagtgtcttaagaacactgcctttcagagaggtgcctacttactggtatagagttggccagtgacaaagaagagtgtaaaaaattaaacctcagccttcagcagaaactccagggctgtatgagtgcatggccacctgaggagagcaggaagggacagctggatggagcactgtgcaccacggtgctgaccccacacaaaataagaacttgcccaaaagcattaactcaggtcacaatcatgtatagatgcagctccacttaggacgggtttcaccagccataatcccatcctaaattgagcgcatgctagattatcacttttacaaccattgcaaacttggaaagtcctgtgtcaaaccatcacaagtcagggactgtctgtatactgttgagagtccctgttccactgccgcctatatattatattgcctttgaattttccattttctctagttgtgcagaatgggccaggcccaaccatactggtggcaagtggcagacaccttaaaggaagcaatgttggagccagcacagatctggccctcccagcaaaggggcactcatcccatggagaagaactgggctgttccgttctaatccgcctttgctccagcttcatcataagcaaaatcagtggtacctacctggacatttgtgtgtgtggcgacttctgcatgctcagctctagatgctggggcattaaatgtgaaaagatcagaggcctctgtagactagtactggcaaacagcccccttcctctggttcacgaagttcttgatttccaggatctgtgcagatttttcccccctaggatgcatgacgatgccctcaaaggaaaggagtaaagccagcaaacattttgcctgctttctatgtttctagctgtcttccaaccagtccctaaaataggaacgctccgagggtgccatgtgatggaatgtattggcagggcggcctgcctctcagcctcatgaaggtttgctttctggttgtgtgtgatgttgaagccgcggctgaggagttctaaacccactggcactgactgcccccccacttcttggaccggttagcaaagaatggagcctggggccagaactgaggggtactccccctgcactggcacagcacaatcgacatgctccgggacgctccaaataagctttcagccgcctggggtctatcgctgccgctgtaccagtggggttcgtgtggcttccaccgaggaagcagaacagcggagttgggtctcaggtgaagatttttgttgccccaatcacagtgtgttaagtggtcagggttgctattcctccctggcatttttctaattgggggccctcctccagaactggcttcagagtcgtccctggggtcagggaagagtgcccccgcttcgggagagaggagcaggtggaatacggaacgaccttaggcgagtccttggccgtcacggcctcagtttccttatgtgtgaagtgagaggatttaagggcagccggcctcaaagagctaactctccgattgcacccgagctcccctaaacactcgagcccggaagacgcgggcgggcgggcgggcgacggggggtccctccctctggggagcgcggttccagccggccgcagcggaccccgcccccgcgccccgcccaccgccggtcgccaggcgcggggagggccgggcttccgccctccacgttgttgttcccgatttgggccacgccccccggtctgggctgcgggcgcttcgtgttccccgccctggccccggccccagaggaaagggtggcccatggggtggcacagtccgtatctccacccacatcgaatacgcgtggacaaagactggagttcaggggaaggaaagataaaggcctggttttaaatggaaggtggtgaaaaggaatggagaggccagggcacgactgcgggattccccttacggcatcccaccctgggttcgcccagtggccccatccgcacccgcgaatgtgacctgcagacactggccctttaaaccgaaggctggcggcgcggggtgtccatgtggagctgctccatgccgtgttgtcctgcccgcccattggctcgcggcccggtgacgtcccctaataggatgcgaacgcactgcggggggaggaacggagacaaaacgcggagccggactgccgctccgctccctccgctggttctcttgacagtctccagtcgccggcagctccgcccaggggcggatcccgggggaattgcgacagcccggcgattgcgggatttaggtcgcgagtgggtggagcgtggagacccagggtcaggccagtctctgccattcccaaggtttccctgacccggaatatcctggttggaactctgttaaatcttgaattgttcaccctaccctccctccagcaggacagatttcgtcgtgaacgacccaaacgcaccgccccggcccaacttgtggcttgcagccggggcggggccagcaggaaagcggaaccgcggcgcgcacaccccgctcggacctctccctccctgcccgggccacgtgtgcgcgcgccggatccggggggcggggccagcagcgcaggacccgcccctcccttcgcgagacgccgcggccctgcgggcgggggctccggtccgggctttggctgtggccccggtgtagtagcgggggcggcggccgggggcagcgcggctccttcccttgttgtgtgtgtcggtgcctcctcgccatcttgttgcaaagccctttcttgtcggcgggactcccgggggccgcggggcgggaggcatcggaagggaggtagagagggaggggaagaagggaggcagtgccgccttttttttttttttgcatcccatttttttaaatttgcaattttatattttgcaaatattttgagagacattgatttttctccccgtgctcccccgttcttccctgcggagtgcgctgcgccgcccagccctgtcgccccccggaggtgatccctccctcctgcctgcccgccagcctgacctgtgcccggctcgcgggccgcagcctcggccccggcgcgcccccggcagctctcggcgcgatgagcatagagacgctactggaggcggcccgcttcctggaatggcaagcgcagcaacaacagagagcacgtggtgagcggccgggctgggcccctggggcactggggaaggggaagcgagtgaccccggtccccgaacccacgcgaaaccgcggacagggccccctcccgggcggcctgcggagcctggcagcgcacggctccccgcgagagccgccgcctggggaggggtgatgtgggcagtgaaattaattaatgaattcattaacatgctgcgagggacctggctcctgcgggcgccaccccggctgcgtggcacccctgtgccccttctgtggtgggctgcttttgcgtgggccagcggagccctcggtggcactgaggatgtgtgagccggggggtggggtgaggaatggtgttgcgtgggggtggcaggctcgcgtgtgcgtgcgtgtgtgcacgggggatgtgtgatgtgagcctcgggaagagcagatgaacggacgtgtacacgggcgtgtgtatagcacacgagtgggcgtgtgtgtaacggagtgggggtggggactactctacgcggagcagctcttcggcttccctggccccgtggggagggtgcggggggcgctcccggcagatctacgcgccgcttggggcggaggcggcctttgcagaatgaaatgacatcgcgtgtcttatgatcctggccagccccgcctgaccccgcctcccagagctgggctgggctgcgcgtccggggtt

SEQ ID NO: 1905 - DNA, 6000 bp, Homo sapiens
gaggacagttaatttctcaaaacaacactttaacatttgcccttatcataaacagacttttgctctggagatacctttagaagactttttgtccttttcccaatagaagtatttttggagtgtttcttccagtcagcttatttgcagaattgtttaaactgacactaattttactgcagcaattgaaataaatgtttccaggctggacgtggtggctcacgcctgtaatcccagcactttgagaggctgaggtgggcagatcacctgaggtcaggagttcgagaccagcctggccaacgtggtgaaaccccatctctactaaaaatacaaaacttagctgggcatggtgacgggcgcctgtaatctcagcttctcaggaggctgaggcaggagaatcgcttcacccgggaggcagaggatgcagtgaactgagattgtgccattgcactccaggctgggtgacacagtgagagtccgtctcaataaataaatcaataaataaatgtttatgtttccattttgaaaatgtctactggaaaaataaagatctgcaattaaaatgaacagggagattcttggattgtggtaagtaaaatggatgtttatacttattttttttcaagaaacatcatctgaaatgtccattattaaacgtttcctggatggatatagtaagttctgtataagtccttacaaattctgattgatagcacagatgtcctaattctacattttcaatagacaagtgtttattaagatagatctatcaggccgggcgtggtggctcacgcctgtaatcctagcactttgggaggctgaggtaggtggattgcttgagctcaggagttcgagaccagcctgggcaacatggtaaaaccccgtctctactcaaatacaaaaaaaaattagccgggcgtgatagcgcacgcctgtaatcccagctactatggaggctgagacaggagaatcgcttgaacctgggaggcagaggttgcagtgagccgagatcatgccattgcactccagcctgggcgacagagtgagactccatctcaaaaaaaaaaaaaaaaaaaaaagatagatctatcatcctagcagctaactgaagggaaggtgcatagaaccgtaacacatcacttcacatcaaggtaagcacgtaaccgttttctgttcagaaaaatcataatccagggagaaagttttataccttaccacaaagggagtttattgttttttgaaggaccactatagaaataaaatttgatataaatttagtgcataattacatcatatagattttaaatctttctaaatatgagtctgtgagctcaaggtttataggagttagtgctacctatttgtatgaagtcagtgtttataaaagtgtttctgatctctttctgggcaattttatttacttttagagcattcgtttaaaaaataaggaactgatttactcagctaattaaatattaagtagcatgatatcagaccataataaatattttaaaaggtaaaaatgaagggagggtggattcttagaacaaagggatgctaatttattgcatgtttattgactgttattgaacccaagcaatagcacagaccaaagctctatgcctcattttattgtccttatctgaaaatcccagaaatgtaaaactggacaagactttctaagacaatttgattcatctctggcaaatcttcatgaggcaaaaacccaaggccttcatgcaattggctcatgttgcctttgaacacttaggggatagagacaatctttcttttttactcattttacttatttaatttaactttattttgagacagggtcttgctctgtcacccaggctggagtgcagtggtgtgatctcggttcactgcagcctccacctcctgggctcaaacgatcctcccatctcagcctcccaatgggtggaaccacaggcccaaaccaccacatctggctaatttctctatttttccgtagagacggggtttccctgtcttgcccaagctgctctccaactcctgggctcaagagattctcccaccttggcaccccaaagtgctgggattacagccttgaacgactgatcccagcctatttttagagatgggggtccagtctgcccaggatacagtgcagtagcatgaccatgattcactgcagcctggacctcctgggctcaagcgatccgcctgcctctgcctcctgggtagctaggactccaggcatgcgccaccacacccagctaattaaaagtttttgtttttgtttgtttttttgagacagactctggctttgttacctaggctggagtgcagtggcatgatcttgactcactgcaacctccgcctcccggcttcaagcgattctcatgcctcagtcccgaaagtagctgggattacaggcacacaccaccatgcccggctaatttttgtgtttttagtagagatggcatttcgccatgttgaccaggccggtctcgaaatcctgacctcaagtgatccacctgtctgagcctcccaaagtgttgggattgcaggcgtgagtccccgcgcccggctgtttttcttttctttttttgtttttagagatgagatcttgctttgttgccctggctggtctggatctccagggcttgagcaatcctcccatctcatcctccccagtagctgggactacaggcatgtgccaccacacttagctaatttttaaaatttttttgtagagatgaggtttcactatgttgcacctgctggtctccaactccttggctcaggtgatccacggcccccctcccaacctccccatccctgccttggcctcccaaattgctgggattacaggggttagcaacctgtgcctggcagagataacctttcttgaacaaaggaaacttgttttggtatcaagcaacagtaatgtttacatgagttacctataagtccccacgaaactaagatactttacacaggctgcacctcctctgtaattctcacaaaagccgggttagttattaggtgtcttttattgagaaactgaggccaaagagaggtatggtaatttgccccaggtcgcgcttctggcaagtgcggggtccaggatttacacctaagttgtctctttcgttaactctgctgcttctcaaatgcagtatatatatatatatttacctacataaagtgacgcaataaaatcagtacacataagcttaagcctgtttcaagaaaaaagcttccttggacaatacaaatgaatgataagataatctcatttaaacctgttattaaaataatagcccatattgaattattcagaaccccaaatctcgctttttaaaaatcaagggtcggctgagcacggtggctcacgcctgtaatcccagcactttgggaggcagaggcgggcggatcacgaggtcaagggatcgagaccatccgggccaacatgatgaaaccccgtctctactaaaaataccaaaaaaattagccgggcgtggtggtgggcgcctgtggtcccagctactcgggaggctgaggcaggagaatggcgtgaacccgggaggcggagcctgcagtgagtggagattgcaccactgcactccagcctgggcgacagagcgagactccatctcaaaaacaaaaacaaaaacaaaaaacaaaaattagctgggcgtggtggcaagtgcctgtactcccagctactcgggaggctgatgcagagaatcgcttgaactcgggaggcggaggttgcagtgagccgagatcgcgccactgcactccagcctgggcgacacagcgagactccgtctcaaaaaaaaaaaaaaaaaaaaaaggaaaagaaaagaaaaatcataggtatctgtgtggaataaattaactacaaatccccaagacgactcttgtcatcaatatttcaatccataatttagcaaacacacacagacatcccttatagggatacagttccaggcctttctttgggcatccgtttcgagacctggagagactctgatgtctgtgtgtgactaaggagaagaatagctgaatcatatccaaaagcgagtcctcccaattaagaatctataatacaaatcaagacaatgacagcattccatctgccttttaacctcaacagctcctcctcccaagccagccagcctactcccctccctcattcccccccaaactgggaaatcatctcggaggccggaggcagaaaggggcggtaggtggccgggccccgctgcctctcgcgcctcccggggcccgccacacacggtgccaacgggacgccgcggtcggccgcatgagcgcaaaagcagggcagcgaggtgagcagagccagagttcagaaggggccgcaagtcagacgaggggctgggaaaaaagagcctctcccaaggttaacagaagcgtgcggagcgtgagaagcagcacctcgcacgcagactcgcccgccggccgggtggcaccgctcagccgcccgcccgctagaaggcagcgcggccccggcccggcccagcccggcgcatgcgccgcagcccctcctccgctcccggcgcccgcccctccctcttcctggcgggtctggggcggcggcggcggcggcggcggcggcgcggtgacgtcagggcgttggggcagctcctgtgacagacggagctggagcggcggggcggcggcggagtccggcggccgggagagcgagtgagcgagcggaggagcagcgacacgggagtctagggagcgagaaggagaaggaggggagcgctcgggcgcgagcgagagaaaccgcgagcgccgagcttggactcgagccccggaacggctgaggagcccgcccgctcccctcccctccccctccccgggcccgggcccagcgcgccatcctcccccctccttccctccctccctccttcctccctcccctctccctccccctcccccgccggtggatgggagtgaaggacggaagaggccctgcggaggcggcggtgcagcgctccggtaaggcggcgcgggtctgcgccctcccctctgtctcctccaccgcgcccgggcggctgcaggccggacccggcggcctgacgatgtggctgcgccggtcccctccctcccattctcccctccccctgcctccgccgccgcctcctccttcttcttctctcctcgctctcaaaatggcggccgcgacggccgttgagtgagagacccggaggagggggactgtccggggagggcgctgccctcgctcctctcctcccgggcccggctttgggggctgccggcgcctctgcgacccccgccccgcggccctccccaagaagggatcgccctcctccctcggtgacttagcaagaaaagtattcttgggttggaagggcgtggggaccaggtagctctctgatcttggggaaaaggatcggccctgctctccccggccgcggagacgagcaccgcagtccccaccccaccctcagttatcggctcggggaccggctcagccccgcgccgccggggcactcatagggccttccaggcattccgtccccgactggtccttaagatggggttgaccagcggagggtggcccaccgtctccctggcccccggtgcggcggtccagcctcagcacccgccgaggagaggcagcccggcccaccgagcaatccgcagcatccacccaccgaatctggcaggattttctttctgccaccggctcctcggtcgggagttgccttttgatgctgttaacattcagcttcgaggctccctgccattccccttcgtctaatctcatctccctgcccctttgggaaacgcagtgcctctgcatatttaccctctttagcctcccacatgagaaaatgcctttgaggtggtcgacacattttgactctgcacctctaaacgtagcagtagaggggaagaggttttccgtatttagtaggagagagcaaggtaccatagctttatatgttatgctac

SEQ ID NO: 1906 - DNA, 6000 bp, Homo sapiens
ggaagtcagctaaagtgcttaaaatcgaatgctggcattttcataaacttgtaatagtttagaaaataatttcattcgttatgtttgtaatagtttgatatttaagcctaggctgtgtctagcttaggatctgtttgctcatggataaaagtccttcatctcagttttgattttaaccattttcttttttatttttcttaaccatttttatttttttaacctctttgtgtgtgtgtgtgtgtgtgtgtgtgtgtgtgtgtgtgtgtgtgtgacggagtttcactctgtcatccaggctggagtgcagtgacgcaatcttggctcaccgaaacctttgcctcccagattcaagcaattctcctgcctcagcctcccaagtagctgggattacaggctcctgccaccatacccggctaattttttgtatttttagtagagatggggtttcaccatgttggccaggctgctcttgaactcctgtcctcaagtgatctgccctcctgggcctcccaaagtgctggaattacatgcgtaggccactgcgcccagccttctctgattctttatagtattactggttttggtctactccattttacttctgtgtgaatttctctttaattctagtgactggtttcaaagaggtgaagattccatccttaataaagctgatgaggccaggtacagtggctaacgcctgtaatcccaacactttgggaggccaaggtgggcggatcacctgaggtcaggagtttgagaagaccagcctgaccaacatggagaaaccccgtctctactaaaaatacaaaattagctgggcatcgtggcacctgcctgtaatcccagctactctggaggctgatgcaggagaatcgcttgaacctgggagacagaggttgtggtgagccaagatcacgccattgcaccccagcctgggcaataagagtgaaactctgtctctaaataaagaaagaaagagccaagcgtggtggcgggcacctgtagtcccagctactggggaggctgaggcaggagaatggtgtgaacccaggaggcagagcttgtcgtgagtggagatcgcaccactgcactccagcctgggcaacagagcaaaaaataaaataaaataaagctgatgaaaatcaactctaggtcaacaactgagattagtagcaagccccagaagcaccctttaggctgttagaaccaagagttttgtgggtttttgttttgttttgtttgttgtttttttgagagagggtcttgctctgataggcaggctggaatgcaggggctcactcacagcttgctgcaacctcaacctgccaggctcaagccattctcccgcctcagcctcccaaagtgctgggattacaggtgtgagccactgccacctgctgaggttcttcagtctttacttaacttattacttttagtaacggtagtacaccttgctgaagttaaaggttctacattaactggatcagattgttggcttaaatattgagaggcagggcatcaaaggtggtagtgctaaaattctctggattttttttttttttgagacagagtttcactctgtttcccaggctggagtgcagtggtgcagtctcagctcactgcaacctttgcctcccgggttcaagcaattctgcgtcagtcttccaagtagctgggactacaggcgcataccaccacacctggctaatttttgtatttttagtagagatggagtttcaccatgttggccaggctggtctcgagctcccgacctcgtgatgcgcccacctcgggctcccaaagtgctgagattacaggcgtgagccaccgctcccagcctctggtcttgaacttctgaccttgtgatttgcccgcctcggcctcccaaagtgctgggattacagacgtgagccactgcgctggcctaaccctgtaattattatacgttgatttttggcatgctcataattacctggaacataaagtttttgctggtaattccctgttatctttctttgctgatttgttttaaacataccattgaattaaagccagtaatcccaccagttatacaatactactggagtgtgttttgttttgtattttgagacgtagtttcgctgttgttgcctaggctggagtgcagtggcacgaactgggctcaccacagcctccacctcccaggttcaagtgattctcctgcctcagcttcccaagtaggtgggattacaggcatgtgccaccacacctggccttttttttttttttttgagaaggaatcttgctctgttgcccaggctagagtgcagtgatgcggtcttggctcactgcaatctccgcctcccgggttcaagcaattcttctgccttggcctcccgagtagctgggattacaggggcttgccaccacgccagctaatttttgtatttttagtggagacggggtttcaccatgttggccaggctggtctccaactcctgactttgtgatatatatctatatctatctatcgctctctctctctctctctctctctctctttctctctccatctataaagcccaaaacatttttggtcccgagcattttgtataaagggtactcaaactgtagaaggcaaacatgaaaaggctaattcagcttctctaaccttcaagttctaattctaaatgaatgtctcattctacgacagtacactaagtttatactgtatgattgctttttttcacccactccaatggttcaaagttatttctaatatgaaaatactttagttttctcaaaacttttctctgcaaaactaaattccagctgtcagcccttgagtgtataacaagtggtaaagaaagactaaatgtaaatgttagcaaaattgatggttgctgtcacagagccatagcttgatctatagagtgcctacagcttgtgaggtaagcaacacatttgaaacttataaatatgaagtttctcttctgatgttaaaaaaaagaaagaaaaacttataactaagaatataatattatggatgtagtatgacaggggctaaaagttctggaggctttgcgggggtgtcctttttaatgaaatacttgtatgatttgaaagggaatactcttgaaaagagtatcttcagggttaatgagattttaaataaattctatttcttcagaatagaaatgaggtcttttttttaggagtcatttgaatttttctttcagaaatcgagctatagcagattatcttcgttcaaatggctatgaagaggcatattcagtttttaaaaaggaagctgaattagatgtggtatgttttactttttacaattcaaagtatagttaatgagtggattttcactcaagtatctgtagttaacagttacgcacaattttgtcatttgttattgtggtctacttggtactgaacttgattttcactccttttttttttattttttattttaatttttgagatggagtctcactttgtctcccaggctggagtgcagtggcgtgatctcggctcactgcaacctctgcctcccagattcaagcgattctcctacttcagccttccgagtagctgggattacaggcacgcaccaccacacccagctaatttttgtatttttagtagagacggggtctcgccatgttggccaggctggtctcaaactccagacctcaggtgatccacccgccttagcttcccaaagtgctgggattacaggtgagccaccatgcccagccactccctttttttataatcagatttttagtaatatttggacttaaagatgaatgatctttgtcttgaggatcatagttaagccattttttaaaaattctaaatttattttctctagaatgaagaattagataaaaagtatgctggtcttttggaaaaaaaatggacatctgttattagattacaaaagaaggtaactaagtcttttttctttaaaattagttgtattcagttatataaactttctgaaaataacattcttctgcattaattaataattgcatctaatctttaaaaagcaaataaaaatacattttttgtgcttcatgaaaagtatgacctaggcatattattgcagatacatggtaattcacatatctggagttgctgactgggttcaatctgcatagtcctgactttgaggaattgatactgaaagaactcatttgtgcacttagaaggaaagaatacatggagccattgtgattaatgctgggaaaagaacactaaaatgtgctcgtagacaagttgtttttatctctgagcttttatttttatctgtaaatacaacaaataatattccagtcctaaaatggatacttcataggcaaagttagaataagtaaataacattgttatgagttcatcatataaagctcttagaaaaatgcttagcacatagtagatgctcaataaatattagcttttattaatattattattaccatatataatgtggtttggaaagaacttactaagagtagcagccttagagggaccaagacaaattcactgcccttctctaattagtagaggactctgtcaccagatacaaatcgaaatttttctttttgttaaagagttaaggcaattgtactgaatttttctcaatttttagtttcctcacatgacttagattttgatgctgtacaaaataaataattttcatttaaatttgacaaatgctttggagattactgaaattttttcaagtatcctacatacatagttgcaaaataaaggcagttttttaaaatgtcacatgctatttttattgaaatctatctgtacgtaactacatgttctttttcaaggttatggaattagaatcaaagctaaatgaagcaaaagaagaatttacgtcaggtggacctcttggtcagaaacgagacccaaaagaatggattccccgtccgccagaaaaatatgcattgagtggtcacaggagtccagtcactcgagtcattttccatcctgtgttcagtgttatggtctctgcttcagaggatgctacaattaaggtaattttttgttaaaagcagacttaacgggaggctgaagcaggagaatggcatgaacccgggaggcggagtttgcagtgagccgagattgcaccactgcactccagcctgggcgacagagccacactctgtctcaaaaaaaaaaagcagacttaatagggtgaagaaaattaaaagatcctgaaaatgagggcctatgaagagggacaggaggtactctgaaacgtgtgatttggttctaaatcttaaaagacagaattggaataaaatatcattgtggctcctgagaggcatgctgccaggtaagtttgatggtgaatttgagaaagtcgggtgtcactaactgagttgatgtcagtacatcaccttgtgcttgaacaatttttgttcttggagaatgaaaagtgtgtgtcttacctttaaacggaggttatgtgtgaaatactgattgacaaaactagtaattgatagggtgaatctatactgcaaaagaattcagtagaggattcatttaaattgggctttccttgatgtatttaaaattggctttccaggagtgtgggaatatacaagcttttcattttataaattacgtatttcattaaaaaatttttttcacagtaaaaatattattaccttttaatgttgtgcttttttaattaggaaaagagttgtttttaagttgcctttgttccggacacaataaaatgaccgttgtataaaccacctacagaaagataagatagttgcaatataggtagatttaggtagatgcctctatcctaagggttatttcaaagtaagttacagatattaagtttcatttacaaaagtataaccaatcggccgggcacggtggctcacgcctgtaatcccagcactttgggaggccgaggcgggtggattgcctgagctcaggagttcaagaccagcctgagcaacacggagaaacccc

SEQ ID NO: 1907 - DNA, 6000 bp, Homo sapiens
actcttgaaaagagtatcttcagggttaatgagattttaaataaattctatttcttcagaatagaaatgaggtcttttttttaggagtcatttgaatttttctttcagaaatcgagctatagcagattatcttcgttcaaatggctatgaagaggcatattcagtttttaaaaaggaagctgaattagatgtggtatgttttactttttacaattcaaagtatagttaatgagtggattttcactcaagtatctgtagttaacagttacgcacaattttgtcatttgttattgtggtctacttggtactgaacttgattttcactccttttttttttattttttattttaatttttgagatggagtctcactttgtctcccaggctggagtgcagtggcgtgatctcggctcactgcaacctctgcctcccagattcaagcgattctcctacttcagccttccgagtagctgggattacaggcacgcaccaccacacccagctaatttttgtatttttagtagagacggggtctcgccatgttggccaggctggtctcaaactccagacctcaggtgatccacccgccttagcttcccaaagtgctgggattacaggtgagccaccatgcccagccactccctttttttataatcagatttttagtaatatttggacttaaagatgaatgatctttgtcttgaggatcatagttaagccattttttaaaaattctaaatttattttctctagaatgaagaattagataaaaagtatgctggtcttttggaaaaaaaatggacatctgttattagattacaaaagaaggtaactaagtcttttttctttaaaattagttgtattcagttatataaactttctgaaaataacattcttctgcattaattaataattgcatctaatctttaaaaagcaaataaaaatacattttttgtgcttcatgaaaagtatgacctaggcatattattgcagatacatggtaattcacatatctggagttgctgactgggttcaatctgcatagtcctgactttgaggaattgatactgaaagaactcatttgtgcacttagaaggaaagaatacatggagccattgtgattaatgctgggaaaagaacactaaaatgtgctcgtagacaagttgtttttatctctgagcttttatttttatctgtaaatacaacaaataatattccagtcctaaaatggatacttcataggcaaagttagaataagtaaataacattgttatgagttcatcatataaagctcttagaaaaatgcttagcacatagtagatgctcaataaatattagcttttattaatattattattaccatatataatgtggtttggaaagaacttactaagagtagcagccttagagggaccaagacaaattcactgcccttctctaattagtagaggactctgtcaccagatacaaatcgaaatttttctttttgttaaagagttaaggcaattgtactgaatttttctcaatttttagtttcctcacatgacttagattttgatgctgtacaaaataaataattttcatttaaatttgacaaatgctttggagattactgaaattttttcaagtatcctacatacatagttgcaaaataaaggcagttttttaaaatgtcacatgctatttttattgaaatctatctgtacgtaactacatgttctttttcaaggttatggaattagaatcaaagctaaatgaagcaaaagaagaatttacgtcaggtggacctcttggtcagaaacgagacccaaaagaatggattccccgtccgccagaaaaatatgcattgagtggtcacaggagtccagtcactcgagtcattttccatcctgtgttcagtgttatggtctctgcttcagaggatgctacaattaaggtaattttttgttaaaagcagacttaacgggaggctgaagcaggagaatggcatgaacccgggaggcggagtttgcagtgagccgagattgcaccactgcactccagcctgggcgacagagccacactctgtctcaaaaaaaaaaagcagacttaatagggtgaagaaaattaaaagatcctgaaaatgagggcctatgaagagggacaggaggtactctgaaacgtgtgatttggttctaaatcttaaaagacagaattggaataaaatatcattgtggctcctgagaggcatgctgccaggtaagtttgatggtgaatttgagaaagtcgggtgtcactaactgagttgatgtcagtacatcaccttgtgcttgaacaatttttgttcttggagaatgaaaagtgtgtgtcttacctttaaacggaggttatgtgtgaaatactgattgacaaaactagtaattgatagggtgaatctatactgcaaaagaattcagtagaggattcatttaaattgggctttccttgatgtatttaaaattggctttccaggagtgtgggaatatacaagcttttcattttataaattacgtatttcattaaaaaatttttttcacagtaaaaatattattaccttttaatgttgtgcttttttaattaggaaaagagttgtttttaagttgcctttgttccggacacaataaaatgaccgttgtataaaccacctacagaaagataagatagttgcaatataggtagatttaggtagatgcctctatcctaagggttatttcaaagtaagttacagatattaagtttcatttacaaaagtataaccaatcggccgggcacggtggctcacgcctgtaatcccagcactttgggaggccgaggcgggtggattgcctgagctcaggagttcaagaccagcctgagcaacacggagaaaccccatctctactaaaatacaaaaaaattagctgggcatggcagcgtgcgcctgtagtcccagctacttggaaggctgaggcaggaaattcgcttgaacccaggagacaggttgcagttagccaagatcgctccactgcactccagcctgggcgacagagcgagactgtctcaaaaaggtagttacaactaaccaaatagtaacgacggtttggccttactactaacagcagaagaaataaacactgaaattatgggccgggtgtggtagctcatgcctatagtcctaggactttgggaggccaaggtgggaggactgcttgagctcaggagttagagagcagcctgggcaacatagcaagacctcgtctctacttaaaattagccaggtatggtggtgcatgcctgtagtcctagctactcaggaggctgagatgggaggatcacatgagcctgggagttggaggctgcagtgagctatgattgagccagtgtactccagcctgggcgaagagtgagaccctgtcttaaaaacaaaaaaattggactgggcacggtagctcatgcctgtaatcccagcactttgggaggccaaggtgggtggatcatgaggtcaggagatcgagaccatcctggctaacatggtgaaaccccgtctctactaaaaaatacaaaaaattagccgggagtgatggcgggctcctgtagtcccagctactcgggaggctgagtcaggagaatggcgtgaacccgggaggcggagcttgcagtgagccaagatcgcgccactgcactccagcctgggcgacaagagtgagacacacatacatatatatgtgtgtcaaattgtcaaggtattttacctattaaataagaattcccagtgatgataagattttgataaagtagtcattctcattacatatgatacagtcttacgggatatcaatttaatagagtatatgaaggctttaaaagtttatactttttgacccactaattgtttctccccattactgtctgacctaggtattataaaatgaggacagaatttttttatattaaaaaatgttcactataatgttttctataatagtgatttagccagcaattagaattttttttttttttttgagatggagtttcactcttgttacccaggctggagtgcagtggtatgatcttggctcactgcagcctccgcctcccaggttcaagcaattctgcctcagcctcccgagtagccgggagtacaggcgcccaccactgtgcctggctaattttttgtgttttttagtagagacggggtttcaccatattagccaggatagtctcgaactgacctcgtggtccgcccgccttggccttcctaagtgctgggattacaggcgtgagccactgcgcccggccatatttcattttttaactcaaaatgacatatgctcttgttcatttgctattcgtgaacagttaacatcttctgaaatctttccttggccctttagatgtctgagttctgatggtctagtaggatcgagtattcatccattgttcctcaaatattctacatacaaatgcctgctatagccctctgaagctccttcccttccccttccctttcccctttctttccctttcctttccatctctttctctttctttcctcttatttcttccccttaagtttccttatttacatgtcattcctgctctgagacagggagcggactatgtcttgtgactttatataccttatcactattacagttggttatgtgatagaaaccttataaatgtggttctagagatagattttaataattgcaacattagttttccctgtagaaaaaaagaccaatttatacatgagatacaatatttctaaaatagttatcctttgttacttgttcggttagttactcagtaaggtgccagactggcctgctgagtgcaaatgtgaaacaagaaaggagtgatggagttggtgttaaccaattttctgttcacttgacaggtgtgggattatgagactggagattttgaacgaactcttaaaggacatacagactctgtacaggacatttcattcgaccacagcggcaagcttctggcttcctgttctgcagatatgaccattaaactatgggattttcagggctttgaatgcatcagaaccatgcacggtaaggggtagaggatagtgctttaacagtaatttctatcatggtacttcagaaggaatattgtttctaacagtgtacagtgttcctttattcacctcttaattgtcagtattggtggaagagcataccatgtagatagtccagggataagccacagtagttgagagtgctttctattaggaagttttaagtatcttttagtactttacataaaatatttgtatgagtatttcttggtaagaaaaactgccaggtcatttatctgtatttgagttaaaaatggttttgtttgtgttttaatttttgttagttgggaaactgaagtccagagagagtaggtcgagtgaaaacgagcccagattctcttgctcacttaagtgaaatgagctgagcgcacagaccccatgccctcgttcattatttcccgggtcttgttgtgggaactgttttctgaggcagtatgttttgtggaaagagagtaatttgctttggagtcagacacctgggttcaaattcctacttgtctacttacggtattagaaaatttaaacctctttcatctgcaaaacagaggtaataataccagagtcatagagttgtcatgaggataagatgaagtcataagataaatcatcttggtgtagtacctgccacataggagatgctcattacttagggatttttgttgtttctttatacatgatgacatttgaatgttgggattttgtacaaggaacacgttaacacatgagtaaactgtgtttacctagagggcataatttgaaggttgtgttttctctgtcccaaattaaatgcattggggaagtttataattacaggaattccacgcatgaacactgtttttttgttgttgttttttggttgttttttttttgagactgtgtctcactctgtcgcccaggctggagtgc

SEQ ID NO: 1908 - DNA, 6000 bp, Homo sapiens
cacattgattttgacagaggcattcctatcatgtatttttaaaactacatgtcaataaacaaaggaggcagtttcctctccctctacccccatcccacttatttttctaaatgaatcttctcttgtgagttctctttattttgattggcccattgcattttgagattctgtttactgccctctggtggtggttacatgctgtatgtcataaatttgattctggtgtggtggctcacgcctgtaatcccagcactttgggaagtcaaggcaggaggatcacttgagcccaggagtttgagcaacatagcgagaccccgtctctacagaaaactttttttttttttttaaactcaccactatactaatgacggaaaaaattttcaaaaacttagctaggtgtggtggtacactcctgtagtcccagccactagggagactgagacaggaagattgcttgatcccaggagttcaaagctgcagtgagctatgattgttccactgcactccagcctgggtgacagaatgagaccctgtcttgaaataaataaatattccctaatccagatcaaaaaaataaataagtaaatttggttttggttggatttgtaaaagttaaattaaatagtgattacagaaatcttgaaaagtaaatttattatctgttggttttatgaaaactgagtcctaacctaaatagagacttctgttcttacattatctgagtccttcctgtgtagcataggtatggtgtgaaagacttgtgtatttcaacagataaaaacaaattgggctgggcgcagtggctcacgcctgtaattccagcactttgggaggccgaggtgggccgatcgatcatctgaggttaggagttcaagaccagcctgcccaacatggcaaaaccccatctctactaaaaatacaaaaattagccacatgtggtggtgcgtgcctgtaatcacatctacttgggaggctgaggcaggagattcgcttgaacccgggaggcggaggttgcagtgacccaagattgcaccacggtactccagcctgggtgacagagccagactccgtctgaaaacaaacaaaaaaccaaaatgcaacaaaaaaattggaaatatatatcattattagatagaagccatttaaagtccatacctaacttcttgtgtgggaaacttaatttttattatgttttctgtagactaaaaaaagtggtaaacctgggccattcttgctgtctggatccagagacaagactattaagatgtgggatgtcagtactggcatgtgccttatgaccctcgtaagtttgcataatcttaccatttcttttgcatcttcactgtttatacctttttggattaatgctttatgatatcttaaataatctgaattattctgggctttaaaataacttctttataaagatagttttcctttagcttttgttgttgttatagtgatgtgaaagttatttctctagaatgcagattctataaagaatctgtagagccagtcggtgtttgagggggagatgctgctagctcactgtatctttaaaaattgtgtaatatctcggccgggcgcggtggcttacgcctgtaatcccagcactttgggaggccgaggcgggtggatcacgaggtcaggagatcgagctaacttggggaaatcccgtctctaccaaaaaatacaaaaaattagctgggcgtggtggcgggcgcctgtagtcccagctactcgggaggctgaggcaggagaatggcgtgaacccgggaggtggagcttgcagtgagccgagattgtgccactgcactccagcctgggcgacagagtgagactccatctcaaaaaaaataaaataaaacaaatgtgtaatatctcttacggagaaaaagcagcattcttagagacctgttcactgttgaagatgtttgtttctctgtttcactttatttatatgaatccttttaactgttatacctccttgctcacatgatctagtttatttggcttatttaggagcatctgtatttccatagaaagatatgtcaatactagtaagggattgtggacattcctatgtgcctaaaggagttccaaggagatctgtggatgtttgtttagtagtagtttttataatttggcatccacatttgtttagagattttttaggtgctaatgataccttgaagtgattgtctctctgtaggatatgacagacatatgtggaagcatcttcaagaactgattagaaaatgaaactctcggccgggcacggtggctcacgcctgtaatccccgcactttgggaggccgaggcgagcagatcacgaggtcaggagattgagaccatcctggctaacatggtgaaaccccgtctctactaaaaatacaaaaaattagccgggcatcctggcgggtgcctgtagtcccagctacttgggaggctgaggcaggagaatggcgtgaacccgggaggcggagcttgcagtgaccggagatggcaccactgtactccagcctgggcgacagagcgagactccgcctcaaaaaataaataaataaataaataaaaagaaaatgaaactctcctctagtagtattctgagcggagttcagctataccatgttgctgttaagaaaagatgatatataattaaaataaagcaggccaggcgcagtggctcactcctgcaatcccagcacttttggaggctgaggcaggtggatcacctgaggtcaggagttcaggaccagcctggccaacatggtgaaaccccgtctctactaaaattacaaaaattagccgggcgtggccaggcgcggtggctcacgcctgtaatcccagcactttgggaggccgagatgggtggatcacctgaggttgggagttcgagaccagcctgaccaacatggaggaaccccatcgctgctaaaaacacaaaattagccaggcatggtggcacatgcctgtaatcccagctacttgggaaggctgaggcaggcaaatcactttaacctgggaggcggaggttgcagtgagccaagatcacgccattgtactccagcctgggcaacaagagtgaaaccatctcaaaaaaaaaaaaaaaaaaacccgggcatggtggcgcacgtctgtaatcccagctactcgggaggctgaggcttgagaatcgtttgcacctgggagacggaggttgcagtgagccgagatcgcaccattgccctccatcctgggcagtgaagtaagactctgtctccaggaaaaaaaaagaaaagaaacaagaaaaacatactcttggccaggcacagtggctcacacctgtaatcccaggactttgggaggccaaggcaggaggagcccaggagtttgagaccagcctgagcaacataacaagaccctgtctctaccaaaataaaagtttaaaaattagtcatgcatgatgatgcatgcctatagtcctagctacttgggaggctaaggcaggaggattacttgaacccaggaatttgaggctttagtgagccgtgatcatgccactatactccagcctgggcaacagagttgctgtctctttttaaaacaaaacaaaattttgcagtgctgtgctataactgcactatccagcgtggtagctactagccacatgcagctattatactcttgaaatgtggctagtgagactgaagaactgaattgttggttgtatgtaatcttaatattatatattaaagtaggcgtacatggacagtagctaccatgttcaactgtgcagttctaagcctttttctttaatgtgtagatgaatgtgctattttttataaaaatggtatcatgccccttaaggtagctttgtagcaaacctttaatttagaaagtatgtgatccttgcttatgttgttagatgctcttctacactgatctacagacaatgctttgtgaacatctttgctaactaaatctctgggcatgtccttaaagataaattgcaagaacagaactgctgcgacaggggaaatatggatggatagatggatggatgattaaatggatggatgattagatggatgaatgattggatggatggatggatggatgattggatggatggatagatggatgattggatggttggatggatagatggatgattggatggatggatggatgattggatggatggatggatggatgattggatggatggatggatggatgattggatggatggatggatggatggatgattagatggatgattagatggatgattggatggatagatagatgggtgggtgggtggatggatggatgattggatgattggatggatggatggatggatggatggatggatggatggatatatagatatatagtgaatgcctgtatatccttcacttagttaccatttgttggttttccttcatgtatgtgtgtatattttgctgaaatcatttgagcgttctttgcagacatcgtaacactttacccccaagtattttagcatgaaccacctaagaacaaggatagtatataaataaccaaaataaaattattcacactcaagaaatttaccattgatagactacatattgagatttgttcttgttatttccataatgccctgcgggacttctttttaaccctcatccaggacccagtcagggatcgtacgttatattcactcctcatgtcttatgagttttcagtttcctttaatctagaatcccctagacttttattttcttctggtcttttgatgtttttggtatgtatagttttatcgtattatgaaatagatgctatttaaacattttgccttttactgagtcaaataacttttttgtttttaaggtgggtcatgataactgggtacgtggagttctgttccattctggggggaagtttattttgagttgtgctgatgacaagaccctacgcgtatgggattacaagaacaagcgatgcatgaagaccctcaatgcgcatgaacactttgttacctccttgggtatgtacgcctcgcgaggtctctgaacattagattttggagtgccagacaaactgtgttttacataatcgtgtggactttgccaggtaagaaatgactgtgctttcagggcagaatagagaagacatgaaaatcttgtggattcctaccatttgttttaaattctcctttcccgttaactctttccatcgttagccttataataaaaacattactttctccactgcacaacattggttttggaaaccacaatttgtgaagaggttacttaccactctgatgggtaatttttctcccctattagtttgtttctcaaacaaaatcttcctcaacctttcccactggcaggtgtatactatcagatactagaaactcagaaaattgtatttgatttgagtaaacatcctcactatcatctggacttgaatctggaatttaagagagtgaatacagtcaagtataataaatgcactaaagtataatggaccaaagcctgcgtaaggtgggctaatacctgcctcacaggattggttcaaggattaggcacaaatacggagcatttatgccatgcctggaacatcgtgttcagtaaatggatatggcgagactgtgtattgttagatttgagccctgctgtgccttagtcccagctactcaggaggctgaggctggaggattgcttgagcccaggagttctgggttacagtgtgctgtgctgatgggatgtttgcactaagtgcagcatcaatatggtgacctcctgggaacaggagactcccaggttgcctaaggaggggtgacctggcccaggtcagaaacagagcaggtcaaaactcccttgctgatcagtagtgggatcgcacctttgaacagccactgcactccagcctgggcaacatagtgagaccctgcctttgaaaaaagaagaaaaaggatttgagccccatttgggatgggccaaagaggaacaggcgtttttattg

SEQ ID NO: 1909 - DNA, 6000 bp, Homo sapiens
tgaggctttagtgagccgtgatcatgccactatactccagcctgggcaacagagttgctgtctctttttaaaacaaaacaaaattttgcagtgctgtgctataactgcactatccagcgtggtagctactagccacatgcagctattatactcttgaaatgtggctagtgagactgaagaactgaattgttggttgtatgtaatcttaatattatatattaaagtaggcgtacatggacagtagctaccatgttcaactgtgcagttctaagcctttttctttaatgtgtagatgaatgtgctattttttataaaaatggtatcatgccccttaaggtagctttgtagcaaacctttaatttagaaagtatgtgatccttgcttatgttgttagatgctcttctacactgatctacagacaatgctttgtgaacatctttgctaactaaatctctgggcatgtccttaaagataaattgcaagaacagaactgctgcgacaggggaaatatggatggatagatggatggatgattaaatggatggatgattagatggatgaatgattggatggatggatggatggatgattggatggatggatagatggatgattggatggttggatggatagatggatgattggatggatggatggatgattggatggatggatggatggatgattggatggatggatggatggatgattggatggatggatggatggatggatgattagatggatgattagatggatgattggatggatagatagatgggtgggtgggtggatggatggatgattggatgattggatggatggatggatggatggatggatggatggatggatatatagatatatagtgaatgcctgtatatccttcacttagttaccatttgttggttttccttcatgtatgtgtgtatattttgctgaaatcatttgagcgttctttgcagacatcgtaacactttacccccaagtattttagcatgaaccacctaagaacaaggatagtatataaataaccaaaataaaattattcacactcaagaaatttaccattgatagactacatattgagatttgttcttgttatttccataatgccctgcgggacttctttttaaccctcatccaggacccagtcagggatcgtacgttatattcactcctcatgtcttatgagttttcagtttcctttaatctagaatcccctagacttttattttcttctggtcttttgatgtttttggtatgtatagttttatcgtattatgaaatagatgctatttaaacattttgccttttactgagtcaaataacttttttgtttttaaggtgggtcatgataactgggtacgtggagttctgttccattctggggggaagtttattttgagttgtgctgatgacaagaccctacgcgtatgggattacaagaacaagcgatgcatgaagaccctcaatgcgcatgaacactttgttacctccttgggtatgtacgcctcgcgaggtctctgaacattagattttggagtgccagacaaactgtgttttacataatcgtgtggactttgccaggtaagaaatgactgtgctttcagggcagaatagagaagacatgaaaatcttgtggattcctaccatttgttttaaattctcctttcccgttaactctttccatcgttagccttataataaaaacattactttctccactgcacaacattggttttggaaaccacaatttgtgaagaggttacttaccactctgatgggtaatttttctcccctattagtttgtttctcaaacaaaatcttcctcaacctttcccactggcaggtgtatactatcagatactagaaactcagaaaattgtatttgatttgagtaaacatcctcactatcatctggacttgaatctggaatttaagagagtgaatacagtcaagtataataaatgcactaaagtataatggaccaaagcctgcgtaaggtgggctaatacctgcctcacaggattggttcaaggattaggcacaaatacggagcatttatgccatgcctggaacatcgtgttcagtaaatggatatggcgagactgtgtattgttagatttgagccctgctgtgccttagtcccagctactcaggaggctgaggctggaggattgcttgagcccaggagttctgggttacagtgtgctgtgctgatgggatgtttgcactaagtgcagcatcaatatggtgacctcctgggaacaggagactcccaggttgcctaaggaggggtgacctggcccaggtcagaaacagagcaggtcaaaactcccttgctgatcagtagtgggatcgcacctttgaacagccactgcactccagcctgggcaacatagtgagaccctgcctttgaaaaaagaagaaaaaggatttgagccccatttgggatgggccaaagaggaacaggcgtttttattgagatgttaatacaggatttgatcattgagtctcaacttccctaactgaattggcaaactagataccttcttgggttatggtatattagagaaacacgaaaactactggcatttggactttcttagaattttgtggctcattaaaaattgtatctggctcagtgtgatggagggttgggaccgggcagggtcttgctctgtcacccaggctggagtgcagtggtgcagtcatggctcgctgcagcctcgacttcccagctcaaacagttctgcatcagtctcccgagtagctgggactacaggcacacactaccatgcccggctaattttttttttaattttgtattttgtagagagggggtctcactatgtttgttgtccaggcttacgtgtgagttttaaataaaccatttctttttctttcagatttccacaagacggcaccctatgtcgtcactggcagcgtagatcaaacagtaaaagtgtgggagtgccgttgattgtgtctccttcggcccctcctccctcttttcctctggatgcactctgatgataccatggttaccccattgagctctgtttaaataaatattgtcctttcatgtaaattattctggatgtagattgagcttattaaatgttacacacaaagtattcatgcatggtgaatccaaattgtatactgtaaatttacatacgttgtctagaagtaccatagggtttaaaaacctgggctggcattggtcacaccaggcctaagaaggcagaagttgaatcaattgaactagggcactaaactgaatagttgacagtgtcattttatgttggattattaattcctgtttttctttctgctatctgttggtgcctgacttgatggcctcatttggggaaaagtggtggttattagggctttttctgaaatgtgtatctatgtaacatcacttaagtgtgcttaataaatcttctgtaaggattttagatgataaggctacaattcagaatcttctgaaccatctatgtaatgaatggggattatacattggaatttttgtcatgacacatttgccaaatcagtaggatatatttgttttggcagcctatcacgcagaggctagtggtatatttatgtaagaaaatgactgtaaatctcaagaaaaatctcagcagctaatagcaactcatttatttcattttggtcttaatgctttgtaaacaggtcaaaaaatactgtcatactctaagcttctattttccacactggacatacttctagttgtattctccatactattagactgtgtagtgatgtgacttccaagtagaatttaatctccccattgagtgtgtcatggtacaaatcactattcgtttttggtgttttttagggatgtgcaatgtgcattacataatgacagaaatactgagaaggttctgtgtgcccatttgaaaggagtgggaggaatacagcagtttgtttttcaacatgaatctgatattgatttaaactgtgtttcacttacaagttttaaaaaaatgacagggtttaatggagcgtgcataaaaatgtactgttttcaccttttgtttatatgtaaatgtttgtaagtatatgggcctatctgtaagtggataagtctgtatgtgtgtatcatacacatcaacctccatgtccttagtcctgggtttttgaaaaagtgctaaaacggacaagtagaataaatgttgctgtggaatgccatgctttagaacaaaccctttttgatcttaatgcttctgaaaactaggtctgactctggggatttttttccagccgaaggaaaatcacttccgttatgtccccctctaatttagccgctcgacattttacacaacccggatatgttgtatattttgacccaaagttacaggtaggtttaagagaatttttagccatgacttttggagcactattccattgtcagttattaataaagaattccattgcttagctaaccaacaggttttttttgtttccaagagagttatttgaaaagttaacagaacaatgagataacagtgacagtttaacaaagataaaattctgaactgcgttttattcatttgtgtactatgtgattttttaaatgtcccctttagtatttaatggaaaattggttcctgcaaaagacaaagggtgagagttagcgtcctgtagatacacacagagactaggccgtatattaactagaagcagctttatgtctagcttgtgtctttttgtttgtttgcttgtttgtttttagattcctgagagatgtctctggaagggaaagttttgagaactaatggctatttttgaggacaaaaattacatcttaagctaattccttaaatacatacagtaggtgaattttcaggacaatattgcctcacaaccctgcttacattgaaaagtctttttcccttagctcttctgactggatttttctacaaaaactatggaaaatatctttgttcttgtttgctgctattttctgtcctattttgagaaatataaatacatagaaatggtgcatcttaacatttgtttgtacatgtataaatgtcttgtattttaattcatttttagcatgaattgtttaagggtaagccacaacatctagaaatcactcatagatattgaacaataaaggagaatggtaccgatgcaggaggaagcaagcgtgtcttcccctgcagcacacagcgacttgcgttgacaaaggaggaggaaacgattactctgtaaacaaagttatccttacttgggagattgccacagcctgctgctgagttgagttaccagacatcctccatgtgagaagcagcgaacattgaatctcagggatggcccacaactgggtccacatgtaatgagccctgtttaataacgaaggggtgggggagagcagtccgtctacaacctggaatcagatttgcaaaatttcctgcactgctgtctgacactgtcctgttgatgccctttctgactgtgttctctgttttctctgtctgctgtctaaccctgtgccttgcctgggataaggacaatgatgaggttactggtttggattgtaagtagaggacttttattaattggtttagaggttcactgctgctttgtcactttctcaatcaaattggccacttaagaaataaagagctggtagaattgcatcctcagatgattattgactgtgtgtgtgtgtgaaaacagacattccagtgccacccaaatatatatctgtaacgtgcccaagaaatcctagctgcgctcttgagagtgcatgccatggagactggtttagacaccgcgtggagcctagttgcctgttgtcacggcatcttgcactttaggagactaagaccgtcctggttcgtctgtgtgtggtgtgaccaatggtgtgcccagagcactactctcaaaatcactagtgttagcaagtcgtcccgggctggggagcgttcgccgtagtctttggaagctttggct

SEQ ID NO: 1910 - DNA, 6000 bp, Homo sapiens
aaggtctggtgccctctgtcctaatgtattcagttgaaagcagtcgagttcattcaaaaagagaaggccaggtgcggtggctcacgcctgtcatcccagcactttgggaggctgaggtgggtggatcacctgaggtcaggagttcaagaccagcctggctaacatggcgaaaccccgtctctactgaaaatatgaaaattagccaggtgtggtggcaggcgcctgtaatctcagctacttgggggcttaggcaggagaatcacttaaacccaggaggcagaggttgcagtgagctgagatcgcaccactgcactccagcctgggcaacagagcaagactccacctcaaaaaaaaaaaaaaaaaaaaaaagggatgagtgtagtggctcatgcctgtcatcccaacactttcccaggctgaggtggaggatcacttgagcctgggaggttgaggctacactgagccatgattgttccactgtgctctagcctgggcaacagagtgagaccctgtctccaaaaaagggagaaagactcctcaagggctgacgcatgtcctgtcaattgcagaccatccataatgtacgtgaacacaggccaggggctttctcaccacaaagaattcctcttccatgtaagtacttattattgtaaagctgtagatggcaaagcaataccagctttgatttcctactctgattttaatttgcaggtacatggggagaacctctttggagcagaataccagttgcaaatttgcgtcccaaccaaattacgaggtctccaggttgtagcagtgaagaagctgacgaggactcaggtatttaaaggcagttctttatcagtcacacctctttccacagtgactacagagtctcaagtataaaaaccagagttctagaaacagagtgaagacaagttaaccatgggaaaagattaggagtaaattcccgaagtcctgttcagaaggactctcaatcactcagctcttaaagcaacctgtcagttttcctccctttgaggaaaaataagcaaaaattggccaggtgcggtggctcacacctgtaatcccagcactttgggaggccgaggcgggtggatcacaaggtcagcagatcgagaccatcctggctaacacggtgaaaccccgtctctactaaaaatacaaaaaattctccgggcgtggtggcgggcgcctgtagtcccagctacttgggaggctgaggcaggagaatggtgtgagcccgggaggcggagcttgcagtgagccgagatcctgccactgcactccagcctgggagacagagtgagactccatctcaaaaaaaaaaaaaagcaaaaattaaaaccttgtcagtagacagagacattttccctttgaaaattgataaattctgcttctctgtgtgagcgatgtaacatgtgacatttcttacactgccccctataagttgcttactagcttcccttcttctcccctgagactcttttttggtctctgctttgcctcagcctctttgctttcagttgtctcatctgtagtctggttcccaaagctagccttgatacctgaagcaacaggctctgctcagtatgaagctgaagcctgggcattttttttttgctcagactacataagtgttaaggctcaaaaaacggaaaggaatttacagaaaggactctgctgacaattagaaagagggcttataggtcaggtgccatggctcactcctgtaatcacccagcactttgggatgccgaggtgggtggatcacaaggtgaggagttcgagaccagcctggccaacatggtgaaacccccatctctactaaaaaaatacaaacaattagccgggcatggtggtgtatgcctgcaatcccagctactcgggaggctgaggtaggagaattgcttgaacccgggaggcggaggttgcagtgagctgagatcgcaccactgcactctagcctgggtgacagagcaagactctgtctcaataaaattaaaaaaaaaaaaaagagggtttataaatataaacgtttgttttcacatgtagtttatttatttaaaaaaatagagacaggggtcttgctatgttgaccaggctagatatgaactcttgggctcaagcgatcctcctgcctcagcctcccgagtagctgggactacaggcgcacgccactgtgcccggctagtttacttctttcagaacatttgttatcagcaaatttaaacatttcaacaaatatttcagtttccatttggaaacaaaattcttgtttgaaaagctgactggaaacctgtgagaatgggagttccaccctcctgtggggatggaggttgaaacagcaccagaggcttcaagaccagtctcctctcatttcggggcagtaagatacatttagcttacttaaacagactgtgctggcagagcaagtcagtggcagagctgaagttcagcattgtcctgtggaactcctggatttttctcttaatttgcttcatggcaggagtgttacatttagtcttgaaggtcatttgtttcagcatcttgtctgtcaggtaatgtaaccagagcacattactataagggtgatattcaccccagcggttgttattctccttcttcatgagcctgtagatgtcaaactggtagtcaccgtcaccggtaaacaggtcctcatccatggaaacgtcacagaaaaccacaatcccatcccgttccaagcgcgacagggtgtagtcaatgatgctcacttgcaacccacagctggggatagtgctgctcttcccattgagggtgtagtggagttttttgaggctggttttctttaagagcacgttcccccagtgtaagtctcggtgctcaaagcgcagtgatgcctctgccactgcgagggaggctgtgagctggtgtagaatgctctttgcagtagccaaggaagacaacttggttcgcatttgctctaagtcaatccctccaaactcaaattccagcacaatgaagagctggtcgtctttaaaaaaatcaggccggtcatttgcagagcctttggttgaattatagtgatcccaggctttgaggagcaagggagggtaagatccctggacacagtgcactgagttcagcccgataaagccttctgtgcggttgcacacttcaccggataagaggctcaactctttggagatgatgatctctggcaggatttcctcaaaggttttctgatgggatccattgactaaatctggtccttcaatagcaatgatttttatggctacgggtgtgtgatcagcaattgtttgaaacacttcgccaaacaccccttccccaatcttctcacagcgttgcagtttttctgtgggaaggcaatggctaaaggggacaggacccttctgactgcattccccataaaccttttcagcatcagatgcctttttgtttgaaatacttagagtgtttaaggggcttagcaaatacatagaggaggagtgccaagaggacggagcaccacttgttctgttcatgacaggccggtttgaacattctgataggagggatccagagagagaagtggcagtggtatagatgctgcagacctctgacacatcagtcacaattttcttcttgtggaaactgaaggaagccctggttttggtccaaaagcagacattctgtaaaggagtcaggtcctgggtggggaacgaatcttttcccagcttttggccctttttaaagcggtgggaatggaggagagaggtttccgttgcctcctgatgtttgctcttccggcttgatctagttctctccagcctgtctattccccttggcacaatgcggcccttgggaacactggcctcctgatgctctctccggacggcctcttgaagccctctctcttgacaagagtcctggcctgtggccctcctcttgcctgtgcttgacagacctggaccctctggtccatttcccaccaccagtttccttttacagcaggactctctcatattcttcccatctgcccgaaactcagaatcctcaggggttcctgagttcataaggccaaagagaactgacctgaggctggcgcgggtttggtggaccatcctggtgtccttggctcctcctgtcgcttcctcctgggagcaggggagagatgctcggtccagggagacttctgggaggtggaggccgctcgggacggctgaggctgcaaccagacaggcggaggtgccgatcgagatgacactgtcccttggcgttggggacccggggcagggcgaggccagagagctgaacagggaggcactgatgcccagctcgtcgccgtccctgggctggccgcacacgctgaggtccgggctgaggcggccggagtcgcggctggggaagggcggaagtcggagcgggccgcagggtgtgctgcacttctgcgggggccgagctcgcagccccaggcgtcttggggtcacggttaggcttgggcgagctcgcagcttccagcgctttggggtcacggtcaggctgggccggtccttgggcactcggccgccgggacgcctccgccgccgcctcaccgggctgccggggaagtcggggtcgtcgggatcgtcaggatcgtcggactgcgaggggtcgccgatgctggcgtcgctgctgccgctgctgttgaagaaacgcctccggtcctgcggcgggaaccactgcgcggcttcccggcccggccgccgctgtctcctgccgtccgcagccccatatgtgcggaaaagccggctcccaggtcccgggagcgaagccgccatggccggcacccgccaagaggttcaaacgcaaacatcgcgagacttccgtgcgacgcggacgcgcccgcctgccgcggggtcctagctcccggccctgcgcatgcgcacctcgccagggccggggccgggacgggacggaaaactggcggcttggtttgttcagcgcgtcgcggtcatggctctcgtttcaggcctccacggtgtgcacctggagtcaggagcgcgcttgtgcgtacagttcggttcaggtaagcgcggccgtcccgagaggccaggggagggcggagggcctgaagcgggtaacgagaggccaggagactgtttttcctgggttacccctgccggccagtgccgggggctgccaggccctccctagcttcgtccctgggtctcaattgctcccgctggagcttcgcttgggccgaggtgagcgctgaaattgctcacaccctctattctgggaccttacgatgctctgtgtccgaagtgttaaaaagatttcagactttccgcacggaaaggaattgtgttcactagacctcgcttttccagcatgtggaagaatggcattcagtgagctgtgtcatcgcttcagataaagaaaatgtcaccgtggctgcagagatctcctgggatcactctgaggaggtgtttgagactgaaatgctccagatttgattatccagttgctcacgggcatcgcccctagaagagataatagcatctttgcataacatgtccatgtccaaaatagatcttttggtgcaaaaaaccaaccctctgtcccaacccgttccttagctaccctcaggagggagatatactccagttacagtacaaggaactcgagggattacctgtgactcctctttcctacatccccacgtctattccagcagcaagccctgccatttcagggccaaaatatatcctaaacccattcacttctctccatttccactgccgttgtaattcaagctaccctttcttgccagggctgttgcaataaccttcggcctgcctttcttgcctctgcttttcccacattctttacaaataattcccacgtaacagctatccgtcttctaagagcagacattagattgtgccattcccctgcttattaaaaataacaaacaaacaaaactgatgcttgagcacacttagactaaaatccatacttttttcatggccagag

SEQ ID NO: 1911 - DNA, 6000 bp, Homo sapiens
tggtggctcatgcctgtaatcccagcactttgggaggtcaaggcgggcagatcacctgaggtcagaagttcgagaccagcctggccaacatggtgaaatcctgtctctatttaaaaaaaataaataaattagccaggcatggtggtgggcacctgtaatcccagctactcgggaggctgaggaagaagaatcacttgaactggggaggtggaggttgcagtgagccgagatggcaccaacggactccagcctgggcgacacagtgagattcttcctcaaaaaaaaaaaaaaaaaaaaagaaaagaaaagaaaaagaaatacactacttaaaaataaaaggaaatgttatattggcatgtctagagaattgctcctttctcctcctccagggaggaaaacagaggaccttatatttagcaatccagcatcactctcctgacattccctctagtagagaatcatgcctaactaaagagctcagagctcacagatagatcacctctgaagccatgtccaggcaagggtcaacaagaatgaaaacacagggtaacacacaaagcattcagtccacaaatcacaggcatcagtctgacttctagtcatacttttgcaaaaagaattccaagagttccagtatctagtctaaatcttataaaagatttatgcattcctgagtactgtttaatactataactaaacactgatacagcacactaagacagttactggatacaaaaaacaatttctcacttaggtaattcattttttatttatttatttattttttgagactgagtctcactctatcactgaggctggagtggagtggtgtgatctcggctcactgcaacctctgcctcccagattcaagcgattctcgtgcctcagcctcccaagtaggtgggattacaggcacccaccatcatgtccggctaatttttgtatttttggtagacagggtttctccatgttggccaggcttgtgttgaacttctgacctcaggtgatccacctgtctcggcctcccaaagtgctaggattacaggcgtgagccacctgcgcccagctgcgaaatttttttttttaatcaatccattttcaaatcaaagtatatactgcagattccagcctagttatttcaactcagaactcctcagcttaggcctcttaattgccttatttcataagaagctgactcactcaaaggtcacaaaggcagcgatggcagagccaagatcagaagtgttaaggctgaaaacaggaagagggcaacagaatgtctgtggaggtgctcaaaggttaggcacaattttccttgggcactactcagaagccagccaggaattaccttagttctgtggttctctgcattcagtccctcatatagagatttgttgaaagatatttcaccaaggatctgcagttcagttacatcttttagtaactagaagatggggaaaggaatgagggaaacaaaacatattttagacatgaactcactgtgtttgaacagccttcaccacctttccctttaaaggtattcctgggcttagttaatggccctaacgtacacaacactacataaagttacccaaacaagacatctgcagttattcttcaacttcctttttttttttttttgagatggagtttcgctctttcgcccaggctggagtgaagtggtgcgatctcggctcactgcaacctccaccccgtcaggttcaagcgattctcctgccttagcctcccgagtagctggaattatgggcatgtgccaccatgccaggctaatttttgtatttttagtagagatggggttttgccatgttggccaggcttgtctcgaactcctgacctcagatgatctacccacctcggcctcccaaagtgctgggattacaggcgtgagctgccgcgcctggccttttcttcaacttcttttcccttgtgccatccaaagtcagttcttgactgactgacttatttttgagacaggatctcgctctgtcacccatgctggagtgcaatggcatgatcatgggtcactatagcctcaaccttccaggctcaagtgatcctcccacctcagtctcctgagtagctgagaccacaggtgcaccccaccacactgggctaatttttgtattttttgtagagatggggttttaccatgttgcccaggctggtctcaaactcctgggctcaagcaatccacccaccttagcctcccacagtgctgagattacaggcatgagccaccacacccagcttattcattttatttaacgtaagagatttttcctttttttttttttttttttttttttttttgagacaaggtctcactctgttactcgggccggaatggagtggctcaatcatagctcactgaagcttcaaattcctgggctcaaacgatactcctgcctcagcctcccaagtagctgggactacaggcatgagccaccatgcgtggctaatttatgtatttatttatttttaagaaatggggtttcactatgctgcccaggctgatcttgaactcctggcctcaagcaatcctcccgcctcagcctcccaaagtgttgggatgacagatgtgagccaccacactcacaattctttttttttaaattatttcttgtatctgtccctttcttttccacccccattgctacttcttcagttgagacctcacaaatgtcacctggatcactgtaaaacattaaacttgatcacttgatcactagttcccactttagaataagtgatcagggaaggcctctctaagaaaataacacgtgtggccgggtgtggtggctcatgcctgtaatcccagcacttcgggaggctgaggtgggtagatcatctgaggtcaggagttcaagaccagcctgaccaacacgatgaaaccccatctctactaaaaatacaaaattagccgggcgtggtggctcacgcctgtaatcccagcactttgggaggccaaggagggcggatcacctgaggtcaggagttcaagaccagcctcaccaacatggagaaaccccatctctactaaaaatacaaaattagccgggtatggtggcgcatacctgtaatcccagctacttgggaggctgaggcaggagaatcgcttgaacccgggaggcggaggttgcagtgagccgagatcgtgccattgcacaacaagagcgaaactccgtcttgaaagaaagaaaagaaaagaaaagaacacctaggtcgggtgcggtggctcacgcctgtaatcccagcactttgggaggctgaggcgggcgatcacctgaggtcaggagttcgagaccagcctggccaacatggtgaaaccccctctctactaaaaatacaaaaattagctgggcgtggtcgccggcgcctgtaatcccagctactcgggaggctgaggcaggagaatcacttgaacccgggaggcggaggttgcagtgagtagagatcgtgccactgcactccagcccgggtgacagagcaagactccatctaaaaaaaaaaaaaaaaaaaagaaaagaacacctgagctaaatttaagaagaaaccacctacgtcaggacctagaggaagagcagtgtcaagcaaaggaacagcaagtacaaagtcttgtggccagaataatgctgtactggcgagctagaagaataggacagaataacccgattataaaaggggcagtgggagagaaaggcgagtactaggagatgaagttgaagaattaagcagagaccagatcaagtactgccttgctctggccatgaaaaaagtatggattttagtctaagtgtgctcaagcatcagttttgtttgtttgttatttttaataagcaggggaatggcacaatctaatgtctgctcttagaagacggatagctgttacgtgggaattatttgtaaagaatgtgggaaaagcagaggcaagaaaggcaggccgaaggttattgcaacagccctggcaagaaagggtagcttgaattacaacggcagtggaaatggagagaagtgaatgggtttaggatatattttggccctgaaatggcagggcttgctgctggaatagacgtggggatgtaggaaagaggagtcacaggtaatccctcgagttccttgtactgtaactggagtatatctccctcctgagggtagctaaggaacgggttgggacagagggttggttttttgcaccaaaagatctattttggacatggacatgttatgcaaagatgctattatctcttctaggggcgatgcccgtgagcaactggataatcaaatctggagcatttcagtctcaaacacctcctcagagtgatcccaggagatctctgcagccacggtgacattttctttatctgaagcgatgacacagctcactgaatgccattcttccacatgctggaaaagcgaggtctagtgaacacaattcctttccgtgcggaaagtctgaaatctttttaacacttcggacacagagcatcgtaaggtcccagaatagagggtgtgagcaatttcagcgctcacctcggcccaagcgaagctccagcgggagcaattgagacccagggacgaagctagggagggcctggcagcccccggcactggccggcaggggtaacccaggaaaaacagtctcctggcctctcgttacccgcttcaggccctccgccctcccctggcctctcgggacggccgcgcttacctgaaccgaactgtacgcacaagcgcgctcctgactccaggtgcacaccgtggaggcctgaaacgagagccatgaccgcgacgcgctgaacaaaccaagccgccagttttccgtcccgtcccggccccggccctggcgaggtgcgcatgcgcagggccgggagctaggaccccgcggcaggcgggcgcgtccgcgtcgcacggaagtctcgcgatgtttgcgtttgaacctcttggcgggtgccggccatggcggcttcgctcccgggacctgggagccggcttttccgcacatatggggctgcggacggcaggagacagcggcggccgggccgggaagccgcgcagtggttcccgccgcaggaccggaggcgtttcttcaacagcagcggcagcagcgacgccagcatcggcgacccctcgcagtccgacgatcctgacgatcccgacgaccccgacttccccggcagcccggtgaggcggcggcggaggcgtcccggcggccgagtgcccaaggaccggcccagcctgaccgtgaccccaaagcgctggaagctgcgagctcgcccaagcctaaccgtgaccccaagacgcctggggctgcgagctcggcccccgcagaagtgcagcacaccctgcggcccgctccgacttccgcccttccccagccgcgactccggccgcctcagcccggacctcagcgtgtgcggccagcccagggacggcgacgagctgggcatcagtgcctccctgttcagctctctggcctcgccctgccccgggtccccaacgccaagggacagtgtcatctcgatcggcacctccgcctgtctggttgcagcctcagccgtcccgagcggcctccacctcccagaagtctccctggaccgagcatctctcccctgctcccaggaggaagcgacaggaggagccaaggacaccaggatggtccaccaaacccgcgccagcctcaggtcagttctctttggccttatgaactcaggaacccctgaggattctgagtttcgggcagatgggaagaatatgagagagtcctgctgtaaaaggaaactggtggtgggaaatggaccagagggtccaggtctgtcaagcacaggcaagaggagggccacaggccaggactcttgtcaagagagagggcttcaagaggccgtccggagagagcatcaggaggccagtgttcccaagggccgcattgtgccaaggggaatagacaggctggagagaactagatcaagccggaagagcaaa

SEQ ID NO: 1912 - DNA, 6000 bp, Homo sapiens
cggccccaacctgcttttaggtcctaatacctcctccttttctgtctgaaatctccctctgcctttctaaggagacttttcactggatttagggtccatccaaataatgcaggatgatctccttatctccatatccttaattatacctgtaaagacccctttgctgaataaggcaacattcacaggttccaggaattaggacatggacctatcttcggagggatcactgttcgacccactacagcagattctgaataagctataaatgtgaaaaagatagtgttttcaattgagtaaaaagtcatactggaaagaaatataccatggcattatagacagcagaaaataaaaaaccaaaccctttaaaacacatatatttaatgtacagaattggaaaaaggacttcttgataataaacatatttcatgtaaacacaagctttcaatatctatgaatatttcattgcaaatacaccctaagttacttcttctctacataaaggagaaactccaagttctgctctttaggaagacatggagggcaagcaataccttaggaacaaccattgctatttctcccctttccttgggtgacctaacattttacagggactaacgacataaagaaatattagattccattgagtttaaacacaaatttcccactgagggcattaaatatttgatgcttatgagtgtgaataaataaatattaggtataaggcagattccaaaaccaactgaagtatgaaaacaaattggcatagatacctaacagtcagtaaaattaaatttcactactgagtatatgctacatgcttccttttctactccagtgggttctgctttttttgtctaaggtcttctgctggactctaagacagtcaattgcttaacatcaccaggttttttgtcaggggatttattttggaaataaaccaacttcttttttattaaagatcaaggttgtcttttttgctacatgcttctttccactacatattgactccctcatgaaagaaaattcacaggacgagagcaagtactctatgttggctgttccgcagtgtaatgactggttaataaaagagccactcagcctggacaatatagtgaggcctcgtttctgcaaaaaaattagccaagcatggtgacacgcacctgtggtcctagctacttgggaggctgaggcaggaggatcacttgagcccaggacacagaggttgcagtgagccaagattgtgccactgaaatctactctaacctgggtgacagaaagggaccttgtctcaaaaacaataataataatattaaaggagccacccgtttaatccttttcttgtctggtctcatccaaagagtaagccaaaataatcaaggtcacaaaggacttatgaccaaggtgtaactctgcaaatatctttaactggtcatggcttctttgttggatcccttcccacttattagaagactcagatgcttcagcctagttcaaagtagtacacttcatacctcagcaaagtggaccaaaaaagaggaaaacacagaatacaagaaagagttgacaaagcaaatctaataaaaagtatggttggtttgaacagtcactggtatgatttgaacagtccttatggtttgaacagtccttatgattctactttttgacaggctcctccttttgactactgagcaattaagatattttcagtcgtttcgattccttttccacattgtctctaatgttctgtagttttctggagttctgaaccagggatactaaactctccctaaaatcactagtcccatgatctctgccaacattatgaagctcatcaaagaaagtcaacgtctgtttgagtttggcctgaacaattttttgctcttctaattctgcaagaagggcctgcttagtacataattcagtcttgtacttctcctgtaactgttcaatttctttctggagatgctgaaaatcttcctcactataaggtgtctccttacatttatcttcaggaagcaagatgtttgagggaatacgtaaaatcagctgcaaaaacagttgctccattttgctaaaaaggttatcaaaatgtcctttcatgaagcaaagaaacttctctgtgcatttgcgaatctgcactgggctaatgtcacagtctgggatgccatccagcttcttcagaataacctgttcaacggcctgcatcacttcaaataggtagtcttgaaatgcaatgtagatccgaagcatgcacgtttgtggcgtgaagccaaagaactgggcctcgtaggtcattggatccacagacatcttggcttattttgctatgttgttttcagtcgtgaaaaacctgcaaatgtaaaaaggaaataattcatttggaaaaaaaaaatcttctgcaggaagtaaccaatcacattacagatagcaaacaaagaagcaaatcaataaaaaataaggagtttgtgttcctttatacctgatgccactcccacaacaggatataaactctttgcctctctgaggctccttccatcagcctataccctcccttttcccctcctcgttgttcacttcccttacctgtgactttggcacagatcagtcttctgaattatcatcctagacaactttgaagtctagacagatgacttaaccaatgccctagagactcagtttcttgagcttcaatgacctatagctccaccttttagccacctggctcttgatatttgtaactactcttccaaactgcttctactttttgactactgcctcctacacaattcttccaattcttacccatatactcatattataccctaatcttcaagatttacagcccctccaccctctctttctgttctcagcctctgccacttctcttctttccttattcattttaggcctcatgatctatcattttgatcactccgttgccaatgtcctcaatttgcttgtcctccagccaagccatctgaaaaaaacccaattagaagatgagtaagtcccttgtcagctttataaccctgacatgttttttcaagggtctgcgagtaattcctctcaaatataaacatctaggaaaataaaacccctatctccttgtcattgtgggaattcaacctaggcatctttttctgagatgaaatgatattgcttgtcatagaaataagagaaattttattattccttcagataaaggcaattagctaaaacaaactgctacttcaattatcaggtgaatttaggacgcactttatgaaataatttgcaataagcagtacagtcaaatcttatgggaagataagatgcagccaatcttaagaatttatgtttgtaggctgagcacgatagctcatgcctgtaatctcagcactttaggaggccggatggacgaatcacctgaggtcaggagttcgagaccagcctggccaacatggcgaaaccctatctctcctagaaatacaaaaattacccaggcgtgatggtggatacttgcaatcccagctactcgggaggctgaggcaggagaatcactggaacccgagaggcgaaggttgcggtgagccgagattgtgccactgcaccccagcctgggcaacagagcgagactctgtctcaaaaaataaaataaaataaaaatttacgtttgtaatggttaaatatggagtggttataactgtttggctgtatatgtaaggtaggatttctttctgtttttctttttttcttttgagacatgttgtcgctctgtcgcccaggctggaatgcagtggcacgatcacagatcactgcagcctcaacctcccgcgcccaagcaatcctcccacctcagtctcccaagtagccgggacaacaggtgcaggccaccatgcctggctaattttcttgttgttgttgttgtttgagacaaagtgtcactctttcgcccaggctggagtacagtggtatgatctcggctcgctacaacctctgcctcctaagttcaagtgatcctcttagctcagcctcccaagtagctgggattacaggtgggcgccatctcaaacaacaacaaaaaaatacacttccttgattaactcctttcttcgaattcccattaggacctctcttcgggcactgactgatgaacttctaccgcctcatcttctctgctagacttagagttcctgagagcagaataaatgcggcttgatcagtatttgccgattcaacgcagaggtgcccaggtcatctcggcgagttgagctgtctaagaccccgcgatcgcgcaggacaggacccagaagccagagcgcaggaactgcttccggccggctcccggcttccgtcgggccccgcgcccgcgctgcatgctgggatcttcaggtcggaggccggggtgaggccgacccacaggccgccttgctccctcgcgaagacgcttatgccagtctcgcccgtccccgctcctcctcagagaaaatgctgccccgcagcacttaccggagcgaccatgagggtgacgatttgaagcacacacaggcttcccgccacctcctttaaaccgccgctggcttgccagggacagacggcgcggttggctccccaaaattccgactgatacgcgcctcggcgagcgaaagcaaacgcgggatactctcgcgttcctgattggctggttgtggacacctcaattatgacagaaaggggccgggcgggaaagttagctgtggccggcggggattggcagaaggaacctgtacttactcgtttttcccggacgttggctggtggagaagagagggtggggagatggggcgctgggggggggcggtggcgacgcaactcgtgattggcggatgtgcgttccttaggtctctacggattgcggttgcttggcgttgattgggcagtcgcgggaaaactaaagtgggcggggggcctttgggcccgccccgccgccggggcctgctggcggaaggggaaatggggtgggtggggggtggggcaggcgacggtggggaagatggcgtaccagagcttgcggctggagtacctgcagatcccaccggtcagccgcgcctacaccactgcctgcgtcctcaccaccgccgccgtggtgagcagctgcagtgccaccttctcattatctgggctggatatgactgggtcttcaggaaactggggtttgggcctcggggaggcccagaggggctggtcccggggatgggtggaggcgtacagggattactctggggttcgagttggcgccaagaatgcttatccagtgacgcgagaagggagtgctgcttcatggggggtcaggtcagtttctaagagatgagcgccggacctatagcgggttagggttgcgggagcctcccacccaagaaatgtgtccgagagctctgccaatggccaggtggtaccatggtgactagtgagaggaaggtccgtttagtgaagaaacaggaatggggaaagcaagctggaaactgtcgagaggggaatggcttataataaaaagggtctctggatctaaataaggggctagctggaggtacccagccctaacggtggcagggtctccagtctccgttatttcaagtgagttttgttgtttcatacagctgtttcaggtggtgcccatgtggtgggtagattcatagcagctgtttttatttgtcctgtgtctaaaatatcaccacctgtctgcctcatttcttcatgtcagcctcaactattgcaacataaaacagacttttttgtgttaggtattgaggatacaaagaattctaccaatcctagagaattctttaccaacctcttcctctggcctaagaagaaaggcttaaaggaaatcacgtctaagtgaccgagagttggaaattgctagacctactaattctttgttgtaaatgatgaaattttgtttcttgatttgctttaagaagctctttttctatttcagcagttggaattgatcacaccttttcagttgtacttcaatcctga

SEQ ID NO: 1913 - DNA, 6000 bp, Homo sapiens
cttttttttttttcttttgagacagagtctcgctctgtcacctaggatggagtgcaatggtgccatatcggctcactgcaagctccgcctctcagattcaagcgattctcctgcctcattctcctgagtagctgggattacagttgtgtgccaccatgccaggctattttttgtatttttagtagagagcaggtttcaccatgttggccaggctggtctcaaactcctgacctcgtgatccactgccttggcctccccaagtgctgggattacaggtgtgagccaccacacccggccctccagtcccctattaaacctttaaaaatttgtattgtctttcctgtgctcagccacaccttaatatgcaccatctttgctttcccacatcctaacttggaagaaatccgcagcaagaagccttgtgtgctcaactacttttccagcctggcaggttgagcacctcagtcaataaagatgaattacgatgagaaaaaactttaatggaaacttatcagaatgatatcctacataggatataaaatggattcctgccatcctcaggaaggaatgcagctgcagatgagttgaactgtaactccctcttaatacagagggcaggggtggaagaggaatgccctgctctgtggccccaattaccattggatcagagctggggttttcctttcaacaaaccggaacttgacaagcccagcagacacaaccactgtctttcagccagtagttccagcaaccaggacccaaggagatctcaggttcccactcctcatgaacccattccaaaacttatgcccaaattctgctgaattaccattgcattcaggttgttttacggcttcgaacctgttggttactgtggaggtatgcctcagttaaatcaattctcccctcccttgatcagatttgtaagtaacaaaagagcagaagtgctatctttttatggttaaaacctcccatttgaacaaagtgacctacagacattttcaaaacattactacctaagcaactactttatgtaccactgacccagaaatcatagctaagatggtaccaaaaacaagtaacaggatgaaaagtttcaacttaattttttacttcctaagaaaaagttttgatgctgaccccatttaataaaggatacagaaaaatcatgttaaataaaaaattgaatccaactggcccaaaaaataagaagttggtgattaatctccatatctgttaaaaaaaaatcaagagaaagatgtattaagtaaaataaattaccaggaaacagttccatattaatacaaaagaaacatcctatgactgcggtggttgagaagccttggacagagtgatactctgttctgaaacaaaaacgggggcatataatctgatgttagattttttttgctgcttttagttcaaagtctgaaagacatcattgggactgtgacatttataataataggaaagaaaattttaaattgtgatcgtcgtatggagaaagtttgctggaaagactaggttaatcggcagaacagaaaacagtgctttcatatgtagtatcatcatataataaatagaactgacatatcagagaaaaacttcagggtctaatataaattgctgagaaatgtttacattaggcagtcagaaacatctaaaagaaaggaaaattctttttttttaaactaaaacttaaaaaaaaaaaaaaagagataggttctcactatgttgtccaggctgactcaaactcctggcctcaggggatcatccacctcagcctcccaaagtgctgggattacaggcgtgagccactgcaccctgccaaacacttattttcttgttggaaaccctgatagacccttccctacccaacatctccacacccacagtaaccactctcaattgtagagtgcttaacgttttaaaatgtctactatctcttgtgatccacagacaagcaagctacccccaattcacagataggagactaaaagttgactgactagctgaatactagttattcagctaaaagttgaacttttaaatgtcctgaccaaggacccgcaggagtagatggaaactctgatggcaaatctagaactcctaactccaaatgcacagtgtcatcaagagtttaaccccaggcagagtaaagccaagtaggaagcaagacttacttggatggaactacagcgccatgtgagtattgtgcgaacacagtgacaagagatgacaggactgctttacagaccactaaattcttgagaattgttaactattaaagttgaaacaattcagttctacatattaattatccagattttagagtcctcatcctagtgaggagacaagcatacgcataactgcaaagtaaaagtgagagatgttctaaaacaaaggaggatgagtacataaaggttacacaaaagctgcgttttgaaaggcaagctagagttcaatggatataaagtgaatgaaacacatttgagacagacagaacagcatgtgtagaggcacagttattggcttttgggtctctcccctactccaactatggtaagatcatcctggaacagaaaaatccatctctcttttagcattttattttgagacagggtttcgctcttgtctcccaggctggagtgcaatggcacaatctcggctcactgcaacctccgcctcccgggttcaagtgattctcctgcctcagcctcgccagtagctaggattacaggcatgtgccatcacgcctggctaatttttgtatttttagtaagagacagggctttaccatgttggccaggctggtcttgaactcctgacctcaggtgatctgcctgcctcagcctcccaaagtgctgggattacaggcgtgagccactgtgcccagcctcttttggcattttaatcactggaaaggaccatctcccattgtaatctaataaaccaccatatagctttagatgtttggaatttggttagtatgatctgatccctggaagacagatcacaatttaaaagcactaacagaattgagtttctggaccatggtgataacaccaaggtggtgggtgtgcctaggtgctgaatggacaaaataaggccatccctgtgagacaacccctaagcagctagctagtcagcctcctctcataggacaacgttaagtctaaaccagtgatttccaaatacaggaactggacacatcaaaacgatgcagggaactttaaaaataaaacacagattttaattcctacccttgcaaattctgatttggtacttgttgaggagcttgagaatctcttcaaagttccctaagggattctcaagtccaaccaggctgcagaatcactgctttatatcctgacaaggcaacttataatcaaaggtccccactgggttcttttttaggatagtgtataacaggatttgctactaaacagtaagaaaaagaagaaactgaagcattaatcactattgtgatgaaccacttacttgaaagtgtttaaagattaattcaggattgaagtacaactgaaaaggtgtgatcaattccaactgctgaaatagaaaaagagcttcttaaagcaaatcaagaaacaaaatttcatcatttacaacaaagaattagtaggtctagcaatttccaactctcggtcacttagacgtgatttcctttaagcctttcttcttaggccagaggaagaggttggtaaagaattctctaggattggtagaattctttgtatcctcaatacctaacacaaaaaagtctgttttatgttgcaatagttgaggctgacatgaagaaatgaggcagacaggtggtgatattttagacacaggacaaataaaaacagctgctatgaatctacccaccacatgggcaccacctgaaacagctgtatgaaacaacaaaactcacttgaaataacggagactggagaccctgccaccgttagggctgggtacctccagctagccccttatttagatccagagaccctttttattataagccattcccctctcgacagtttccagcttgctttccccattcctgtttcttcactaaacggaccttcctctcactagtcaccatggtaccacctggccattggcagagctctcggacacatttcttgggtgggaggctcccgcaaccctaacccgctataggtccggcgctcatctcttagaaactgacctgaccccccatgaagcagcactcccttctcgcgtcactggataagcattcttggcgccaactcgaaccccagagtaatccctgtacgcctccacccatccccgggaccagcccctctgggcctccccgaggcccaaaccccagtttcctgaagacccagtcatatccagcccagataatgagaaggtggcactgcagctgctcaccacggcggcggtggtgaggacgcaggcagtggtgtaggcgcggctgaccggtgggatctgcaggtactccagccgcaagctctggtacgccatcttccccaccgtcgcctgccccaccccccacccaccccatttccccttccgccagcaggccccggcggcggggcgggcccaaaggccccccgcccactttagttttcccgcgactgcccaatcaacgccaagcaaccgcaatccgtagagacctaaggaacgcacatccgccaatcacgagttgcgtcgccaccgcccccccccagcgccccatctccccaccctctcttctccaccagccaacgtccgggaaaaacgagtaagtacaggttccttctgccaatccccgccggccacagctaactttcccgcccggcccctttctgtcataattgaggtgtccacaaccagccaatcaggaacgcgagagtatcccgcgtttgctttcgctcgccgaggcgcgtatcagtcggaattttggggagccaaccgcgccgtctgtccctggcaagccagcggcggtttaaaggaggtggcgggaagcctgtgtgtgcttcaaatcgtcaccctcatggtcgctccggtaagtgctgcggggcagcattttctctgaggaggagcggggacgggcgagactggcataagcgtcttcgcgagggagcaaggcggcctgtgggtcggcctcaccccggcctccgacctgaagatcccagcatgcagcgcgggcgcggggcccgacggaagccgggagccggccggaagcagttcctgcgctctggcttctgggtcctgtcctgcgcgatcgcggggtcttagacagctcaactcgccgagatgacctgggcacctctgcgttgaatcggcaaatactgatcaagccgcatttattctgctctcaggaactctaagtctagcagagaagatgaggcggtagaagttcatcagtcagtgcccgaagagaggtcctaatgggaattcgaagaaaggagttaatcaaggaagtgtatttttttgttgttgtttgagatggcgcccacctgtaatcccagctacttgggaggctgagctaagaggatcacttgaacttaggaggcagaggttgtagcgagccgagatcataccactgtactccagcctgggcgaaagagtgacactttgtctcaaacaacaacaacaacaagaaaattagccaggcatggtggcctgcacctgttgtcccggctacttgggagactgaggtgggaggattgcttgggcgcgggaggttgaggctgcagtgatctgtgatcgtgccactgcattccagcctgggcgacagagcgacaacatgtctcaaaagaaaaaaagaaaaacagaaagaaatcctaccttacatatacagccaaacagttataaccactccatatttaaccattacaaacgtaaatttttattttattttattttttgagacagagtctcgctctgttgcccaggctggggtgcagtggcacaatctcggctcaccgcaaccttcgcctctcgggttccagtgattctcctgcctca

SEQ ID NO: 1914 - DNA, 6000 bp, Homo sapiens
ccgagttcaaacactggatttcacccttctatccaggtcatgaccatacttaactgtattaagatgaaccatattactgcatataataatgtcaaggcctcagcagtagtttccttaatagatagcttatatcctcatgaacatctcaatattctgatttcactaacatgcctactaataggtatattgtttcctgtgactgctgtaacaaactgatgacttaaaacatattctctcacagttctggaagccagaaatgcaatccacctgttggctctaaggcagaatctcttctttgcctcttccagcttgtgggggctgcattactccaaactttttttttttttttttttttctgagatggagtcttgctctgtcaccgggctggagtgcagtagcacgatctctgctcactgcaacctccgcctcccgggttcaagcgattctcctgcctcagcctcccgagtagctaggattacaggcatgtgccaccacacctggctaattttttatatttttagtagagacaggttttcaccatgctggctaggctggtcttgaacacctgacctcaagtgatctgcccacctaggcctcccaaagtgctgggattacaggtgtgagccaccatgcccggccccaacctgcttttaggtcctaatacctcctccttttctgtctgaaatctccctctgcctttctaaggagacttttcactggatttagggtccatccaaataatgcaggatgatctccttatctccatatccttaattatacctgtaaagacccctttgctgaataaggcaacattcacaggttccaggaattaggacatggacctatcttcggagggatcactgttcgacccactacagcagattctgaataagctataaatgtgaaaaagatagtgttttcaattgagtaaaaagtcatactggaaagaaatataccatggcattatagacagcagaaaataaaaaaccaaaccctttaaaacacatatatttaatgtacagaattggaaaaaggacttcttgataataaacatatttcatgtaaacacaagctttcaatatctatgaatatttcattgcaaatacaccctaagttacttcttctctacataaaggagaaactccaagttctgctctttaggaagacatggagggcaagcaataccttaggaacaaccattgctatttctcccctttccttgggtgacctaacattttacagggactaacgacataaagaaatattagattccattgagtttaaacacaaatttcccactgagggcattaaatatttgatgcttatgagtgtgaataaataaatattaggtataaggcagattccaaaaccaactgaagtatgaaaacaaattggcatagatacctaacagtcagtaaaattaaatttcactactgagtatatgctacatgcttccttttctactccagtgggttctgctttttttgtctaaggtcttctgctggactctaagacagtcaattgcttaacatcaccaggttttttgtcaggggatttattttggaaataaaccaacttcttttttattaaagatcaaggttgtcttttttgctacatgcttctttccactacatattgactccctcatgaaagaaaattcacaggacgagagcaagtactctatgttggctgttccgcagtgtaatgactggttaataaaagagccactcagcctggacaatatagtgaggcctcgtttctgcaaaaaaattagccaagcatggtgacacgcacctgtggtcctagctacttgggaggctgaggcaggaggatcacttgagcccaggacacagaggttgcagtgagccaagattgtgccactgaaatctactctaacctgggtgacagaaagggaccttgtctcaaaaacaataataataatattaaaggagccacccgtttaatccttttcttgtctggtctcatccaaagagtaagccaaaataatcaaggtcacaaaggacttatgaccaaggtgtaactctgcaaatatctttaactggtcatggcttctttgttggatcccttcccacttattagaagactcagatgcttcagcctagttcaaagtagtacacttcatacctcagcaaagtggaccaaaaaagaggaaaacacagaatacaagaaagagttgacaaagcaaatctaataaaaagtatggttggtttgaacagtcactggtatgatttgaacagtccttatggtttgaacagtccttatgattctactttttgacaggctcctccttttgactactgagcaattaagatattttcagtcgtttcgattccttttccacattgtctctaatgttctgtagttttctggagttctgaaccagggatactaaactctccctaaaatcactagtcccatgatctctgccaacattatgaagctcatcaaagaaagtcaacgtctgtttgagtttggcctgaacaattttttgctcttctaattctgcaagaagggcctgcttagtacataattcagtcttgtacttctcctgtaactgttcaatttctttctggagatgctgaaaatcttcctcactataaggtgtctccttacatttatcttcaggaagcaagatgtttgagggaatacgtaaaatcagctgcaaaaacagttgctccattttgctaaaaaggttatcaaaatgtcctttcatgaagcaaagaaacttctctgtgcatttgcgaatctgcactgggctaatgtcacagtctgggatgccatccagcttcttcagaataacctgttcaacggcctgcatcacttcaaataggtagtcttgaaatgcaatgtagatccgaagcatgcacgtttgtggcgtgaagccaaagaactgggcctcgtaggtcattggatccacagacatcttggcttattttgctatgttgttttcagtcgtgaaaaacctgcaaatgtaaaaaggaaataattcatttggaaaaaaaaaatcttctgcaggaagtaaccaatcacattacagatagcaaacaaagaagcaaatcaataaaaaataaggagtttgtgttcctttatacctgatgccactcccacaacaggatataaactctttgcctctctgaggctccttccatcagcctataccctcccttttcccctcctcgttgttcacttcccttacctgtgactttggcacagatcagtcttctgaattatcatcctagacaactttgaagtctagacagatgacttaaccaatgccctagagactcagtttcttgagcttcaatgacctatagctccaccttttagccacctggctcttgatatttgtaactactcttccaaactgcttctactttttgactactgcctcctacacaattcttccaattcttacccatatactcatattataccctaatcttcaagatttacagcccctccaccctctctttctgttctcagcctctgccacttctcttctttccttattcattttaggcctcatgatctatcattttgatcactccgttgccaatgtcctcaatttgcttgtcctccagccaagccatctgaaaaaaacccaattagaagatgagtaagtcccttgtcagctttataaccctgacatgttttttcaagggtctgcgagtaattcctctcaaatataaacatctaggaaaataaaacccctatctccttgtcattgtgggaattcaacctaggcatctttttctgagatgaaatgatattgcttgtcatagaaataagagaaattttattattccttcagataaaggcaattagctaaaacaaactgctacttcaattatcaggtgaatttaggacgcactttatgaaataatttgcaataagcagtacagtcaaatcttatgggaagataagatgcagccaatcttaagaatttatgtttgtaggctgagcacgatagctcatgcctgtaatctcagcactttaggaggccggatggacgaatcacctgaggtcaggagttcgagaccagcctggccaacatggcgaaaccctatctctcctagaaatacaaaaattacccaggcgtgatggtggatacttgcaatcccagctactcgggaggctgaggcaggagaatcactggaacccgagaggcgaaggttgcggtgagccgagattgtgccactgcaccccagcctgggcaacagagcgagactctgtctcaaaaaataaaataaaataaaaatttacgtttgtaatggttaaatatggagtggttataactgtttggctgtatatgtaaggtaggatttctttctgtttttctttttttcttttgagacatgttgtcgctctgtcgcccaggctggaatgcagtggcacgatcacagatcactgcagcctcaacctcccgcgcccaagcaatcctcccacctcagtctcccaagtagccgggacaacaggtgcaggccaccatgcctggctaattttcttgttgttgttgttgtttgagacaaagtgtcactctttcgcccaggctggagtacagtggtatgatctcggctcgctacaacctctgcctcctaagttcaagtgatcctcttagctcagcctcccaagtagctgggattacaggtgggcgccatctcaaacaacaacaaaaaaatacacttccttgattaactcctttcttcgaattcccattaggacctctcttcgggcactgactgatgaacttctaccgcctcatcttctctgctagacttagagttcctgagagcagaataaatgcggcttgatcagtatttgccgattcaacgcagaggtgcccaggtcatctcggcgagttgagctgtctaagaccccgcgatcgcgcaggacaggacccagaagccagagcgcaggaactgcttccggccggctcccggcttccgtcgggccccgcgcccgcgctgcatgctgggatcttcaggtcggaggccggggtgaggccgacccacaggccgccttgctccctcgcgaagacgcttatgccagtctcgcccgtccccgctcctcctcagagaaaatgctgccccgcagcacttaccggagcgaccatgagggtgacgatttgaagcacacacaggcttcccgccacctcctttaaaccgccgctggcttgccagggacagacggcgcggttggctccccaaaattccgactgatacgcgcctcggcgagcgaaagcaaacgcgggatactctcgcgttcctgattggctggttgtggacacctcaattatgacagaaaggggccgggcgggaaagttagctgtggccggcggggattggcagaaggaacctgtacttactcgtttttcccggacgttggctggtggagaagagagggtggggagatggggcgctgggggggggcggtggcgacgcaactcgtgattggcggatgtgcgttccttaggtctctacggattgcggttgcttggcgttgattgggcagtcgcgggaaaactaaagtgggcggggggcctttgggcccgccccgccgccggggcctgctggcggaaggggaaatggggtgggtggggggtggggcaggcgacggtggggaagatggcgtaccagagcttgcggctggagtacctgcagatcccaccggtcagccgcgcctacaccactgcctgcgtcctcaccaccgccgccgtggtgagcagctgcagtgccaccttctcattatctgggctggatatgactgggtcttcaggaaactggggtttgggcctcggggaggcccagaggggctggtcccggggatgggtggaggcgtacagggattactctggggttcgagttggcgccaagaatgcttatccagtgacgcgagaagggagtgctgcttcatggggggtcaggtcagtttctaagagatgagcgccggacctatagcgggttagggttgcgggagcct

SEQ ID NO: 1915 - DNA, 6000 bp, Homo sapiens
gtgagccaccacacccggccctccagtcccctattaaacctttaaaaatttgtattgtctttcctgtgctcagccacaccttaatatgcaccatctttgctttcccacatcctaacttggaagaaatccgcagcaagaagccttgtgtgctcaactacttttccagcctggcaggttgagcacctcagtcaataaagatgaattacgatgagaaaaaactttaatggaaacttatcagaatgatatcctacataggatataaaatggattcctgccatcctcaggaaggaatgcagctgcagatgagttgaactgtaactccctcttaatacagagggcaggggtggaagaggaatgccctgctctgtggccccaattaccattggatcagagctggggttttcctttcaacaaaccggaacttgacaagcccagcagacacaaccactgtctttcagccagtagttccagcaaccaggacccaaggagatctcaggttcccactcctcatgaacccattccaaaacttatgcccaaattctgctgaattaccattgcattcaggttgttttacggcttcgaacctgttggttactgtggaggtatgcctcagttaaatcaattctcccctcccttgatcagatttgtaagtaacaaaagagcagaagtgctatctttttatggttaaaacctcccatttgaacaaagtgacctacagacattttcaaaacattactacctaagcaactactttatgtaccactgacccagaaatcatagctaagatggtaccaaaaacaagtaacaggatgaaaagtttcaacttaattttttacttcctaagaaaaagttttgatgctgaccccatttaataaaggatacagaaaaatcatgttaaataaaaaattgaatccaactggcccaaaaaataagaagttggtgattaatctccatatctgttaaaaaaaaatcaagagaaagatgtattaagtaaaataaattaccaggaaacagttccatattaatacaaaagaaacatcctatgactgcggtggttgagaagccttggacagagtgatactctgttctgaaacaaaaacgggggcatataatctgatgttagattttttttgctgcttttagttcaaagtctgaaagacatcattgggactgtgacatttataataataggaaagaaaattttaaattgtgatcgtcgtatggagaaagtttgctggaaagactaggttaatcggcagaacagaaaacagtgctttcatatgtagtatcatcatataataaatagaactgacatatcagagaaaaacttcagggtctaatataaattgctgagaaatgtttacattaggcagtcagaaacatctaaaagaaaggaaaattctttttttttaaactaaaacttaaaaaaaaaaaaaaagagataggttctcactatgttgtccaggctgactcaaactcctggcctcaggggatcatccacctcagcctcccaaagtgctgggattacaggcgtgagccactgcaccctgccaaacacttattttcttgttggaaaccctgatagacccttccctacccaacatctccacacccacagtaaccactctcaattgtagagtgcttaacgttttaaaatgtctactatctcttgtgatccacagacaagcaagctacccccaattcacagataggagactaaaagttgactgactagctgaatactagttattcagctaaaagttgaacttttaaatgtcctgaccaaggacccgcaggagtagatggaaactctgatggcaaatctagaactcctaactccaaatgcacagtgtcatcaagagtttaaccccaggcagagtaaagccaagtaggaagcaagacttacttggatggaactacagcgccatgtgagtattgtgcgaacacagtgacaagagatgacaggactgctttacagaccactaaattcttgagaattgttaactattaaagttgaaacaattcagttctacatattaattatccagattttagagtcctcatcctagtgaggagacaagcatacgcataactgcaaagtaaaagtgagagatgttctaaaacaaaggaggatgagtacataaaggttacacaaaagctgcgttttgaaaggcaagctagagttcaatggatataaagtgaatgaaacacatttgagacagacagaacagcatgtgtagaggcacagttattggcttttgggtctctcccctactccaactatggtaagatcatcctggaacagaaaaatccatctctcttttagcattttattttgagacagggtttcgctcttgtctcccaggctggagtgcaatggcacaatctcggctcactgcaacctccgcctcccgggttcaagtgattctcctgcctcagcctcgccagtagctaggattacaggcatgtgccatcacgcctggctaatttttgtatttttagtaagagacagggctttaccatgttggccaggctggtcttgaactcctgacctcaggtgatctgcctgcctcagcctcccaaagtgctgggattacaggcgtgagccactgtgcccagcctcttttggcattttaatcactggaaaggaccatctcccattgtaatctaataaaccaccatatagctttagatgtttggaatttggttagtatgatctgatccctggaagacagatcacaatttaaaagcactaacagaattgagtttctggaccatggtgataacaccaaggtggtgggtgtgcctaggtgctgaatggacaaaataaggccatccctgtgagacaacccctaagcagctagctagtcagcctcctctcataggacaacgttaagtctaaaccagtgatttccaaatacaggaactggacacatcaaaacgatgcagggaactttaaaaataaaacacagattttaattcctacccttgcaaattctgatttggtacttgttgaggagcttgagaatctcttcaaagttccctaagggattctcaagtccaaccaggctgcagaatcactgctttatatcctgacaaggcaacttataatcaaaggtccccactgggttcttttttaggatagtgtataacaggatttgctactaaacagtaagaaaaagaagaaactgaagcattaatcactattgtgatgaaccacttacttgaaagtgtttaaagattaattcaggattgaagtacaactgaaaaggtgtgatcaattccaactgctgaaatagaaaaagagcttcttaaagcaaatcaagaaacaaaatttcatcatttacaacaaagaattagtaggtctagcaatttccaactctcggtcacttagacgtgatttcctttaagcctttcttcttaggccagaggaagaggttggtaaagaattctctaggattggtagaattctttgtatcctcaatacctaacacaaaaaagtctgttttatgttgcaatagttgaggctgacatgaagaaatgaggcagacaggtggtgatattttagacacaggacaaataaaaacagctgctatgaatctacccaccacatgggcaccacctgaaacagctgtatgaaacaacaaaactcacttgaaataacggagactggagaccctgccaccgttagggctgggtacctccagctagccccttatttagatccagagaccctttttattataagccattcccctctcgacagtttccagcttgctttccccattcctgtttcttcactaaacggaccttcctctcactagtcaccatggtaccacctggccattggcagagctctcggacacatttcttgggtgggaggctcccgcaaccctaacccgctataggtccggcgctcatctcttagaaactgacctgaccccccatgaagcagcactcccttctcgcgtcactggataagcattcttggcgccaactcgaaccccagagtaatccctgtacgcctccacccatccccgggaccagcccctctgggcctccccgaggcccaaaccccagtttcctgaagacccagtcatatccagcccagataatgagaaggtggcactgcagctgctcaccacggcggcggtggtgaggacgcaggcagtggtgtaggcgcggctgaccggtgggatctgcaggtactccagccgcaagctctggtacgccatcttccccaccgtcgcctgccccaccccccacccaccccatttccccttccgccagcaggccccggcggcggggcgggcccaaaggccccccgcccactttagttttcccgcgactgcccaatcaacgccaagcaaccgcaatccgtagagacctaaggaacgcacatccgccaatcacgagttgcgtcgccaccgcccccccccagcgccccatctccccaccctctcttctccaccagccaacgtccgggaaaaacgagtaagtacaggttccttctgccaatccccgccggccacagctaactttcccgcccggcccctttctgtcataattgaggtgtccacaaccagccaatcaggaacgcgagagtatcccgcgtttgctttcgctcgccgaggcgcgtatcagtcggaattttggggagccaaccgcgccgtctgtccctggcaagccagcggcggtttaaaggaggtggcgggaagcctgtgtgtgcttcaaatcgtcaccctcatggtcgctccggtaagtgctgcggggcagcattttctctgaggaggagcggggacgggcgagactggcataagcgtcttcgcgagggagcaaggcggcctgtgggtcggcctcaccccggcctccgacctgaagatcccagcatgcagcgcgggcgcggggcccgacggaagccgggagccggccggaagcagttcctgcgctctggcttctgggtcctgtcctgcgcgatcgcggggtcttagacagctcaactcgccgagatgacctgggcacctctgcgttgaatcggcaaatactgatcaagccgcatttattctgctctcaggaactctaagtctagcagagaagatgaggcggtagaagttcatcagtcagtgcccgaagagaggtcctaatgggaattcgaagaaaggagttaatcaaggaagtgtatttttttgttgttgtttgagatggcgcccacctgtaatcccagctacttgggaggctgagctaagaggatcacttgaacttaggaggcagaggttgtagcgagccgagatcataccactgtactccagcctgggcgaaagagtgacactttgtctcaaacaacaacaacaacaagaaaattagccaggcatggtggcctgcacctgttgtcccggctacttgggagactgaggtgggaggattgcttgggcgcgggaggttgaggctgcagtgatctgtgatcgtgccactgcattccagcctgggcgacagagcgacaacatgtctcaaaagaaaaaaagaaaaacagaaagaaatcctaccttacatatacagccaaacagttataaccactccatatttaaccattacaaacgtaaatttttattttattttattttttgagacagagtctcgctctgttgcccaggctggggtgcagtggcacaatctcggctcaccgcaaccttcgcctctcgggttccagtgattctcctgcctcagcctcccgagtagctgggattgcaagtatccaccatcacgcctgggtaatttttgtatttctaggagagatagggtttcgccatgttggccaggctggtctcgaactcctgacctcaggtgattcgtccatccggcctcctaaagtgctgagattacaggcatgagctatcgtgctcagcctacaaacataaattcttaagattggctgcatcttatcttcccataagatttgactgtactgcttattgcaaattatttcataaagtgcgtcctaaa

SEQ ID NO: 1916 - DNA, 6000 bp, Homo sapiens
cctgtaatcccagctactcgggaggctgaggtgggaggatcacttgaacctgggaggcagaggttacagtaagccgagatcacgccaccgcactctagcctgggagatagagcaagaccttgtatcttaaaaaaaaaaagaaaaaaaggccaggctcagtggctcatgcctgtaatcgcaacactttggaaggccgaggcgggcagatcacgagatcaggagatcaagaccatcctggctaacacggtgaaaccccgtctctactaaaaaatacaaaaaattagccgggcgtggtggcgggcgcctgtagtcccagctactcgggaggctgaggcaggagaatggcttgaacccaggaggcggagcttgcagtgagccgagatcgcaccgctgcactccagcctgggcaacagagcgagactccgtctcaataaaaaaaaagaaaggaaaagaaaactagctaggtgaaggaagtcctaggaataagaatccttagagatccttacagaggcaacagcaaggtcaaggctcaaacagcatgttttttttttgtttttttgtttttttgttttttttgagacggagtttagctcttgtcgcccaggctagagtgcaatggtatgatctcggctcaccgcaacctccacctcccgggttcaagcgattcttctgcctcagcctcccaagtagctgggactacaggcatatgacactacgcccggctaattttgtatttttagtagagacggagtttcaccatgttggtcaggctggtctcaaactcctgacctcaggtgatccacccacctcagcctcccaaagtgctgggattacagtgtgggtcaccatgcccggctggcggttcttttttttaaaaaaaaaaaaaaaaaaaaaaaaaaaaagagggaaagaaacaactaaattagcgttttctggtccttccaagcataagaaaaggcagcatcccaggccacattctgggaggtgcagtattccctctctggctggggtgcggagcctggttcttcccaggaggctgtgattatggagtagttctttcttccccaggtgcggatagatttcctaaaccgacagtggacatcttcccttgtcctgggagtcatcacctgcgcgcctgagaggctcaacttccctgcttctgcctgtgccctcaaacgggcagcctggctgctgcggggccgtggggtcttccacaacggtctcaaggtgagtaggagccagagagaaggaacaggaccaggcctgtgagtagagaagggctggccagaagggagaagtgggcccctagccttggaggtaggaccacaggtgtaaaaggggaacagtaatgggcaggcaagggcgagtagcattgcctggtcagtcttaggcctgctgcttcctgcggtgtccctgccattgagaatgtgccagttttggggaaggggaggggctctaggtaactgcagtgggaggagaacctcggcagtgggcaagcatggaggcaaagccaaggcactggcaaaaggaagcagagcaaagggcgggacagctgccgcggtggagtctgacctctggaagacagccggtctctcctcccagatctgcgagaagtttgggcccaatctggacacgtgccctgaaggcaccatcctgggactgcggctggacagctctggggggctgcatcttcatgttaatggggtggaccagggggtagctgtgccagatgtgccccagccctgccatgcgcttgtggacctctatgggcagtgtgagcaggttagtggcagtgggggcagggaggaggggtgcctgagagtctgcgctgtccaggacaggggaaatctctgttccagggagggatcagcaggccctggggtctgaccaagctctgtctgactaccctctcccctgcaggtgacaatcgtgaaccctgagccaggggctgccagtgggaaaagtgctggaacccaaggggacatggagaaagcagacatggtggacggtgtgccagcccaaagggacccagctcctgcccctactcccccaccctcacccttctagcccagctcctgtgacctgtgcccctctgctccctcaggtatcaaagagagtgtgtgctggggtccaccacctgccgctagtcctctaaagagctgcgagtaccatgccctttgctctcgcttccaagaactcctgctgcttcccggtgagtcccacagtccgccagaactgacttcattcccagggccaggcctagagccttggagagcagctggagggtgccactgtggttgaggtgggagccacagcaccaagcctgctactcactgtcccgcagaagattatttcatgcctccgccaaagcgaagcctgtgctactgtgagtcttgccggaagctgcgaggagacgaggcccacaggcgcagaggggagcctccccgggaatatgcactgccctttggctggtgcaggttcaacctcaggtacatatgggcaaggtcatgcctttcccctactgttttccccctggagaaacggggatcccaagagggtgcatggaagaagtaatagaacttcctgtctaaggaaaagccaggaagtgccagggacttcctgtctaaggaagagcctcgtgaagctcctccactggggagtcagtggccttcgttgtatctgccccgcttgtccacctcctagagtgaatccccgcctggaggctgggacactaaccaagaagtggcacatggcatatcacgggagcaatgttgccgctgtacggagagtgctggaccgaggggagctgggagcaggtactggcgagtaggcccatgcaaggtgggctgagcctggggggctgtggaggaataaaaagggctatcctgacccagttctcctcccaggtactgcctccatcctgagctgccgtcctttgaagggagaacctggggtagggttcgaggagcctggcgagaactgtgcacctcctcgggaggagcagccccctcctgtgctgctttccccctcccttcaatatgctggggcggagaccctggcctccaaagtgcagtgagtactgggaggggtggggagagatttccaggggctcggatggagagggcccaagcgcagccactggggtcttcatgattcgccctccccttttctcatctcgtcttgctagctgccagtctccaactcagccctttcttcattcattgaacaaatactacttatatactcttctagtgggcaaaaaaaggaaccttgctcttgtggaacttctgccttttctctctacaatgttcatacgtaataagtattatttatttatttatttttatttttattttttttgagacggagtcctgctctgtcacccaggctggagtgcagtggcgtgatctcactgcaacctccacctcctgggttcaagcgattctcctgcctcagcctcctgagtagctgggactacaggcacgcaccaccaagcccggataatttttgtatttttagtagagacggggtttcgccatgttggccaggatggtctcgatctcctgacctcgtgatccgcccacctcggcctcccaaagggctgggacaggcgtgagccaccgcgccccgccagtatttagtatttttaaaggtaataagtaaggactatggaaacagagaaagaatggggcggagacagcagtgcggttggtgtggacatcctaagaaggtgggagagattcgagcaaaggcttgaagaaggaagtgaagggtgtagctgagcaggctttgggaggaagagcatttcaggtagaacagctagagcgaagttcccataaggtgggagtatttcctaggtacagcaaggcttgtgtggttggaacagactttgcaagggggaggtgatggggcgagaggcttcactcccttattttttcttgtctgacagattccgggaccccaaatcccagcggacgcaccaggctcaggtggcgttccaggtgtgtgtgcgccctggctcctacaccccgggacccccttccgctgcccttggagaacctcctgaccctcacttcagtccagccgaacttgagtgggtcactaaggagaagggggccacactcctctgtgccctgctggtacgggtggaatgaggggtgagacaccactactacaagcacagtcgggccgcgggcccatggactctgagtggcgactgcctccacctcattcccgtgactcgtggcatgcgcaggtgctggagcttggcagccgcgcaggagcatgtaggcaggctctcagatgtaggtggcaagtggcacagctccatgtccggaggcccagcactccgtctgatgggaggagtcgtgggagcccagctccaggccctggtacccctcttcatgcactgatttggggaacatgactcccttttactcccctaccccacatcacttaatttatttccgtttttgtttctggttactgtgaatcccagaggagtctctccctgtgcccacatgaagctgctttttccggggccaccgggcgggagtggggaagggtgggcgcacggaagatgggggcctctgtacagttgttactgactctgatttctaaggagccaataaacaccgtctcagagcctccgcctcggcctctctctcgcgcgcccctctccggagcccgcgtcccctggggtgccaccaggtgggcccgcgaaattaaagagagctgaggatgccaaggccagtctgcagccgtcgtcgctcacgttcccggcgacggggtttgtacgccgcgggcacccgtcgcagcgcgcttccgccttctttcacctgtgaggtcggccgccgccgtgactccggaaggactcggccgggccgccggatgtgacgcaggggccagggcgcgtcggagccgctgagaaagcgcagagaaggcgggtaggaagggcagtcgtccgcgctggctgggcagggagcggcagcagcgagccggggaccccggcgccgcccgcgcgcggtgggactggggctgcggtcccggccgggtggcgggctcctgggacacgtgaccggggcggcgagcgggccgggcggacgggcttccgcctgggccgggcgcggccccctctgagcgcccgcctccccgcaggccccgtctgaggtctggcagtcagagacagccgggcgcccacggcccgagcgcccacggcagcaccatgcccgcactcctggagcgccccaagctttccaacgccatggccagggcgctgcaccggcacattatgatggagcgggagcgcaagcggcagggtgagccggggccatagcagggggacgcacggcccagaatggctcctgtacctcaaggctggcctcaacccaccggccaaccagcgcgcccgctgccgagcgcagaggagggaaggaatagccccgttgtggtgggatttaagcgtcctgttccacgctccagaacccttgagatgggaaggaccttggagagcacctgataaagcctttccgttccctattgccgcgatggggagcttgtcccctcgaggcaaagagcatacaggcgtgttgggatgactgggttttgctggtcttcaatctgtaacgttggaattgttttcactaccctgcctcttcttcattctgcctgattctccagaggaagaagaggtggataagatgatggaacagaagatgaaggaagaacaggagagaaggaagaaaaaggagatggaagagagaatgtcattagaggagaccaaggaacaagtaagcagtcccttgaactttcccagctttgatttcttcgtttgactctccctgccttcatcttcttttcccaccccatcccagattctgaagttggaggagaagcttttggctctacaggaagagaagcaccagcttttcctgcagctcaagaaagttttacatgaggaagaaaaacggaggcgaaaggaacagaggtgggatcagagtg

SEQ ID NO: 1917 - DNA, 6000 bp, Homo sapiens
tttttgttttttgcttttgtttttgttttgagatggaatcttggctctgttgaccaagctggagtgcagtggcacgatcacagctcacggcaacctctgcctcccgggttcaagtgattctcctgcctcagcctcctgagtagctgggattacaggcgtgcgccaccacacctggctaatttttgtatttttagtagagatggggtttcaccatgttggtcaggctggtcttgaactcctgacctcgtgatctgcctgcctcgcactcccaaagtgctgggattacaggcatgagctaccctgcgtggcattcaaaacagtttttgttgttgtttgtttgttttttgagatggagtcttgctctgttttccagactggagtgcaatggtgtgatctcagctcattgcaacctctgcctccccggttcaagccattctcctgccttagcctcccaagtagctgggattacaggtgcctgccaccacacccggcttatttttgtatttttagtagggacagggtttcaccatgttggccgggctggtctcgaactcctgacctcaggtgatctgcccacctcggcctcccaaagtgctaggattacaggcatgagtcaccactccgactcaaaacaggtttcttataccttgttgaggctggggatggggtcagacttaatgataatcacagtcctgtgcagccacggtttatggggcacctgctcttctcccgaaagcctggaacctcggacttcccactcaattgccctcacctactctaactcttcattcttaaggctctgcccctttccttctggctcccaccctcaggtgtcctgaaccctcccgactctgggctggctgcccgcagagctgggctccttacttctccacattgggggatttctgcatcaagttggagctgttctttcgtaggatgctccggggccggtcctgttgggagttttgggggttcaagcaagttggcccagagtgcggactgcacccggggctgtttacctcttgccctgcaggtcccccaggcccggggctggaagccctggatacactggttcgaggcccggggatgttgaatccaccagggttcctgccagacccaaggctgtggttcgcagcctcccttgggtgctgactgggcccggaaccaaggaccactatccccccggagggacagcttgaaccagtactatgagttacggagccccctgagtgcacgtggggcccagaaccgtgaaacaagactactctggagggctgcccagcgcctgcctcgactcctgtgaccgctgcgggcactcctctggctgcccctccaggggaatcccggttgaggccgccagcagcccctagggactccaccttctccatggccccactggggggctgctctcagcgatcctgacccgcctcccggctccacgtagccccgcccctggccccgcccccaccgctgccggccggggatgctcgggctcagtcccgggtccacttctcccctgctccagagctgcggcgggcggaatcaagactatatagagactcgggctgggggtccctccgctcgcccctttcctttgtgtcccacccaaagattttctttgtctgggcaatttgttcccgcccttctccatcaccaccctcatccaaaccagccaatcccagtcagggggccaggccaggagcttcgactgtgacctcacggtcctccagcctgagcttgagcttcggggagttgggcagggggcttgttaatagctctaagggagatcttttggggtcatcaacgctgtcgcttgaaacggcctgtcgggacttctttagactctttgtggtcttaacatggaatagtttggttgagttggagttgaagctgggcttgacttgaactatcagcgagcttcccccacccccgccagtcggctagctcagccaatcagaagaggtgtgaggcaaagtggaaggactgccgcactgttgcaagacacttcgtcctcagtcgggtggcgggaagagactttcactaccgcttctctgggtcctccagactcggctcacgctgctttggagcctgcatcccgaggggagacaccccctcttgccgtaaagcgagtgcttcaaggtgtcaccgccccctagcgagggcggggtcgtcggtgccgctgtcgcaaagcagaaagtgtttgggctccagcaccccaccgtcgtaaagatgcctgcggtgggcgtgtctttctcccactgtcgcaaaagctccctgcccaggtcttcgtccccctcggagccgctccgtcacctcgctatgccgtaaagcgaggctcccgaccccgtgtccttctgttctcatcgtggtcgtccccagctcctagcgcgggctgcttcattgcccggcagtgccgtaaagcatacctggcctcagccccccggtcgtatccctcggactgtctgcccgacgcggttgccacggtgccgccaagcgcggctgtcgcgctgccccggtgtcagcggagatggcggcagggtcgggtgggagtgggggctctgggggaggccctggaccggggccgggcgggggtgggggccccagcgggagcggctcaggaccggggtccaacgggggtctgggcagcggcggggaactgcacccgcgcactgggcgcttggtgagcctgtcggcctgtgggcgtacggcgcggcggcagcagccgggccaggagtttaaccacgggctggtgttgagccgagaacccttgcgcgatggacgcgtcttcaccgtccgcatcgaccgcaaggtgcagcgctggtaccgcggaacagagatgtggagggtggtgggaggcgtctagagggagacggggtaggacagccagggtagcccacattgccgggcaccgagagggaacagaaagaccatagagcaccagggggcggtcaggaagacagcatgaagcagaaacattgagtttgaagatgacattaagagcttgagttttctcaagatccagaaccagggaagggacacgagggctaacccactagaatggctgggaacagacctcctggtacaatttcttgggcatggaggatggagagatgtcagagatgtgatggcaagtgaagaaagatgccaaggaacgaacaaacgtaatcccagcactttgggagtccgaggcgggcggatcactagagtcaggggtttgagaccagcctggtgaacgtggtgaaaccccgtctttactaaaaatacaaaaattggccaggcatggtggcgtgcgcctgtaatcccagctactctggaggctgaggcaggagaatggcttgaacccgggaggcagaggttgcagtgagctgagatcatgccattgcactccagcctgggcaatagagtgagtgagactccgtctcaaaaaaacagaacaaaccattgaaggacagaggctgtgccagaaagataggtgaggagaaagatccagggtgagggaggtgtgtgtgattcagtgaagaggccaggctcacagaaaaagaacttggaaggagattgaatctgggtagagcctgatctttggagagaattaggccaggggaaaggaatgaatgatacacaagagcaagaggtgtgggtataggaagtaggagaatttggatggttggagagccatagagacaaggaaagttagaggaggcaggaggttggaaccaaggaatttgtgcttggcttggaaaggagtggtttagtaaacactgagtagagagcagagttgctaaaggaaagcccaaataattaccaagacggagtccagaaaatcactgtctgcatctctggattagtgttccaagagacagaaagccagctagctgtctgagaggtgggaagatatggtggcctgtggaatggggggtggcccattctaagcctctgtccaatacccctatcccaggtcaactcctggagcggctccattgagattggggtgacagcgctggaccccagtgtgctggactttccaagcagtgccacgggcctgaaggggggctcgtgggtagtgtcgggctgctctgtgctgagagatggacgctctgtgttggaggagtatggtcaggacctggaccagcttggtgaaggggaccgcgtgggcgtggagcgcacagttgctggggagcttcggctctgggtgaatgggcgggattgcggtgtggctgccacaggcctgccccctcgtgtctgggccgtcgtggacctttatggcaagtgcacccagatcaccgtgctaccccctgagccaggcttcagcccccctactcccatccccacacctcccctcgagcccttggcccccactgaagactctgccttggctgaacaggggacctctgcagatgaaggtgagaacacagctagggcagtggtggtggggtggggacggaatgggggaaatagagtgacaagacaggctgggtgtgggcagggccaccctgatccccaagtctgttgaatgggagagcaggagctagaggatggggggttctcctggctatgggccgtgaagcagggactgaacccttattcccctcccatcccacctggtccccagccttcatggtgtccccagcgcaggcccggccggagacgtttcctaacagccttgagtcgcataatggtgagggctttggggaggccctgggaaggggagtgggaagtgaggtggacaagggagggccctcaggagaaggggtagggagagaggcaccaggtctgggggtgtagagcctcatcccaacttccgagcttccttcttccatcctgctgctatagactttgccaacatggagctgtctgaggtggtgagcaacaccatcctgtctgcctacaatggagggctcctgaatgtgaacctgagctccccaccggcaggggaaggcctgggatctagcggtgctgccacctcgcccattctcacttccaacgatgccctgctctttcatgaaaagtgcgggaccctcatcaaactcagcaacaataataagacggctgagcgccggcggcccctggatgaattcaacaatggggttgtcatgaccaatcgcccccttcgggacaatgagatgtttgaggtgtgcaaagtcctgtggtctggttggcgccttatccctgggagctaaagatggggattgacccttggtgctaggagggtgggccctggggaagaaccaagggctgaaggtccctttctgcatttacattccctgcttctcccttctgtccctcaatgccagatccgtatcgacaagcttgttgataagtggtcaggctccattgagattggggtcaccacccacaaccccaacagtttggagtacccagccaccatgaccaacctccagtcaggtaccagccccgggcaggggcgggggtgcaggcctggtgttgctgaggggaaggaagccccgtacccgaacccaagtgtccactatcacccaggcaccatcatgatgagcggctgtggaatcctgaccaatggcaagggcacccgccgggagtactgcgaattcagtctggatgagttgcaggtgagggtggggcacagatccctgggccgctttcagcagagccacaggtactctgtgtccctgccagggcaccaagcagggtctcctatgtgacctagaggcagtccctgtatcttccacctaaaggttccttcctagaagcctgagttgcccaagagttcagcactcagattttggagtcagatggttgaattcctcttactgttttcccatttgtagtagcgaaccggggcaagaagcttatcctctttgattgctcccccacctcctgcaatctctaaaatgagcctacgagtagtacttattccataggctgagacttgtagaagctaatgtctgtgaggtggtttaactcagtgcctgactcacgtggagcattgacgaaatgtggaaattgtcatgtctggaaaacaag

SEQ ID NO: 1918 - DNA, 6000 bp, Homo sapiens
attccagagctatttctgcccctttccatcttgagatctgtgactcaggttctaatgccatatgctccagggcgctcacctcctgctgcttgcttctggtgagctctgctgcctggtgttcctcttgaagtcccctgagaacctctgtccgctcagcctcatgccggttccagccctccaccacacgggccagggtcttaggtagggcaagtaagatgaaatttcaaaataacttttttgcctctttctacccacaggggcagggtcaacagccatcttctcccaacagtcagcaaaccaaccccttgcccagctctcagcatgtaccaagaaacattggttggccacccacttatttattattccttaatgctcttcatggagagacccacccacattttgctaccctggtaccttgtccagttgttcaatcatggtatctttcttgcggtcggcagccacagccacggctaattgttgctgtagctctaacactcgggtctgcaggctctgaatatggcgctcacaatgctggggaaaagggtgaggagtctgggtgttgcccatctttggtatgaccacagcaccaaactttccagctcctctagtgggggagtgggctggagccaagaagcttgggtcccaagaacagaataggtctggagagggagaatcaggaaaattctgaagcaagcaccttgaggctcaagatctccaacatgtttctgtaccttttcaggagataagtgcttagattccaggctcctccttttcctggatctcctgagtaaaaatcccataaaccttttggcagagatgcagcagcccacacagcaaaatgtgcaaagttactcctaccttcagaagctcattggacacaatgaataaacacagcaaggataaaggggaaagcctttcattcatgccaaggggtttaacatggagaaagagaggcttccaaaaatggcaaccagtgattttgacttttcctctcctttgtctatttctctgtccccttcagacactaaggcagaggctcacagagataaagctcagtatatcaccagtagctgtaaatcctgtgcacaagctagcagagtttgtgtccattcgacaaacacagagtgtttctgtgttatgtatattctagaccttaggcagccagtactaagacaaacaagatacggaccctcaaattttagagaggagaaaaaaacaagatatatcagaacgataagctacatgaaagaaataagaaggcgatctgactacttggaaaggaggtggtgccatattagatggaatggtcaaaaaagccctcctcagaaaaacatttaagtcccagctttcaggctcttaaccctcagcccttttcttttttagttttttttttttgagacggagtctcgctctgtcgcccaggctggagtgcagcggcatgatctcggctcactgcaagctccgcctcccaggttcacgccattctcctgcctcagcctcccgagtagctgggactacaggcacccaccaccatgcccggctaattttttctatttttagtagagacgggtttcaccgtgttagccaggatggtctcgatctcctgacctcgtgatccgcctgcctcagcctcccaaagtgctgtgattacaggcgtgagccaccacgccaggccccctcagcccttttcaacacttgggtcccctctttctaatctttgctgctttcgaaaggaagcgtttgcatcttaccttgcggcgggtatgctctgaatccaatgcatctctcagcccctgaaaatctgggggattgagtggaggccctggccgaaggctggtgtagcggggaaacagctcctccagggcttgggctgagctagatggagacaagtcttgcaggggccgggtgctgagcaaatcaggtagagaatgttagggctgggaaagcttttggaatccacttgtccaactgtgatattctacaaatgaggaaactgagacccagagagggcaagagacttgtccaaagtcgtaaagctatataaccatagtgctataaataacacacaggtctgtgattcacttaaaggtttcagcagaaacaagctaactctttagaggggaagaatgactgcaggttaagagaaagccaggtactaggcaacagatacctgtgttcctgaaggagtaaagggggcaggagacagtagaaaaagatgaaaactgaaaggcaagtgataagcctcttgggttcttaagaggtacaaaagcaataaagggagaaataaggaacaaaacacctggatttccaagaaagcaaacaagctaggagaaccacaaggagaactcacttgagcaaggtggctgtgctatcactgtcaaaggagtcctcttcccgtctctctgagccagcgccaggaatgagaggatcccctgcaggcagccagagggaccccaaagccagagtcaggtaatgacaaaaacaggggccacctgaagagaaaaggccttcctttccagttccctcactccttcaccccctctcccaaagaacgggagacttttctcctgaaatctcttgctcagaggttttcctgcctgcttcctctgtccactttctcccaccccttacatctaggttctccttcatagttctagggaaggggcttactcacgataggctgtatcacgtgaggtttggagcatggtctggagctgaccccgaacactttccatctcaaagatatgcttagaaccatcctggaaaaaagccacatggaaatcagatgcagtctgtgttatctatctcctacctattgccagggtagaattttcactccagcactttggaaaacaagaaaaaccaaacggatccaataagggatgtcctaaacttgaatcagaaattcaaatactacagaagccagaaagagagtgtaaataaaataatcgaggaggtataagacaagagttgcggagattcttgccgattcaagaacaaatgtaaggactgtatggcttatggctatcattttcaaactctggaagacctaaccagtctgcaaattgactctgacaccttttctatacaatactaataactatcttctctgtaacatgttgtagttgactaagctatgtcttaatgatgtacatgccaaagttggaaccatactatcaacatagtgttgagctggaaggatcggagctgctatcctaagtccctagctccctcttgggatcaagaaaccttacccattcccagtgcacgggaaatagctcaccaacctaccccataggtttgctctatctactcggagcagagatgtctctcacaaaaaaacactgggaagtttcataattttcaaattatggtgtcccaggtcactccctcccttataagcatggctgcctatgcagttaaaaggaatatgaaatccaacaggaagagttcaaatctcatcaaagctttttatttttaccaaccccaatcccaagactctctggtgtctagtgccacagtggtctccaagacacacttccctcacctttttcttcaagttcttttccaatccgactgacaagcttcgactcaattcttgggcgaagccgtctaacccttcatgaggcggggaggtggagggtaaatacagctgggctcgggccgtggcctccgcctgccggctgaggcgcaaagaagcatagagctgggaggtcacttcagacgacacttggttgagcccagggggttctgatgaatcactcaggagatcctccgccccgaggggtgaactggggctgtcagctgatgttgccatgaatacagggaagagacaaccggagacagcaaagagctgggaggttctgctttagcaaagtccaggaggaaaagttcacggagaaagacttgggagaagggaggaagactccacgccaaggatccttggtgaattaaggatatcgaggctttctggttagaggaaaggtttccaccagttccaggggccatgggagtgggcaaaagcatccctttccccagctcctgggaacagcgttaagagggtgcagcgcagagcgggtgcggacagaagacctactgtgggacaacagcgctgctgaagctcctcttcccgactacgagtgctggaagctgcagatcaactccggcacaggctatccccggtcaactgagctcttaagttctcacacccaaaacgtcccaacggaaacggacccaaatccactaggagcccaatttctgtccccctgccctactagtccctcaattggttccagtctcaagagagggcggaacctcacgctcccccatcccttcacccgttctacccagggtcagctccagctcccttgtactttcccttcgacccctcctggcaagaaagccatagcgagcttccttgttccctagaatctctccctcccgaccaccccaaaagaaaccttgtgaaccctcagtcacgccctaagtcgtccctaagaagcacgccgccctcaagcctagcccgagatcctctgccccgacgaccacctggttccgcctactctccacccttccagtcctcagtccccaatttgccaaagtggggggcaagcgattgacctcctcccctgagatccccctctcacgcctccccctacgctcaaaaccgttggcagcctcccgcccactgtccacggctccgcctctctcgcctcgatgacgtcacccgcccgcgagaccacgctcgcagacactcacatcacttctgtatcccgagcgcctggccgcgcgtgcgcggctccggtggccacagattggctgagggagggaggcggagtctgacaagcagcactggagcggagttaatgcccagccgcggccgagcgagaacccccctaaggggcggagctccgtggaaaccggaagtaactcttgacgggcactcggagcagttccggtgagtccgtgggtggggtccccacctggttggaaggctgtgggtccgggaacccgagcccaaggagtgggggcggccccggagcgaggctcacactccctgccctgcagatgactgtccacaacctgtacctgtttgaccggaatggagtgtgtctgcactacagcgaatggcaccgcaagaagcaagcagggattcccaaggaggaggtgacgagagggccccggtgcagcccgggcgacctctcatctccaaacacctatagtcccaacccagcccctcctctccaaaccccagctcgttcccaccccccaccccatctcccgcatcaaccgagagctaactctgcccctctccctccaggagtataagctgatgtacgggatgctcttctctatccgctcgtttgtcagcaagatgtccccgctagacatgtacgcggagtcagagaagatgttgggaggagggctagccttgggaatttggggatgggggaaactttctgaagtggaaggagcattggcctccagaggggggaaagggtacttaagagaggctgagtccggagcgagagtgctggagctggcaggagtgggggtggggagggtctgaaagtagagaagttggtgggggctaaattgaggggtgacgatgggcgatgtctttactcaaccaggcttctacaaaggatatgtttagataaagagggagtcgatgtttgcggggatcagaagtgtctctttgggagagattctgctcccattctttaacaccctcctcatctctgcaggaaggatggcttcctggccttccaaactagccgttacaaactccattactacgagacgcccactgggatcaaagttgtcatgaatactgacttgggcgtgggacccatccgagatgtgctgcaccacatctacagtgcggtcagtgccagccccagggacccatcccccagagctcttcagaaccccaagactccctcatctcccctgccccaatcctactatatgtttgctcaactcaagagttttctcagg

SEQ ID NO: 1919 - DNA, 6000 bp, Homo sapiens
gaaaacgagaagataatccctggggtcctctcagccttccaaatggagcttagctctttcaccccagtccttactttcctgctgcgtacacttcggcggtgtcaaacaggtttacaccatgctcataggctacagtcagcacatcctctgctgtctagggaggtgaaagaggtaaagatcaactactgctcctcagttacctccctcactgtactctaacccatcacatctcagccctgggttctctagtctctcccctctccccatcctccagcctcagatccctcattccctgtgcttgttgtccaaacccctatccaggttcacttcccttttttcaagttccctcacccccaccaccctgattctaggtccgataacttatacctcatctgagatctgagaaccaaatgtgacccaggtacctgcaagagagaagccaggcacatgagaactgcagggggcagaccatgaaagaatgccctcctttccttaatccctattctgactcacctaggccaagacaggatacccgaagaccagacttccctaggttcctgcaagatacagaagcagcgggaaggggtggagcctccattatggacttagattatcagcccccagctcctctccttccagactgagaagccctcaggtgtctcagtccaaagaaattagacccagtgggcctataagattgggcaagtgctatctccagagcagaggtcctaggaattttctcaaaaggacaagtgaaccatatgtgactgttcctctggagccactgtccagagtctccattccctcttatcacattgaagacgtgcagtctggtttgtccttcttctggggtcttgtctgtgtttgagtcatctgtgggttgtgtgcagtgaggggctgggaggaattttgtttgattgtggtgagtttgtgagaccaggccctcaggcagagtgctgtgccaaatggtagatggcaggttggaagaggtaaaccaagtcaagttcaggcattcagacagacaggggtccctggctaggctaggcagatgggcctggaggaaaggcagattgaggacctggggggaggggggagagtaagacagaaaagcctagttctccctctccactccctctgttcctattgacttgtgaagactgtctctgaaccagtgagccccctcatcctcccaaagcccccaacccaggtgtcagctcagctttccaatcagggccaccatatagaggggatcagattcctcaggtgacaaagcaggtcagatcagtgacctcagctcactcccaagcaggagcccctcctctaccccctacttcaggttctgagcttctggtctggcagtcctctgagataaagtcagttacatttcagtctacccagaccctgtccctcagcatggagatgaaaaatgtggtccatccttcccaccggccccactccccttgcacccaagaaaggtcgcagaagacctagcctttggggcaggcaggggcagtatctgggtcaggcaccccgagcaggccagagtgagaagctgattccctccctccactccccaggacacggacccaaggacactccactggaggaggcatagcctggagatccgtgtagcgtggagatccatgcatccctgaccttcccaggggtaaggagggaagctcaggggcatcccctgggtctgacaggacccagtcaaccttggtaaacttgattctcgtagtcaggggtatcgacagaaaccaagagagggacaaagtgagggagtgccagagacagaaagaagagatggaaagaagggagacctacttagtgaagtttgaaggggtcttggcggccatctcaagcagtctcaggggtcccgaaaggaaagcggaaggggtgggctgcccggccacccccatacctgtatttcatgccagtgcctcggccggtgctctctcggagggccccagcgggcgctgggggtcggggaaccagtgcagctcgggccttggggccagaccctccaccccccggaggattcccgtgccccccgccggccggcccaccattaccgcccccggggcccggccggggtccacacagacggtcctcactgctccggctgcgaaggttctgctcggtacacgcgatagacacctgcatgctggctggccgaggcgggggagggggctccgaggggacgggaggggggagcagggaagcccgagggctgacgaccgggggcgtagtggggcgaaccccggcagagcgggaaggctgaggaggctgcggcgggagccgccaggcaggatcgggcccgcgggggcgggctgctggaggtcgcgaggtttgcggcgggagggaagaaacgtggggggcgccaggagtggagatattcagttacgggggacacaggagcaaggattaggagggggaaatggatgagggtaaaggtcgaggatgaggtaaaggtctcggaggataaggacccagggggaagcggggcgggagagagatgccacttcagcgcgaaccgctgcgggacccgctgggctcccagccgcgtcggcagcgggcccagctcatcagcatgcaggcaccgcctcctcatctgcatagagccgccctcctctcagccaaacctgccgctcatctgcataagccccgcctgctgaaggctctgcagcttgaatattttctgagcggaattggggaggatggctcctgcaccctctgggacccaagggctgtcaggcttcccccggcccagtgattctcaatcgggagggaatgtatctcccagcgtactttcggcaaggtttggagatatttttgatttcatgcctgtgctatcagcatctagtgggtggtggccagggatgctaaaatcctacaaagcacaggacggtccccacaataaagaattatccagctcaaagcatcaatattcccacggttgagaaacccatccgcaaagccacttcgtggccctccagggggtgtggctgccctactttccaccttcatgcgtggggcaggactgagagggccctcaaaccaacacgctcaggccgcagagagtgacaaaaagtttattctgtgcttctcgcagcattaggcaggggataaaactggagagagggcctggtgtggaggtggagggactctgtgggcttcactctggtaggaggagagcatcagggcaggcctttaggctgttgctctgggcagggggtgggggtgcgggggcttacagtgggggcccttagttggcacaggttcggaagggccccaggcagacatgaattctcctgagacttgaggtaggttgcttcagccagcccgggcggagaagaagggcagagagcgaacataggagtccagtcgggagcgaaagagctcactttgcacagtttggcccagcgggcacaggggattcttcaccaccagctccacatacagctatggaaagggaagatgttagagccaggctttggatacttctggtttttagccccaaaccttgtataacctcaggggtgtgtgaatgcacaaggaataagggctggaaggcaagccctctctgaggagaaagtggtggtgggagttaagaacctaagggcccctgagaaaactcttgagttgagcaaacatatagtaggattggggcaggggagatgagggagtcttggggttctgaagagctctgggggatgggtccctggggctggcactgaccgcactgtagatgtggtgcagcacatctcggatgggtcccacgcccaagtcagtattcatgacaactttgatcccagtgggcgtctcgtagtaatggagtttgtaacggctagtttggaaggccaggaagccatccttcctgcagagatgaggagggtgttaaagaatgggagcagaatctctcccaaagagacacttctgatccccgcaaacatcgactccctctttatctaaacatatcctttgtagaagcctggttgagtaaagacatcgcccatcgtcacccctcaatttagcccccaccaacttctctactttcagaccctccccacccccactcctgccagctccagcactctcgctccggactcagcctctcttaagtaccctttcccccctctggaggccaatgctccttccacttcagaaagtttcccccatccccaaattcccaaggctagccctcctcccaacatcttctctgactccgcgtacatgtctagcggggacatcttgctgacaaacgagcggatagagaagagcatcccgtacatcagcttatactcctggagggagaggggcagagttagctctcggttgatgcgggagatggggtggggggtgggaacgagctggggtttggagaggaggggctgggttgggactataggtgtttggagatgagaggtcgcccgggctgcaccggggccctctcgtcacctcctccttgggaatccctgcttgcttcttgcggtgccattcgctgtagtgcagacacactccattccggtcaaacaggtacaggttgtggacagtcatctgcagggcagggagtgtgagcctcgctccggggccgcccccactccttgggctcgggttcccggacccacagccttccaaccaggtggggaccccacccacggactcaccggaactgctccgagtgcccgtcaagagttacttccggtttccacggagctccgccccttaggggggttctcgctcggccgcggctgggcattaactccgctccagtgctgcttgtcagactccgcctccctccctcagccaatctgtggccaccggagccgcgcacgcgcggccaggcgctcgggatacagaagtgatgtgagtgtctgcgagcgtggtctcgcgggcgggtgacgtcatcgaggcgagagaggcggagccgtggacagtgggcgggaggctgccaacggttttgagcgtagggggaggcgtgagagggggatctcaggggaggaggtcaatcgcttgccccccactttggcaaattggggactgaggactggaagggtggagagtaggcggaaccaggtggtcgtcggggcagaggatctcgggctaggcttgagggcggcgtgcttcttagggacgacttagggcgtgactgagggttcacaaggtttcttttggggtggtcgggagggagagattctagggaacaaggaagctcgctatggctttcttgccaggaggggtcgaagggaaagtacaagggagctggagctgaccctgggtagaacgggtgaagggatgggggagcgtgaggttccgccctctcttgagactggaaccaattgagggactagtagggcagggggacagaaattgggctcctagtggatttgggtccgtttccgttgggacgttttgggtgtgagaacttaagagctcagttgaccggggatagcctgtgccggagttgatctgcagcttccagcactcgtagtcgggaagaggagcttcagcagcgctgttgtcccacagtaggtcttctgtccgcacccgctctgcgctgcaccctcttaacgctgttcccaggagctggggaaagggatgcttttgcccactcccatggcccctggaactggtggaaacctttcctctaaccagaaagcctcgatatccttaattcaccaaggatccttggcgtggagtcttcctcccttctcccaagtctttctccgtgaacttttcctcctggactttgctaaagcagaacctcccagctctttgctgtctccggttgtctcttccctgtattcatggcaacatcagctgacagccccagttcacccctcggggcggaggatctcctgagtgattcatcagaaccccctgggctcaaccaagtgtcgtctgaagtgacctcccagctctatgcttctttgcgcctcagccggcaggcggaggccacggcccgagcccagctgtatttaccctccacctccccgc

SEQ ID NO: 1920 - DNA, 6000 bp, Homo sapiens
cttgaacccaggaggcagaggttgcagtgagccgagttggtgccattgcactccagcctgggcaacggagcaagactccatctcaaaaaaaaaagaaggcaagcaggagccaaatcattcaggggctcaaagatggggtgcacatgacttaatggacattttaaaatctcaagtaaacccctttcccagtcagggctcagatttcttcatctatatcttgaggggttgggtgacaactcctgttcaacctgtctgagatcatcatgagctgtaggacagaatgtaataaaatatttacatgatcaagggcgatggttctttttttttttaaccttttaagtaggaagggtaatgtgctgtaacaagatttgagacaagcatgtctcatatataagcataaaaacccaatcatcatgcttaccaagtacaaaaggatcaagggcagtggttctaaagaagaatcaccctactgtaaaatgtagattccctggctaatcttctggggagtctgcctccttggtgtgaggcagggatggggaactggcattttttttttcttttgagacagagtctcacactgctcattctgctgcccaggctggagtgcagtggcatgatctcggctcactggaatctctgcgtcctgggttcaagcgattctcctgcctcagtctcctgagtagctgggaccatgggcacccaccaacaggcccagctaatttttgtatttttagtaaagatggtgttttgccatgttggccaggctggtctcaaacccctgacctcaagtgatccacccacctctgcctcccaaagtgctgggattataggcaggagtcacatccaacccggaactgacatttttaataagcattcaaagacatctgatgccagccatctgcttgccacacgttgagcaacgctactccaggacaagtccttggaggtgcaagatcacaggtttaattgagataaaacggcaaatcaattccccttttcagggagaaagtgtcaatttggtattgatatgtttttagcacccctttagcgttagataatctcctggaacagggagctggccacaggcaaaagaatctacctggaattgaattacactgtttggttttcattgcattctcctttattcttaccttctattatgggaaatgaaacgaattttcgatttacaatagtgacacaaagtttcctttaaaatagattcactgaaatttctaagtatccaaggatgtattttaggatgaagagacaataaagcattttcactttttcctagactcactagattttggcacatggatacttgcaatattgatttgtattatgagagtgatctaattattacaaaaggagctataatcactaacttattcttaataataatggttactggtacctttacaataatgtacaatccaatgtttaaaaatgataccacttgagtttggtttgatcctataaactttcaacaaatgtcttgggaggccaaggcaggcggatcacaaggtcagagatggagaccatcctggctaacacggtgaaaccctgtctctactaaaagtacaaaaaattagccaggcgtggtggtgggagcctgtagtcccagctactcaggaggctgaggcaggagaacggcgtgaacccgggaggcggagcttgcagtgagccaagattgcgccactgcactccagcctgggcgacagagcgagactccatctcaaaaaaaagaaaaaagaaaaaaaatttttttttcaacaaatgtcttaaaatttaaaagcaggctgattagtttggaaccagactacaagtagagctaacatttggtgaataagaaaacatcacactacattttggatgtatgaaagaaaacttgaccatgtgaagatatatgaataaagaaatgtactatagatactactttaggaaaaaaaagagtgatctataaataaaaacatttgacgtatttgaaaacgtgtgggtcttgcatacgactcacatgataaatctaaaattcaacctagcaatggataagaattaagaacggatggtttgggcaaaggacattaacagacattgctccaaaggtgatacataaatggccaacaagcaaatggaaagatgcttaacattaccgattattagggaaatgcagatcaaaaccacaatgagataccagttcaggcccattaaaatggctattatcaaataaacagaaaataacaagcattggtggacaaactggaaccctcctcctgcattgctggtgggaatgtaaaatgttgcgtccattgtggaaaatagtatggcggttcctcaaaaaattaaatatacaggctgggcacagtggctcacgtctgtaatcccagcactttgggaggccgaggtgggtggatcgcctgaggtcaggagttcaagatcagcctggtcaatgtggtgaaaccccatctctattaaaaatacaaaaattagctgggcatggtggcaggcgcctgtaatcccagctacttagcaggctgaggcaggagaatcgcttaaacccaggaggcggaggttgcagtgagcacagattgcgccactgcactccagcctgggcaacagagcgagactcggtctcaaaaaaaaaaaaaaaaaattaaacatactgttaccatatgatccagcaattctactactaggtatatatcctaaagaattgaaagtaagaactggagcgtgcaatattggttttctgttcctgtgttagtttgctaaggataatggcctccagctctatccatgttcccacaaaggacatgatctcattctttttttttttttttttgagacgaagtctcgctctatcaccagggctggagtgcagtggcacgatcttggctcactgcaacctccgcctcccgggttcaagtgattctcctgcctcagcctcctgagtagctggaattgcaacctctgcctcccgggttcaaatgattctcctgcctcagcctcctgagtagccggaattacaggcagtcaccaccacacccagctaatttttgtatttttagtagagatggggtttcaccatgttggtcaggctggtctcgaactcctgacctcgtgatctgcctgcctcagcctcccaaagttctgagattacaggtgtgagacaccatgcctgaccatgatctcattctttttcatggctgtatagtattccatggtatatatggaatatacatgataagtcactctcacttcagttggctttcatgaaacactgtgacaggcacaagaggacaaagtgtctgccggcatcgttctcctcctacctcattgactgaactttgctgcttccactcctttgcatgacttccaaatatcagaggaccttagggcacagcttgtgcctcttctcttctctacttataggatattctctgcctagtgatctccaccagcctgtggtatagatgtacctgtgtgcttgtgactcaaagatgcacacctgcagtcctgagctctatgcccagacgtgggttctccacttggatgtctaatggccatctcaaacttagcatctccagaccgaaaaccccaaatctgttatgttattcccccaaagcccaaatccataacttccccttggcatctctcccccaaatccctccctcactgcactcttgcctttccctcctccaacaagccaagcttttcctaaccacagggcctcttcaggaacagtttcctctgcacaaaactctgttccccagacagatcctttcacctcctctgaggctctgaacgcctcccttcccacctctgcttctcactccttcacattagtctgtttcatttccttcattgcacttattatcatctgaaattatgtgttggtttacttattttctctcacacttgattttttttttttagaccgagatttgctctgtcgcccatgctggagtgcaatggcacaacttcacctcactgaaacctccgccttccgggttcaagctattctcctgcctcagcctcctgagtagctgggactacaggcgcccgccaccacgcttggctaatttttttgtatttttagtagagatggggtttcaccatgttggccagcaactgtgcctggcctcacacttgatttttaatctccatgagagcaagcactaggtcttgcctgggcctttatcaatagcagtgagcatagcacctggcacagaggtagttctgaacattaattattgaatgaaataaaataatgaatgtaggctgggcgcggtggctcacgcctgtaatcccagcactttgggaggccgaggcaggcggatcatgaggtcaagagatcaagatcatcctggcctacatggtggaaccccgtctctactaaaatacaaaaattagctgggcatggtggcactcgcctgttgtctcagctactggggaggctgaggtaggagaatcacttgaacccaggaggaggaggttccagtgagccgagatcatgctgctgcactccagcctggcgacagagcaagcctctgtctcaaaaataaataaataaataaattttaaaaataatgaacgcaggcccaagaagagttgtgggaaatggggtgatatttttgcatagacttctaaggctaagaaggaaaacaaacagacgtggtgggcacaaatctacccccaccccaactgggtcccaactctaggctctctggcctggcaccaccactgaaaggccccgttccccaaacctcagggtattcttagtccctcctgttcccagcgctgccaatcccccgcccacccccactttagttgcgtgttccagcctctccgccccgcccctccccgccctgaaacggacgtgctttttagaggagtccactgggcttggagtcagtggcaataaccaggggcaataaccaggcgtgtcccaggggggagccccgctctgcagccctgtgcgccgtagagagctggacttaggctggcagcatggccgagttcagggtcagggtgtccaccggagaagccttcggggctggcacatgggacaaagtgtctgtcagcatcgtggggacccggggagagagccccccactgcccctggacaatctcggcaaggagttcactgcgggcgctgtgagtgcgtgggagtggatggggtggaggtgaagggggcgagcaggagggtccggcctgacgcatacttaacctcccctcaggaggaggacttccaggtgacgctcccggaggacgtaggccgagtgctgctgctgcgcgtgcacaaggcgcccccagtgctgcccctgctggggcccctggccccggatgcctggttctgccgctggttccagctgacaccgccgcggggcggccacctcctcttcccctgctaccagtggctggagggggcggggaccctggtgctgcaggagggtacaggtgaggggcgggccgggctggggctgcagggggagcacaggaaggggtaggggactgggggttggggagaagggcaggtgaaatggagaggtgagctggtgtggccacagagtagcgggcagaggagagggaatggcggagccttggggagcgggaggtagcagcctggtgtaggagaaactgtacttatgggaggaggggacctggtagagggtggcaatcgtggagactgtgtggctggtggtagtgatggtgagtttctctccccaccccaacctactccccttctcccacagccaaggtgtcctgggcagaccaccaccctgtgctccagcaacagcgccaggaggagcttcaggcccggcaggagatgtaccagtgaggagggggttactgatgggggagggtgtgcccaaacgatgaggggcagcttgagtgtcctggtcatgacagagattaaaagcccctgcctccacctctcctatcaaagctgctcctgggatcagcagcgtctacaggaacgtattagaaatgcaaattctc

SEQ ID NO: 1921 - DNA, 6000 bp, Homo sapiens
gctctgtcacccaggctggaatgcagtggcatgatctcagctcactgcaacctccaccttccaggttcaagagattttcctccctcagcctctggagtagctgggattataggcacccaccaccacacctgactaatttttgtatttttagtagagatggggtttcactatgttggccaggctggtctcgaactcctgacctcatgatccacccgcctcggcctcccaaagtgctgcgattacaggcgtgagccaccgtgcctggtccacaccttctttttagggattatttgtcattaatatttaatcctgcaaacagttccatgactctatacaccttctaaaaaattagaacattaaaggcaaaacttaagtcccctttgatgaccaaccatctctgcctgctccctcctctccacagaagagacaatggcaatgcaaatacatgaggtatatttcactacgttgatgtgccggcagttaaaggtaaattgatagattaaagaagcaaattggtgtaaccaagtccaaacttgttctgaggctgcaatgagctatgattgtgcagcaagagtgcttgcctcggacaaaagagaccttctcttaaaaaaaaaaaaaaaaaaaggccaggtgcagtggctcatgcctgtaatcccagcactttgggaggccgaggtggatggatcacaaggacaggagttcgagacaagcctggccaatgtggtgaaaccccatgtctactaaaaataaaaaaattagctgggagtggtggtgggtgcctgtagtcgcagctactcgggaggctgaggcaggagaatggcgtgaacccgggaggcggaggttgcagtgagccgagatcacaccactgcactccagcctgggcgatagagcgagtctctgtctcaaaaaacaaacaaacaaactgtgtgtgtgtgtgtatatatatatatatatatatatatatcttatcttacctctttcctgtctgtcctgaagctggccataaataaattctctgaacaatcttgttcaattataggtcataagacccccatttcagaaggtggaaggaatactgcacagagaagccgggaagaatctagacaggccttgctgggcttccccactcagcctattagtactagatcataccctcttcgtccaatcacatttctacacagtcgtcatgcttcaatcacacctatttaatgaagtctccataaaagacccaagaggatggggtagagagagcttcctgagagctgaacccgtggagcatcctgaagggcggcacacctcagaagggcatggaagttccatgcccttcccacctccttgccccgtgcatctcttcatctgtatccttggtcatatcctttataaggccgggcacggtggctcacgcctgcaatcccagcactttgggaggccaagacgggtggatcacgaggtcaggagttcgagaccagcctggccaacgtaatgaaaccccgtctctactaaaaatacaaaaatcagctgggcgtggtggcgagttctcctgctgaggcaggagaatcacttgaatccgggaggcagaggttgcagtgagccgagattgcaccattgcactccagcctgggtggcagagagactccatctcaaaaaaaaaaaaaatcctttataataaaccagtaaacattttttcctgagttctgtcagccactctagcaaattcattgaacataaagagggaatcgtaggaaccctagcttacacccagttagtcatgagtacaggtaaaaacaacctgaggcttgcagttggcatccaaagtgaggggcagtcttgtgggactgagccctcaacctatgggatctgatgctctctctgggtagatagtgtcagaatctaatcggaagacacccagctgatgtctgctgcagaacagattgcttgattgcagaactgattgcttggtggtgcagtaaaatctccacacatgtggtcgcagaagtctcctgtgttgattgctgtggtgtgagggcagaggaaaaattgggtctttttttgtttttgttttttttagacagactcttgctgtgttgctcaggctggagtgcagtggcgtgatctcggctcactgcaacactcccaggttcaagcaattcttgtgcctcactcagcctcctgagtagctgggactataggcacccgccaccgcaactggctaatttttttttttttttcgagacggagtctagctctgtcacccaggctagagtgcagtgatgcgatctcagctccctgcaacctccgcctcccaggttcaagcgattctctttcctcagcctcccaagtagttgggattacaggcgcctgccaccacatccagctaatttttgtatttttagtagagacgggtttcactgtgttggccaggctggtctcgaactcctgacctcgtgatccacccacttcagcctgccaaagtgctgggattacaagcatgagccaccgcgcctggccagaactggctaattttttgtattttagtagtaacggggtttcaccatgttgcccagggtggtcttgaactcctgagctcaggcaatccaccctccttgggctcctgaagtgctaggattacagacatgagccactgcgccctgcccattttttgtttttattgagacagggtgtcactctaatgtcggggctggagtgcagtggtgcaatcatggctcaccacagccttgacctccggcctctgctgatcctcctgcctcagcctatcaagtagcttggactagaggcacacactaccatactggctaattttttttttttttatttgtagagacggggtttcacaggttgcccaggctgatcttaaactcctgggctcaagtgatacagccgccttagcctcccaaagtgctgggattacaggcgtgagccgccaagcctagccatggtttgttttttctacacaatatgcttaaacagcaaatagcatttagaatgcattcagaaaggatattagctgaataataatcttctctattgttcatgtaagaaaagtgctaacgtaggcatgtagaggctcaacaatgtcatcaagtcctgaagttctttccaggcctctcttctgccttctgcaatgttaggcttcaatgtcaagctgcttccttcagtagcactagaagcagcaatgagggctgcatgcttccctgctcacttccagaaatctcttcctccataccttgccctatacatcttttcatctatatcatttgtaatacactttatgataaaccagtaaacgttaagtgtttccttgagctgcccagcattctgagcaagaaactgattcccactagctggcccacttaaatcacaggcttatgcctgatccaataaccataatctggaataaaaggtattgattagtataagttaattggggctcatttctggacctgcaatgaagtcagtttccttctcaaatcctcaaaactctaagtgctttcagaagtgggaataaagctgggcgcagtggctcacgcctgtaatccaagcactttgggagaccaaggcgggcggatcacctgaggccagcctgagcaatgtgatgaaaccccgtctctactaaaaatacaaaaattagccgggcgtggtcacatgcacctataatcctaggtactcgggaggctgagacaggagaatcagttgcaccctggaggaggaggttgtggtgagctgagattgtgccattgcactccagcctgggcaacacagcgaatcttcatctcaaaaaaaaaaaaaaaagtgagatttaaataggtcttcatcaacctagggatttggggttgtcagcaacagaaactactacagaaaccgactgcatagactggagagacaggtggtcccctaaaggaaaaatagagtgttagaagaaaggagaagagtgctggacagtacatacttaataaatatccactggttatttcatagaaggcccaaaaatgtatttatttaacccagtaatgaaatctgagggttaggaagagcagaaaagaaggaagtgtggcaggaaggaggaaaaatgaaagtgggcccaaacaacacggcagctaacagagatcttgcaacgaaaggtctattggtggaaaaactcctcccaggaatgtcagaacttttaagaacgacatagtaatgacacaagaataaacacacaggcaaatgagcaaacaacggaatacaaagtctagaaatagacacaagtaaatatgctaacattatatatcaagggcagcatttaaattctgttggggcagtttgtttaacaaatggtgttgacataactggcgctccatcgggcagagaagttagaccccagctcatacatgcataaggataaactccagttacattaaagatttaattttttttataaaaagaagaaggccgggcacggtggctcacgcctgtaatcccagcattttgggaagccgaggcgggtggatcacctgaggacaggagttcgagaccagattggccaacacagcgaaaacccgtctctaataaaaatacaaaaattagccaggcgtggtggcgggcgcttgtaatcccagctactcgggtggctgaggcacgagaatcgcttgaacccgggaggcagaggttgcagcaagcccagatagcaccattatactccagcctgagcgacagagagagacctgtctcaaaaaaggaaaaaaaaaaagaaaagaaaaagcaagataattcactgggggaatttggggaaactttcctaaactggaagccaagcgtgagcccttctcattccgcctcttccattgggttcccatgacttacgtcacaggacatcgagccaatgggaactaggcatgggcgacgagcttgcccaatggggccggggcgggagatttgaaaagtccttggccagggcgcggcgtggcagattcagttgtttgcgggcggccgggagagtagcagtgccttggaccccaggtgagctggcctcctgtcgcaggccttgcgccgggagtgggcagatgatcaggtagatcagagggtccgttgggctggcctgcgcgcacgccgcagggctggaaggaggtagggacgatagcagggcgggggcggtgagaccagcgcccagattggggctagtgtgctgacctgctcccttttaccagctcgggctagcgcttccggctcgatcggtccaacccctccctctctctctctttttctctgcttctcacggctgtttcccttctccgcccagctctcctccccctttctctctaaggatggcccagaaggagaactcctacccctggccctacggccgacagacggtaaggcccttccctccgtccctgcgcccccatgaccccgcatggcgagttcctgctgggaaacttgagatcctgcaatgagcaatcctttaagcactttcttccccgttatgctccaaagtacgggtcccaagtttgacgacagaacccgctctggtcatttgtagccacatcctgtcaggtgctgccaacgtgaatctgaccagccagtgactcccagctggtgaggacctctgcagggctcgtcacatacaaatgatatctgggactgagcaggcagggcctggccttcaggccatgattcccaatccatatcctgaaaaaaaaaaaactagacagcaaatagaaatagactctaaaaggatataaagttacagtttaaaaggcccagggcaagtctaaattacaatttggaattaatgactaaattgaggtaagaatctaaatggatctaaattgacttatttcccaatggtccagacagatttcattgaagggcctcctctctgatttgaaatgccacctttattatatatataaattcccacatatatgtgggtctatttctggactgtattttattcaacttgcttatttgtagattggtaccaatatcactatttggggccta

SEQ ID NO: 1922 - DNA, 6000 bp, Homo sapiens
attgtcctggacgtctgtgtgattccgaccctggcacatgaagtggacacacacgtgagctgttaccctgaggagaaagaagctcgtaacagttacagtagctgaagacattattaaatttcttaaaaaacaaaaccaaaaaaaacaacttctagaaatattcacaatacctaaagctcaagttttatttgtcctgttcactggtggtaaatgtggggtggaagggatagagacaggttttaaggccctcctggcctctcatccaggcctggggtctgcagggtgagaagcagggtcgggatgcatactgggttccccgttcacagccctcttcatgtgctgtccctcagatgggcctccccctggggccccggagccctctagagaggctgctctcagagacactaaggtgaggacagcatgtctcagaggagacctccctggcttggccgccgtctctaacagtgtcgcattttctctgtctcttgcagacagtcgagcccgtggatcagctgcttcgaaaagtggacccggccaaagacagggagctgtgggtcagagagcacaagacgggcaacatccgccctgtggacatggagatctagatgggcctgtgcagcttcggggggtcctgctggggaggggggctgggctcccaccatggggcccatgccgagtggatgccccccaccctctctcctgggccactgaggagaggggagagagctggtgattccagaagggtgacccggacagcctagctgggggctcccccatattcccaggcccagaagacagacccacagccctgcccttgtctctgaggctgaagaccccctgactcccatgctgtgcttgccgctctgaaacaaacagaggctggaactttgtggtccttgccgagttttgtaggggtcactgtcacatgcttgtgccctggaagccccaaggctcttcctccagctggctcccttgtctccagggctttggaggatcagggtagggagggctctgtctctaagccaggtgtcaggatcagaatcatgggtagaaggtgccattcagctcacagccgcacccagaatcctttgcagccctccttctttatttttttcccattgcattctgggagtccacatctggctttctcagccactgttcatcaccaggggttttaggaggaaggcttggctcctgtcttcccagacccaccatgcctggagaggtcaggatggaactacctcattcggcaaattagccccaaattgagcgctgaatcgtgtcccatgagatcaggcgccatctgtaaagtctcctctggaaatgccaatccatccttcccccagctgcttcctcggggaggcccctgcccccaccctgccagcccttcccagtctcattagaggaagctttccaaagttctcagttatcaagacctcatccagctcgtccaaaggcttcagggatggaaacaaaccagctcgtctcagaggccagcaagctggggcctgtccgccacggtgccctgtgcacctttgggctgccctggcccccactctcccgggccgcccaccacaggctcttaatggggccgggtcagtcctacatgtgagatgggttagggcaagtctttgccatcccccagatggctctgtcttcttgtgtatggcagggctgggactgctgtcccttgtacagttttctgtcactggtgggcactggacaggcatagcagactctcttgtggccacactaggttgtcgcctttcaggcagtgtcccgccacctttgcttcccgctccttctggacattccagagccctgcaccaaacccttacttggtgtctgcacctcctttccctctctccatcttccaatccctggaaaagtctggtctgagtgtgacttgggaagctttcagtgctgctgtttggcccagctcattactttctccctttctctaccacagcaaacacattctccaccatgtcagtctaaagagtctaaaggggccgggagaagcatgagcgaggggcagattctagtcgggagcccatgccctggaaatccatctttcttcatctttcccattgaccactttgggtttgacctgcacatctgcagtgagggcagaattcaacaagcacaactcactggtctttcagtcaacgtgctagaaaccgatgacttattaatctctaattttttggcgcctctttcattgaatgagaattgctttcgtatagttcacattagaaaaatgcctaatatactaaagtaaaccaaacgttgtcacttttctcttgttcttgaaacattgcaaccaaaaaggtcagcacaaaggccttcacctacgtgaagacctcctggtaggatctgtccatgggatggagaaccactctgtccagatctggggttgggtcatgacaccagctaccaattttagaatattatttcttggtttctttatgaaaaatgggtgctagtggtaattgctttgtggcttagtaaactactctgtggatgatttccaaacattcaaagccaatagccttgttattaacaagatattttgagtacaatatggctcattgacttttccattacatctgaggattccagagtcctctgttcatccctgggatagagtgagccctcttgcgtcttccagggtagctcaggttggcccagtttgggccagtccatttttggaggtcactctttcccccctcatcccctcacctccttctctttacccccttcacgtacttcctttctttcttccctctgttattcattcatcaagcaggttaaagccattgtgctaagatctaatctgaggacactataatggccctgtcgtcagggaagcccgtgatcgctcgttttcaggggtcttaccggtcagcaaccttggcattgatacataggcactctacagaatttaagttttcagaggtaagtctgttgttctgattaatctgcattcattcagcgaatgctcaagacaagccaggcatgctgagaagcggcgctctagttgtatgtaagatgggcattcctctgctctcctctattctccatgtcgactgagaagagtataataagaacattgtaccctctccacacttaaccctctgggattctttattataatataaaccaccgtcgtgaggcatttacctgttggatggaaggtagacagcaacaagattttaatcacctggtcaccagaccctcacggcccatatccaattcgaatttcagaaatttctctgtttgctttaaataactctttacaaataagggtcgggcacggtggctcacgcctgtaatcccagctctttgggaggccgaggtgggcagatcacgaggtcaggagatcgagaccatcctggctaacatggtgaaaccccgtctctgctaaaaatacaaaaaattagccagatgtggtggtgcacacctgtagtcccaactattcggcaggctgaggcagtagaatcgcttgaacctgggaggcggagattgcagtgaaccaagatcgggccactgcactccagcttgggtgacagagcaagactccatctcaaaaaaattataaataactctttgcaaataggaaagtgaagctcaagggtaaccagtgaggctatgaaattgccagtgaattaagaccagggctagagtcaacagtccagaacccctatccgtatgaacaggggcccgtttctggttgaaatcaaggttaggatgcaactgagaaaataaaagactgcactttggagaggcaagcacgctatccgggttgttgttttgttttatgtcttggtgcttaggtgaggacttagctgggtttattcaaagtgggcgggtctgggctattcttgagaatgtcccttccatttctgagaacaagtcagccccttctacctgcctccacccaggagactgatgcacaagatctgtttgtgaaagcctgatttaaaaagaaaaaaaaaattccttaagccaaatggtgttccaagttggttgctgtgacaacctccaggaagagccacttgttaccctctattctttctagtgctttcagtcagtggcaacacataggccccttggaccgtggggatggcggccctgagattctgtcagtgggaccaccctgggcctcctttctacctccactcagcaccctgttggccaaggagaatttctgcggtgggaggcagtgctctgctagtcaggattgataaacagctgggcacaccgaaacagtgtaccaacgaattcaccaaccaggggtttctttccctaccctttgtgaaaaccaatcaattactagatgagtggatggatgcagaaaaatctgggctgagccaaagtcccttttggaaatacaagccataacattcgaaggacatcagcgaccttggcttgtttaggtgattttacttccagctgcaggtagtcttgacaaggagtgtttaaacagaaggctcaagatgcattccttgtgtaggtcggagagagcacttctaatgttaagtggggtacagatcagctgcccccccacgtagcctggacatcgtcttatccccataatccttgccatccctacaaggcccatcgccaccaccttttcccaggtttattgaggtatgattgacatccagtaaaattcaccctttggaaatatacagctctgtgaattttgacaaatttagtgtcttgtgaccatcaccaagatcaacctgtttttaaccctccaaaaaattcccttctcctgccctctttccctggcaaccctgattgattatctgatcctataattttgccttttctagaatgtcatataaatggagtcacactgatgtcgccttttgagtctggcatctttccctcagcttaatgcttttgagtcattcatgatgtgtgcgtgtggtttgttccttctccttgccgggaagtatttcattgcatgggcgtactactctgcttctttatttttacactgagcctttcgccctggaagttcttggcccagggtcttcaacttgtttgcacgaccacttccagcttgctgcttccttcagttccccaggctcctcctccaaatgccagctgtgcccacaagctgttcttagggctcacactcgccttttggcgcgtggtgggtttttggtagtgcagaaagaatccagggatgggaggggaagggacggatgggtgctcaattgctgctcacgtctgctgcaacctgaagcttgcatctcagccagcagatctgctcccttctgggacccaggcttcagtgtcacacggtccttggctatgtattgggcgttggaggctttgaaaggcgagcagaagcagcatggacaagaaggctggggctggccctggggctcatcatgatgctttcctggatctgttgcttcatctgcaagctgagggtgtttgttctagatgagtgtctcaggccaccggcaactgcatgtacctcctccctttctcatttccaatgatgtaccctgtacacgtgttcatgctgtgtctggctctcatctgcacaatcgtgcatagaattgcctcaagtcctggtgagagagatgccgtggtacttttccatttagattcaaatggagctaaaattaagagttttatgagctgttaagaatgaggtagtttctcctaggaccccccaaagacagtgcaagtaatgaccgtttggatctcattcgtcgatctttgatagtatgttctggagtctactccccaggagccaggacaggcgtgaagatggagtccttgtcgcagctggagccttgcctagctggtgatcacacagcctggcctgtacctgcaccccactggatggtggtacatggtggcagggacaggaccacacccagttaaggccagaccaggctgagtgtgacccctgaggtaaacactccactaagctgtgtcttgttcatgccccctgctcagtgaaaggtgagt

SEQ ID NO: 1923 - DNA, 6000 bp, Homo sapiens
tcacctgggcagtgacctagttgtatgcagagtaacagccggatcccctagattccaaagacacaaaaccatctagaaaccagaggacaaaccctttccacgctcccctttgacaaaagctgtgccacgtgcagcccagtctgcctccctggcccggtctctattgcggccacagcactaggcataggcagaggaagggaggctgctcagcagaggcccagggacaaggtcccaggaatgtgtggcatggagctcccacatgtgcccccttgttataccccatcagggcaccagggccagggctgcatgggtgcattgccatgagtaacagcctgatggactctggtttaaatcctgttcctcccataattccgtgtcgctttgggtgagctgtgttgttgcctctctaggtgttagttccccagttcccttgcttggagaatggggataataacagaaacgatctcttaaaattgtaacgaggacagttaaggaacgcacgtaaagccctcagcactgtgcgtggcggagcaggatttcaggaagtaaaacagccgctgctgctgtcatcagcttcaccttcaccttagatatggggcacgctcttcatcagaccccagagagtcagatgggacagaatgtccacagccagtgacttgcgttttgtggtcttggtggggggacccccaagtggaggggacgtgctcagagttctctggcctttgctttctcggcaggagctagagcggctggaggtggagagggtagagatgatccggcagcacctgtgccagtacacgcagctgcggcatgaaacagacatgttcaaccaaagcgtgagtttccagcccagcggggctcccgggcgacacggggcctggggagagccgcctggcgctaggccgtggcaggttaagtggctgctgcaagtgaatctgccctaaaggcgggcagtgggcaggtgctctggcctgggggtggcctcgtggactgggcctctcaggattgtcctggacgtctgtgtgattccgaccctggcacatgaagtggacacacacgtgagctgttaccctgaggagaaagaagctcgtaacagttacagtagctgaagacattattaaatttcttaaaaaacaaaaccaaaaaaaacaacttctagaaatattcacaatacctaaagctcaagttttatttgtcctgttcactggtggtaaatgtggggtggaagggatagagacaggttttaaggccctcctggcctctcatccaggcctggggtctgcagggtgagaagcagggtcgggatgcatactgggttccccgttcacagccctcttcatgtgctgtccctcagatgggcctccccctggggccccggagccctctagagaggctgctctcagagacactaaggtgaggacagcatgtctcagaggagacctccctggcttggccgccgtctctaacagtgtcgcattttctctgtctcttgcagacagtcgagcccgtggatcagctgcttcgaaaagtggacccggccaaagacagggagctgtgggtcagagagcacaagacgggcaacatccgccctgtggacatggagatctagatgggcctgtgcagcttcggggggtcctgctggggaggggggctgggctcccaccatggggcccatgccgagtggatgccccccaccctctctcctgggccactgaggagaggggagagagctggtgattccagaagggtgacccggacagcctagctgggggctcccccatattcccaggcccagaagacagacccacagccctgcccttgtctctgaggctgaagaccccctgactcccatgctgtgcttgccgctctgaaacaaacagaggctggaactttgtggtccttgccgagttttgtaggggtcactgtcacatgcttgtgccctggaagccccaaggctcttcctccagctggctcccttgtctccagggctttggaggatcagggtagggagggctctgtctctaagccaggtgtcaggatcagaatcatgggtagaaggtgccattcagctcacagccgcacccagaatcctttgcagccctccttctttatttttttcccattgcattctgggagtccacatctggctttctcagccactgttcatcaccaggggttttaggaggaaggcttggctcctgtcttcccagacccaccatgcctggagaggtcaggatggaactacctcattcggcaaattagccccaaattgagcgctgaatcgtgtcccatgagatcaggcgccatctgtaaagtctcctctggaaatgccaatccatccttcccccagctgcttcctcggggaggcccctgcccccaccctgccagcccttcccagtctcattagaggaagctttccaaagttctcagttatcaagacctcatccagctcgtccaaaggcttcagggatggaaacaaaccagctcgtctcagaggccagcaagctggggcctgtccgccacggtgccctgtgcacctttgggctgccctggcccccactctcccgggccgcccaccacaggctcttaatggggccgggtcagtcctacatgtgagatgggttagggcaagtctttgccatcccccagatggctctgtcttcttgtgtatggcagggctgggactgctgtcccttgtacagttttctgtcactggtgggcactggacaggcatagcagactctcttgtggccacactaggttgtcgcctttcaggcagtgtcccgccacctttgcttcccgctccttctggacattccagagccctgcaccaaacccttacttggtgtctgcacctcctttccctctctccatcttccaatccctggaaaagtctggtctgagtgtgacttgggaagctttcagtgctgctgtttggcccagctcattactttctccctttctctaccacagcaaacacattctccaccatgtcagtctaaagagtctaaaggggccgggagaagcatgagcgaggggcagattctagtcgggagcccatgccctggaaatccatctttcttcatctttcccattgaccactttgggtttgacctgcacatctgcagtgagggcagaattcaacaagcacaactcactggtctttcagtcaacgtgctagaaaccgatgacttattaatctctaattttttggcgcctctttcattgaatgagaattgctttcgtatagttcacattagaaaaatgcctaatatactaaagtaaaccaaacgttgtcacttttctcttgttcttgaaacattgcaaccaaaaaggtcagcacaaaggccttcacctacgtgaagacctcctggtaggatctgtccatgggatggagaaccactctgtccagatctggggttgggtcatgacaccagctaccaattttagaatattatttcttggtttctttatgaaaaatgggtgctagtggtaattgctttgtggcttagtaaactactctgtggatgatttccaaacattcaaagccaatagccttgttattaacaagatattttgagtacaatatggctcattgacttttccattacatctgaggattccagagtcctctgttcatccctgggatagagtgagccctcttgcgtcttccagggtagctcaggttggcccagtttgggccagtccatttttggaggtcactctttcccccctcatcccctcacctccttctctttacccccttcacgtacttcctttctttcttccctctgttattcattcatcaagcaggttaaagccattgtgctaagatctaatctgaggacactataatggccctgtcgtcagggaagcccgtgatcgctcgttttcaggggtcttaccggtcagcaaccttggcattgatacataggcactctacagaatttaagttttcagaggtaagtctgttgttctgattaatctgcattcattcagcgaatgctcaagacaagccaggcatgctgagaagcggcgctctagttgtatgtaagatgggcattcctctgctctcctctattctccatgtcgactgagaagagtataataagaacattgtaccctctccacacttaaccctctgggattctttattataatataaaccaccgtcgtgaggcatttacctgttggatggaaggtagacagcaacaagattttaatcacctggtcaccagaccctcacggcccatatccaattcgaatttcagaaatttctctgtttgctttaaataactctttacaaataagggtcgggcacggtggctcacgcctgtaatcccagctctttgggaggccgaggtgggcagatcacgaggtcaggagatcgagaccatcctggctaacatggtgaaaccccgtctctgctaaaaatacaaaaaattagccagatgtggtggtgcacacctgtagtcccaactattcggcaggctgaggcagtagaatcgcttgaacctgggaggcggagattgcagtgaaccaagatcgggccactgcactccagcttgggtgacagagcaagactccatctcaaaaaaattataaataactctttgcaaataggaaagtgaagctcaagggtaaccagtgaggctatgaaattgccagtgaattaagaccagggctagagtcaacagtccagaacccctatccgtatgaacaggggcccgtttctggttgaaatcaaggttaggatgcaactgagaaaataaaagactgcactttggagaggcaagcacgctatccgggttgttgttttgttttatgtcttggtgcttaggtgaggacttagctgggtttattcaaagtgggcgggtctgggctattcttgagaatgtcccttccatttctgagaacaagtcagccccttctacctgcctccacccaggagactgatgcacaagatctgtttgtgaaagcctgatttaaaaagaaaaaaaaaattccttaagccaaatggtgttccaagttggttgctgtgacaacctccaggaagagccacttgttaccctctattctttctagtgctttcagtcagtggcaacacataggccccttggaccgtggggatggcggccctgagattctgtcagtgggaccaccctgggcctcctttctacctccactcagcaccctgttggccaaggagaatttctgcggtgggaggcagtgctctgctagtcaggattgataaacagctgggcacaccgaaacagtgtaccaacgaattcaccaaccaggggtttctttccctaccctttgtgaaaaccaatcaattactagatgagtggatggatgcagaaaaatctgggctgagccaaagtcccttttggaaatacaagccataacattcgaaggacatcagcgaccttggcttgtttaggtgattttacttccagctgcaggtagtcttgacaaggagtgtttaaacagaaggctcaagatgcattccttgtgtaggtcggagagagcacttctaatgttaagtggggtacagatcagctgcccccccacgtagcctggacatcgtcttatccccataatccttgccatccctacaaggcccatcgccaccaccttttcccaggtttattgaggtatgattgacatccagtaaaattcaccctttggaaatatacagctctgtgaattttgacaaatttagtgtcttgtgaccatcaccaagatcaacctgtttttaaccctccaaaaaattcccttctcctgccctctttccctggcaaccctgattgattatctgatcctataattttgccttttctagaatgtcatataaatggagtcacactgatgtcgccttttgagtctggcatctttccctcagcttaatgcttttgagtcattcatgatgtgtgcgtgtggtttgttccttctccttgccgggaagtatttcattgcatgggcgtactactctgcttc

SEQ ID NO: 1924 - DNA, 6000 bp, Homo sapiens
attgtgtgtgacatgttttaaccaatctggactccccagtgtaaaataaaactgccatctttagagagggaagcatttcttgggctcatgataggattgggggtcctaggaataccctagacacacacacacacacacacacacacacacacacacacacacacacaaaatgagaaccaccatcctgaatccttggtatctggggtcaggcttcagggggacacctgagctgggttctcatggggctgggttgcccccttccttccctggctctgctttcttcttcttcctactgccatcccttttccagctttccagcggccaccatgaccccagggggaggagaaggcttggctgtggggctcagggtggggcacagagtcatggtgaggataggatgcttcatgatggtgactgtggtctttttccaggagacgacctcatgcgctgtgtggatctctacaaccaggcccagtccaaatggtttgaagagatggtgaccaccacattggtaagcgggcagggatgtgtggacatggcagtacagaggctgacacagagcagcccctggtggttgttggtgggcgcggggatgatggggtggagtgaccctggagatggtcatcaaatctacttcagtgttggggtcgaaacctcaatgtgagccagcttatgtggattcagatctctgctccagcgcttcctagctgtgtggatgtgggcagggttgggttggatatggctacatccttcttgggctgtcccctgagaggtcagggtcaactgaggactctcctcaactaagtggacaagggcctctttaggaaaaatagccaagctataggaagagaggaccgccccacacatgcacacacacgagttgcaggtccttggtaggagatccttgcaaagtggatggatgggtgaggatggagctaggcagtggggtgggggaggcctctcaccaagggtgaacaacaggcggcagggccgatgatgctcttgagtatttcttgtaaaggggcagcatctccttatcagtcagcacctgcctgagtggacagtgaagtgtggctggtacttgggccagatgggacaggaggcatcatgccaggtgctcatcggatcagcccactgcctaaagccacccctgtccatccagcacaggactaaccagctgccttccccaggtgtcagcccaccagagcagattagaggcctccaccagggacagtgacctagttttcctcctggttaatctcctaattaagccccctgctttacccccctttctgattaatcacctgggcagtgacctagttgtatgcagagtaacagccggatcccctagattccaaagacacaaaaccatctagaaaccagaggacaaaccctttccacgctcccctttgacaaaagctgtgccacgtgcagcccagtctgcctccctggcccggtctctattgcggccacagcactaggcataggcagaggaagggaggctgctcagcagaggcccagggacaaggtcccaggaatgtgtggcatggagctcccacatgtgcccccttgttataccccatcagggcaccagggccagggctgcatgggtgcattgccatgagtaacagcctgatggactctggtttaaatcctgttcctcccataattccgtgtcgctttgggtgagctgtgttgttgcctctctaggtgttagttccccagttcccttgcttggagaatggggataataacagaaacgatctcttaaaattgtaacgaggacagttaaggaacgcacgtaaagccctcagcactgtgcgtggcggagcaggatttcaggaagtaaaacagccgctgctgctgtcatcagcttcaccttcaccttagatatggggcacgctcttcatcagaccccagagagtcagatgggacagaatgtccacagccagtgacttgcgttttgtggtcttggtggggggacccccaagtggaggggacgtgctcagagttctctggcctttgctttctcggcaggagctagagcggctggaggtggagagggtagagatgatccggcagcacctgtgccagtacacgcagctgcggcatgaaacagacatgttcaaccaaagcgtgagtttccagcccagcggggctcccgggcgacacggggcctggggagagccgcctggcgctaggccgtggcaggttaagtggctgctgcaagtgaatctgccctaaaggcgggcagtgggcaggtgctctggcctgggggtggcctcgtggactgggcctctcaggattgtcctggacgtctgtgtgattccgaccctggcacatgaagtggacacacacgtgagctgttaccctgaggagaaagaagctcgtaacagttacagtagctgaagacattattaaatttcttaaaaaacaaaaccaaaaaaaacaacttctagaaatattcacaatacctaaagctcaagttttatttgtcctgttcactggtggtaaatgtggggtggaagggatagagacaggttttaaggccctcctggcctctcatccaggcctggggtctgcagggtgagaagcagggtcgggatgcatactgggttccccgttcacagccctcttcatgtgctgtccctcagatgggcctccccctggggccccggagccctctagagaggctgctctcagagacactaaggtgaggacagcatgtctcagaggagacctccctggcttggccgccgtctctaacagtgtcgcattttctctgtctcttgcagacagtcgagcccgtggatcagctgcttcgaaaagtggacccggccaaagacagggagctgtgggtcagagagcacaagacgggcaacatccgccctgtggacatggagatctagatgggcctgtgcagcttcggggggtcctgctggggaggggggctgggctcccaccatggggcccatgccgagtggatgccccccaccctctctcctgggccactgaggagaggggagagagctggtgattccagaagggtgacccggacagcctagctgggggctcccccatattcccaggcccagaagacagacccacagccctgcccttgtctctgaggctgaagaccccctgactcccatgctgtgcttgccgctctgaaacaaacagaggctggaactttgtggtccttgccgagttttgtaggggtcactgtcacatgcttgtgccctggaagccccaaggctcttcctccagctggctcccttgtctccagggctttggaggatcagggtagggagggctctgtctctaagccaggtgtcaggatcagaatcatgggtagaaggtgccattcagctcacagccgcacccagaatcctttgcagccctccttctttatttttttcccattgcattctgggagtccacatctggctttctcagccactgttcatcaccaggggttttaggaggaaggcttggctcctgtcttcccagacccaccatgcctggagaggtcaggatggaactacctcattcggcaaattagccccaaattgagcgctgaatcgtgtcccatgagatcaggcgccatctgtaaagtctcctctggaaatgccaatccatccttcccccagctgcttcctcggggaggcccctgcccccaccctgccagcccttcccagtctcattagaggaagctttccaaagttctcagttatcaagacctcatccagctcgtccaaaggcttcagggatggaaacaaaccagctcgtctcagaggccagcaagctggggcctgtccgccacggtgccctgtgcacctttgggctgccctggcccccactctcccgggccgcccaccacaggctcttaatggggccgggtcagtcctacatgtgagatgggttagggcaagtctttgccatcccccagatggctctgtcttcttgtgtatggcagggctgggactgctgtcccttgtacagttttctgtcactggtgggcactggacaggcatagcagactctcttgtggccacactaggttgtcgcctttcaggcagtgtcccgccacctttgcttcccgctccttctggacattccagagccctgcaccaaacccttacttggtgtctgcacctcctttccctctctccatcttccaatccctggaaaagtctggtctgagtgtgacttgggaagctttcagtgctgctgtttggcccagctcattactttctccctttctctaccacagcaaacacattctccaccatgtcagtctaaagagtctaaaggggccgggagaagcatgagcgaggggcagattctagtcgggagcccatgccctggaaatccatctttcttcatctttcccattgaccactttgggtttgacctgcacatctgcagtgagggcagaattcaacaagcacaactcactggtctttcagtcaacgtgctagaaaccgatgacttattaatctctaattttttggcgcctctttcattgaatgagaattgctttcgtatagttcacattagaaaaatgcctaatatactaaagtaaaccaaacgttgtcacttttctcttgttcttgaaacattgcaaccaaaaaggtcagcacaaaggccttcacctacgtgaagacctcctggtaggatctgtccatgggatggagaaccactctgtccagatctggggttgggtcatgacaccagctaccaattttagaatattatttcttggtttctttatgaaaaatgggtgctagtggtaattgctttgtggcttagtaaactactctgtggatgatttccaaacattcaaagccaatagccttgttattaacaagatattttgagtacaatatggctcattgacttttccattacatctgaggattccagagtcctctgttcatccctgggatagagtgagccctcttgcgtcttccagggtagctcaggttggcccagtttgggccagtccatttttggaggtcactctttcccccctcatcccctcacctccttctctttacccccttcacgtacttcctttctttcttccctctgttattcattcatcaagcaggttaaagccattgtgctaagatctaatctgaggacactataatggccctgtcgtcagggaagcccgtgatcgctcgttttcaggggtcttaccggtcagcaaccttggcattgatacataggcactctacagaatttaagttttcagaggtaagtctgttgttctgattaatctgcattcattcagcgaatgctcaagacaagccaggcatgctgagaagcggcgctctagttgtatgtaagatgggcattcctctgctctcctctattctccatgtcgactgagaagagtataataagaacattgtaccctctccacacttaaccctctgggattctttattataatataaaccaccgtcgtgaggcatttacctgttggatggaaggtagacagcaacaagattttaatcacctggtcaccagaccctcacggcccatatccaattcgaatttcagaaatttctctgtttgctttaaataactctttacaaataagggtcgggcacggtggctcacgcctgtaatcccagctctttgggaggccgaggtgggcagatcacgaggtcaggagatcgagaccatcctggctaacatggtgaaaccccgtctctgctaaaaatacaaaaaattagccagatgtggtggtgcacacctgtagtcccaactattcggcaggctgaggcagtagaatcgcttgaacctgggaggcggagattgcagtgaaccaagatcgggccactgcactccagcttgggtgacagagcaagactccatctcaaaaaaattataaataactctttgcaaataggaaagtgaagctcaagggtaaccagtgaggctatgaaattgccagtgaattaagaccagggctagagtcaacagtcc

SEQ ID NO: 1925 - DNA, 6000 bp, Homo sapiens
gggtgggaaatgaggctggggtagtctgcgcaggcctgccacgaggagctcaggggttatcctaactgcactgggaagccattgaggggttttgtacaggatcccacctgctgaagggatgggacccagattatttgcagggggggaggaaatgggctgagaagacatttggagtcgggggcctgctgaatcacttgtgaatgacccactccagtttaccaagcacttcctgtgtggtatcaccccctgccaggcctcagggtgatgcagagatgcccaggtggggtgtcctgacccctgggcaggcctttacaaaataaatggaagggaagagttctctggaatcacaggcaaaggaaatttaaaacaaatactcttattataggcatttgcaaacctttgcaaaagtagagggaatatataataaggtaccacaaatctgttaagcccaacgattacctgcctttgtccaatcttgttttatttgtgctcccatcccctcccccaatccccttgccctccaccccctagattattttaaaccacatttctgacttactgttttaaatgcaaatatttcagaatgtatcttccaggaagaagacataatgataataccattatcatatttaagaaaacattaattcaataatgccgcctaatatatacactccagattcctcaattgtctcaaaaaatgcctttttttaagaaagaaaaaagagagagatggggtcttgttctgtacctcaggctacagtacagtgacaccattatagctcgtgaattctagaactcctgggctcaagcgatccttccacctcaacctctcaaagcctagggttacaggtgtgcgccaccatacctggcccccaaatcccttttatggctgcttttctccccagtccaggatcccttcaggttcacacacagatacactggttgctgtgtctctgttgtttctctctctctctctcttcccccaccaaaaaactgctttattgagctgtaattcacatacccatacaattcacccatttaaagtgtatacaattcagtgttttttactatatttacaaagttttacaaccatcatcaaatctattttagaacattttcatcaacccaagcagaatcacctgaagacttaggcagcccctaatctttctgtctctatgggtttgcctcttctggacatttcatataaatggtatcatactatctgtggtcttttgtgtctggcctctttcacctggaattccaaggttcattcacatcgcggcatggatgaacactccattcctttttatgacagaagaatattctgtcgtatggatagaacgtttcatccaagttgttgcctgtctcgttgcctctacactcaatcccttacacctttttttcttttttttttttttcatcaccttgacgatttatttttgaggagtccaggtcaggtgtcttatagaataacctgcgttcttggtctgactgttctcttatgcgtaggttcaggttctggagtttgggcaagaatagctggacagggcatgtggggttctttttactgcatttgggggcacaaccacccaggttggcaccctactcatgaggctcagtttgcactctcggttaaggtgctgactgccagatttctcctttgcaggggtacattttccctttctaatttgtcagtcatctgtgaggtgccagtgtaagaccctgtgagtatcctgtgccctggcagtctttccatcccctgctttcagcatccttgaggatcatggcctgagtcccctttgaggctggggtttgcaaatggtggtcatccaatttcttgtacattttttattggcattcttctgaaataaatgttctctcccttcccctttggagttagttagttagttgcagtcattcattcatatttgtgctcaaattgtcgcagatttggcctgtggtagccctttaagttgtttatgttcttttgttatctctccattattctctgaatactttcttacctcttggtacaataggatattccaaatacctgcctttgaaattagtaccaaggagcttccggtaatatttggaaaccaatttctagccagtagatgttgtcactgtgatgagatgtcattccttctgggccctttcaatggagaattatgatagtgtgtgtgtcacgtgtgtgtgtgtgtgtgtgtgtgtgtgtataaaatgcacgtgatatgtatatgaagttggagcagtaggcacaggttatcagcagcacaggcagagcctgagattgcctgtgatctaccttggccctcagtggttgaagtaaaacactgctaatagaacagagaccagggaaggtgctgacacctaacacgtggaacacccaacctcaatgccattacttgtattcctatcctagccaagttataaggaggaggtgcgacctctgcgtcaagccttattctacagagatttatacacagtggtcccaaaatatatgtttgtggttgatggaaatcttttttgccttcctgcaaagacacatggaaaacaaaatattgtctcaggtctcaaagtggagagatggcggaagatagaggaaagagttatgcaggcttggattctaatttccactcctctgtttactatagccttgtgaccctggacagttttacttctgcaagccccaatttcatgatctgcaaaatggagttgatgccatttaacttgctggggttgtaaggatgaaatgagattaaatatgtcagatggctaacctggagcctgccgtaataagcaagcactcagtagacagtcgctcttgcactgcttctccccttagccccctcatcaccaacatcatcagcatccataggcagactcgaaggctgttgccaaggctgctggagtgctggttcccctctctggggggctgcagtgggaacgcggtggtgatggtggtaatgtgtccatgacaggaagacagactcctgcagactgcagaatccatcccataggctactctttccccttcctgccatgtatttgcttggctagagtctgtacgtgaatgaacctatggagagagagacttctatccctgtctcttctccttggtgactggtacctcctgccatgtagcctccgtctgcctttctccctgtgcagttttgtcaagtgggaaggtatagggtgggccagctggatgagatgatgcactaaaaatgtctatggaagctgtagttggccataaagttgacgttggccaggagcccgttggggtcactagaggagttgccataagtagaggtacctcagtgaaaccacagtgtagatcagatccatgtatctctgagtgaggtccacagattctgcaaatcagaggtgctggcaccacctgggacctgctggatcaggcccagcagctgagagtgcagctgggactctattttggacactttttcctcagttgattctgatgcacctcaaagcttgaggaccagtgataaccatccatttgacagatggagaaattgaggctcaaagaagtcagattctctggccagggtctcaaggctagtaatcattttcttgtctgtgaaattaatgctctgtaaggttcatttttgctagacaccttaaggatatcagttttcctgagttgactttaattagcaacccaagtaagactgtatgggagtaagggtatgcgaccttagcaggggcatagtcaagctccctggtttgcctaatttgctgacgggtttctgaggcaaaggctcgccctcacctgcagatggtcatttggccaggtgtccagggtcgtgctggcctgaggggcggggtgccccccactccaagccggtggttccttcttgttgaagcccctccatcctttttctggcctttatctataaagtgacagccacttccttacattctaccaaggaagagtaaggccagactggccgcagtggctcatgcctataatcccagcactttgggaggccgagacaggtggatcgcctgaggtcaaaagttcgagaccagcctggccaacatggtgaaaccctgtctctactaaaaatacaaaaattagctgggcgtgctggcgggcacctgtaatcccagctactcaggaggctgaggcaggagaattgcttgaacctgggaggcagaggttgctgtgagccatgatcacgccactgcactccaacctgggtgacagaatgacactccatcttaaaaaaaaaaaaaaagaataaggtcatgcacaagtcctggggcacaagtgtgatggccacctgcggtgccttaggggtaagcctgcttcccaggttgctgtgtggctcaggataggagacatcccaggtcctgcttggggatctctggtattgagcccccaacataattgctaatagaacaacagagacccagaatcaaacattctttggagtcgtaggctcttaggacacgtgtagcattttgcactggcagtccttaattttctctgccagaacgatcccaggactttggcaaactgctgaggaccccaggctcagaggtacttgggactctggttttcttactggcggtggaagacatcaaaaggcaatataaagactgagtggaagctggaagtcggtttggctgagaaatccctcctggctcacggggttgggggagcggggagtcagggaggtgaccgagcagcgccccagtgcacattgtgtgtatttaggtttgacgttttggacccggggggtttcagaataaaatgtcgtgtgctgattcctcagtgccaggaggtggtggccttaactctcttctccccagtggattccgcggcttcaggcagcaagcggcacgcggaacgttcaccagcagagggcagcggaggggttaactccccaaatcacagactgagagaagaggaggggagacctggtttggagcagttctctcagagcctgtgcaggaggcttccttaattcgccttcagcccgagagctgggcgtgggaacagcgtggggtcagggagacccctgcttgccctggcccagaatatggtgacttaggattcagactgagcatccctgattccccagcgcctccaccctcagggaacctgaatggggggaaaaaatgtccaatatggagaacagctttgacgatgtttcttgcctctctccccagaacctgggatcctcatcgccaagcaaaaagcagagcaaggaaaacaccatcacagtaagtggctcccgaggggcgccctcagggtgggctgcgagctggggcatttggctgggctgttgccatggcgatgtggaccgccaagcagaagtgatgcccaacctggaaacggggaagttccaaagctcggatttcactcaagttccccatccacatgcccctcccacctccccttctcctgtcaatttcacatttcacttctctcctggtgaacaagtggaaggaggatggctgggatgatgcagaagccgttttttcagggcaggaggggaaggtatgcgtgcgggagtgggttgaagggggtggactgtgctcagcgcaagtgatgtgacgtgtaaattacagccacggcagggttgcttttgtgcggggtaacttctggaagatgtcaaagtaaaaagcaagagaaagcgtcctaagaatagagttcctaggagtccctgaggggagcaggcagcttctgcctagagtggccagcctgcctcccagggcgcttcgagatgcccaaccccatgtggagatgagggggagcccaccccacccacccccatgcagagatgaaggggagccccacactccacctctgctcctcagccctgtgtttggggcagctggggctggacatcattgccccctgaggggcacaggcctgagaagtgtggtcgcaggtttgctattttggcacaagggcaggagagcagggaacggggtattgctctcttaggctccaactcacacagc

SEQ ID NO: 1926 - DNA, 6000 bp, Homo sapiens
tctgtgtcctctccctgcccagtcttgacaaacatacccaatgaattgactggccctcagggatgtgctgggggtttgcagggtggctgtgacccttgccaagcctaccaggagctggataggtctggagtgtcccaagtggttcagccttcaggcccatggctgggagaaaactcccatggccctaatgtctacctcttatgatgggtgccagtgacagccacagtgtgaggcttcctcttgccacttcgtggacagaggacagtgatggtgttggggaggaagtagctaatgcagatgaagaagagtatgccggacactccatggcgactggagttgcaacctggttggggagcccaagcgagtcacttttggattcgtccaaggaggctggtgggggtgggcgtctgatgtgagcaagtgggatattcaagccagcgaggtgctgatgattgctgccacatacattgtcaccccattcatctatctacaccaagtagtgaggcctgaggacacttggatagtgccaggtttggaagaggccggaggacatttgcatctactaaagcctcatttgagaagtttcttttagggactcaaggaggcagccctgctcactaggtgatttctaataagaagggtttgaggtgacacacagaggactctggtaatacctccgacaaattttgcaaatagaaaactgggagaaaggaaggcgaccctcctggctcttgtggcttcttgctggtgagaactgcaggtgtgcctcatgcacctgacccccttttcacacgggtccaaccacagttccacaggacatggtcatgctcaggcccaggcccgaaattagccgcatgctcttctctgtattttggccctgagaaccctttgaaggcttacaaagccaaacaggtgtttcagatgaggtctttggaaagccctgggttcctactgatttttccttcatccacaaagtactttggtcccaacctatccacctgaatggattccagggctcaggattccccctggaagctgactgccccctcggggccaatacaacccggtagaggtaagactcaaaagactcacagcaccagggatttgggtctccaaggccccttccctctgttgtgttccttcaggttgagaacctgtcagtttctaggaaaagacaagagtggacatgagaagcaaggacagaggatggatgccaactggtcaggtacctgatacctgatatttggcaggagggacaacaggacacggatgcttcactatggggacgggaggaaggtcagcgttttgtttccatctccctcggtgttctcatgatctcagtgttcctcctgcctcttgatctcttctagtatatataattataattattattattattgttttttttttgagacggagtctcgctctgtcacccaggctggagtgcagtggcatgatctcagctcactgcaatctccgccttctaggttcaagcaattctcctgtctcagcctccctagtagctgggactaaaggtgtgcaccaccacgtctggctaatttttaaattttttgtggtgatggagttgctgtgttgcgcaggttggtcttaaactcctgggctcaagtgatccccctaccttggactcccaaaatattaggattataggcatgaggcaccgcacccagcccttttctagtactgtctatatttgagactcaggttataatttcatttttttacagtatatattgagaatagcaacatgtatacatgattgtataactagaaatgcataattacgtatgcatttctgtaagctgctttcagcgttcagcctggatccttttgtgccgtgatttcgtcattcttcacctttatttgtcttgctctttcaggcagttgaagtacatctcttaagtacttctgctaaggaggacatgagtacttgtctctagaagaatatgtttctgttgccttcccttgtgaaagacagcttggctaccttgaagtacaatgaaggtcgtggtattttccccatcatgcaccggagatgtcttttgagatgtggctacagagaagtttgagaccagccttctttttattcttgcactggtcttcccacgtaaatgattacaggacttttatccttatctttgctgtgtaaatatgttgttagggtatgtctgctggttggttttttgaaatccactttgccttgaacagcgtaggacgtcccgtgtggcccagctctggaactttcctccccatcaacctttgtttattctttcttttctgttagagcttttctgctggtctcctcttcaggaacacccagtatccatgtcttggtttgctgttctgtcctcacgtttgcatttttcccatttcctttgcattctggggaaaaaacaattctcgtttgttctgtacataacgaattcactttgttttgcagtattgattccatgttttattgcaaccaatgtgcattttccttctgttacaacctttcaaacttccctataatttttatcatttcctgttccttttttatatcattttggtttttttttttcaaaccaacttgccttgttttgttctcttcttatgagtttttgttcttgtatcataatgtcatatcttcctgccctttgttgaggttgctagatacttttctgagatgtttcttctggatactatgtgagatcctgatgagaagtttgtgtttctcttgaggcttctaggcttctggatgttcttcctctatctattttctgcaataaaataaacaatacatattatcttgcctcccccttccccatttgtgcagctcttacaaaatacctgagaccagataatgtatgaggaacaggaatgtatttatttatttgagacagtatctcactctgtcggctggagtgcagtggcacaatcatagcttactgcagtctctaactcctgggcccaagcagtcctcccccctcagcctctcaagtacctggagctacagatgcgtaccaccatgcacagctaaatttaaaaaaaagaaatgttaaggccgggcgcagtggctcacgcctgtaatcccagcactttaggaggccaaggtgggtggatcatgaggtcaagagatcgagaccatcctggccaacgcggtgaaaccccgtctctactaaaaagcagaacaaaacaaaacaaaatacaaaaattagctgggtgtggtggtgcatgcctgtaatcccagctacttgggaggctgaggcaagagaattgtttaaacctgagaggcggaggttgtagtgagccgagatcgtgccactgcactccagcctggcgacagagtgagactccgtcaaaaaacaaaacaaacaaacaaaaaacctttatttttggagagatggaggggcggtggggtctcactatgttgtccaggctctccttgaactcctggcctcaagcaaacctcctgagtagctgggattataggcacaagccacgatgcctagctcaagaacaggacttcctcacagttctggagactgggaagttccaagatcaaggtgtcggcaggttctgttgtctggtgaggactgttgtctgcctccaagatggcaccatgttgctgtgtctgccagataaaggaatagcgtgtcctcacatggtggaaggcagaaggacaagctagtgaataccgcgtgaagctgctttgataagagcctcaatcccactgaaggaggcgccctcatgggctgatcacctcttaaaggtcccacctcttaatcctaccatgttgccaacgcctgagttttggaggggacacattcaaaccatagcagagtccattcaatagatccattaagagctgggatttgttcacagatggggcacacacactttctctaactcccactcccattccctgtctgcttatttggtaaaatagcctcctcaaatatttctgaagcctagttcctactataattctcagttttcattcactcattcattcattcattcattcattcattcattcattgttctgggcactgtgctgagattaaagctgtgaaaagagggatagggacatggccctgtcttcccgaatcttatagtctgtttctttgttgatatggcagctctcccaacctcctccttccaggccaagtctctgaatctctgacctttagaagaaaatgaagactctgccggggtccagcctgtctcctgcataactactgggtgaagactgcagtcctcaggatgtgttgtgacgttgccaggggtcccctactattttctgtgcactgaaatttctgagtatggctagaaaggctgctggagttggggagcgcaatactttcacctgtgagacaggaaatgcgcccagtattcttagagacagactctggggctggtgatgtcactgttgcatgatttgtgtcttaacccagagctggaggagagtatccttctcgggtagctgttcccagctctgtgtaggagtctgcccacctaaacaggtgtccaccaggaaggcatgacgtgggagtgaattgccagtctccagccctgctgggtcttgatcttcctggtgggctctggcagccccattagtaattggttgactccctgaggagtgcagagctggcagtggggccactcctggctgctgagtccaggactactccgggactcaaccttcccaggcgtgcccagccatgccctggctgcttctgggtgtccagctgcctccgtggttggggaagagagaacttgctggagagtcctttgtggaggagccttcaagcagtgccaatcacggcactgggctcattagcaagcattgccatagcaacgggtctgccagaaagtggctcgttaggctgacaacttcagagctgttatatatagatctgggtgtggggggagtgggggtgtggggccctgtggatatgcttttctttagagctcctattgcttctgggtttggggtgtgagaggatgcagagtgggagaccttaaaaccgtctgatctggctgctaaagcgagtgtctgacgaccacccattaacaccagcgagtagcgtttgctcacggctttaggataaggtaagagtcaggtgttctcagaaacctccggagggggagagagtcccggaggtggaggtggcatccgggttgaacttgagcttgaagcatggtgggagcggtagggagcggagtagcagggtctgtactgcctggaggctgcagagacaacctccaccgtctgttaaatagtttatttgaagggtttggggcaatggaacagaatctttttctttaataagtcactgtgcagcccaacactgtctttttacaaatcatgcttataaaaattctatgatctcagttttcatttcagaagtgatgttttttctcagttgctgcctctaatgctgcaacggagtggctttagagcacaggactcacccaggatcactgtgacaaatgcagcctcccaggctgctctggagattgagtcaggccccagagtgtgcacttgaactcacatcccaggtgactgctggggtggcccacggtgaccatactttgaaaaacactgctgtggggggatttgtttttgatctctgtaatctctgggtgactttgcttgcctgcttttttttttttttaaaggaggaatcagtagccaccattaaggggaaaattttgggggttgcgttgtttttttaaataaagagacaaggaagtcagcctacagctagggaacgtgacggcctggacgcgggcggtgatatttttgcacatcatatgctcacttggggactgggagacaggaggatcaggcttgagttgtcatcctccttgggaaggagctggggtgtcaggtggtctcagtgaggaaatggagctgagtaggtgtagctggggagagatgtggcccaactttaaggtaactggatagaagtctctagaacaaagctattattttaa

SEQ ID NO: 1927 - DNA, 6000 bp, Homo sapiens
atgtctgcaggactagtgtgttctgctgaggtcaggccacagcagatcagcctcctggtttgtaatggcccggaaaggtcccttgcccttggctgggggccctactgggatttgcaatgacagtgatttctgtgtgttgcctggagtgatgcattgttgtctgtgattgtatctgttcgtctgtgtgatgcaatgtcaaagtggtgtcggagacggctgttaatgtttaacagcatcaaaactgtcccctctttgctgttacaaaactgaggagtcacaggctatgaaagctttcatggccattttaatttcacaaacctgtaaggactgaaggtgaaggtcttggccatctaggttcaaatgaagttttgcttttaccttcttcttttttttttttttttttaggcagtcttgctctgtcactcaggccggagtgcagctgcacgatcttggctcactgcaacctctgcctcctgagttcaagcaattctcctgtctcagcctccctggtagctgggattacaggcgcacaccaccacgcctggctaatttttgtatttttagtagaggtggggttttgccatgttggccatgctagtctcaaactcctgacctcaggtcatccacctgcctcggcctcccaaagtgttgggattacaggtgtgagccaccgtgcccggcccgcttttaccttcttatgggtgagagcccatctccaagaacagaaaagtatcttggtcctgtctatttctgtagcatgtctgacctcaaaagcgagtgtgtggattcgtcacccggcctctcctcccacactgcagagagaagatgcaaataactcagctgccggtgggggactccccaccgctggatgtgatgctcttgcctcctcttcatggctggtttgggaccattttgcaagtgtaggcttgagcattgcctttctcttgtttttatgatgggtgagaggggggagagagaaagaaggtgggggggattctatagccggtttcctccctctagtttctccctcacatttgacctttttataccctggtatcatgatgatttctacaaagcacagccctgattgtgacttctccctggctcagaatccactgatggtttcttctcctttatagaatcgaaatttcttagttcttggtgtcctcatggcctcccatgatctgatgccatccttcactactatatttctcacctcccatgcctcttaaactctaatgaatggatccacctgcttttcccccacagcctctacccacacggtttctctctcaccttggctcaggctggccccatggcctagaatattgcccctgtggcttgttcttctgacccatcctgcccaatctctcgcaggagcctctgttttcctctgttaaatgagggcgatcatagaattttcctttttggtttgttagagggattaagtgacatgaaacatgtgaagcatagaacagcgcctggtccaaagtgagtgctcagtacaagatcctcacagccactcctgcagcagattgaaacccagcaattagagagggaggaagagtccccccagcagccacgtcagtaactttaggaaggaagagatgggccctgctgtcaggcatgtaagagaaaagaccaggaaggtgggatgcggacacagaaggaattgatatgtccaagggaaaggcacattgtcaccccctctgggagccccagagggtgccacacccctaaacggaaaatccctcgattgacattaggatgctggctgtgtcacctcggtctccccaagattgaacgcaagacgagccatggtgagtgagtcctgctataggtggccagcctcgtcgtctttatttatttatttatttttgagacagggtctcactctgacgtccaggttggagtgcagtggcatgatcttggctcactacaacctctgcctcccgggttcaagtaattctcctgcctcagcctcctgagtagctgggattacaggcgcccgccaccatgcctagccaattttttgtatttttagtagagatgggttttcgccatgttggccaggctggtctcgaactcctgacctcaaatgatccacctacctcagccttccaaagtgttgggattacagacgtgagccaccgtccctggtcccaccctcatcttctaggtgggctttctcttcaccattgccaagaggctggggcagcttccctctgggtgtacatggagagcctgaggtggtgtatctcatgaagcggcttatgggtcacagggtcttttgatctaaactatctctgtgggtcttgggggctttttttttttaatcatggcaaaatatgcatgacatgaaatccaccatctccatcagttttaaatgtatagttcagtggctttgagtatacccacgtgtttgtgcagccatcatcaccaccattaatctccagaatgcttccatcttgcaccagtgacactctggacccattaaacacaaacttcccatcattccctgcccacagcacctggtcacctccattctgcaacctgtcgctattaatttgacttctctaggtgcctcatagaagtgaagcaaatggtatttgtccctttgtgtctggctgttgcactgagcataatgtccttaaggtccatccacatggttgcatatgtcaaaatttccttccaattagccaggcatggtggtgcgcacctgtagtcccagctacttgggaggctgaagcaggagaatcgcttgaacccaggaggcggagcttgcagtgagccgagattgcgccactgcactccagcttgggtgacagagcaagacttcgtctcaaaaaaaaaaaaaaaaaaaaaattccttccttcttaaggctgagtaatattctattgtgtttattttactacgacttgcattgtttccaccttctggctcttgtgaataatgttgccatgaacaggcagcaagaccctcccttcaggactctgctttcagttctttttggtatatacctattaatggaattgctggaccatatggcaattctttgtttaatttttttgaagaattaacacactattttccacaggggctgtactattttacattcccaccagaagggcacaagggttccaacagttctcaatccttactagtacctgttcttttctgttttgttgatatttgtttatttgtttgttttgagacagagccttgctccgttgcccaggctggagtgagagtggtgtgatcctagctcactgcaccctccgcctcctggattctcctgcctcagcctcccaagtagctgggactacaggtatacaccaccacgactggctaatttttgtatttttagtagagacggggtatcaccacgttggccgggttggtcttgaactcctggcctcaagtgatccacccgtcttggcctcccacagtgctgggattacaggcatgagccattgtgcctggccttgtctggttttttttttttaagaacctgtcctaatgggtgtgagctaatatctcactgtagttttgatttgcatttccctcatgattagtgatattgagcatctttaaatgtgcttattggtcatttttatatcttctttggaggaatatcttttgctcatttttttaaattgggctgtttgctttttattgttcagtctggactctttttggacccggggtaactgcagtgcctacctttcagccactggtgatagtaacaacaaaaatcctagctttcattgagcatttacttcgtccactaggtgaaatgtttacatggatgccccacccccaccccctttaatctctcacagcaatcttttgagaaagatactgtgatcatctgcattttacacttggagaaattgaagctggagccgttgcccagggtcttggagctagtatgtagtaaaacaacagcttagctctggtctgactccatccttagacgattgtacttattttcttcccccgacccaaggagctggcattgaaacctcttcataaataagtttatccatttgcttaatagggaaccactcggtcctcaggatcttggtttctctagaaaaccatatttaattctatataaagaatcagttcctaaaaccccaaaggtttgcatctgaaagcaaacacagaaatatgcggcattttgagtgctaaatagtcagctgctccaaaaacctttctaaacggagtgataggatatattcatgaaggatccaagccctgcccaagctcatttagttggtggctgcagtattgctcttggggtccaatcctttctccacttgtaactaatgactttgtgatcctcaggcccctttcagtggagacctcacatgagcctgtctttgttcgttatctgtccaggtttgatggtggcgagggcagagtgaaggcaagagaccttcatctcgcccctctggaggcaccagctttccacacagtggttctttgggggaacattctccgttctttttatgttggtttttatctggccttgggttcacacagctggggccggggccggggccaggaccagagctgtgacttagggttgggaggaagttggccaaaacattctccagcagggcttgggcaggcccaggaagtcccgcctaaaacacagtggacaaagctgcccttgtccacaggcctgggggtgggaggcatctgctcagtgacacaagcttggccattgtttgttgtgacctcagccaacgttttttagctgagaaaggggaaaaagagggagagtgggaaaaaaagaaaggcctccagaaacattgcatctggaaagtccagaacaagttgttaatttcccagcaagcactggagcggatttggaaggaactatgcaatgtagtgggttctttgtgaaagaacagcaatgagcaaagccacaggaacctccgctggggtgcccagaacactggccctgggctagcgacttgcctcagccccatttcccggagaggctgccatgaagaggaagccggcggagtcttggtgctgagtctgagggcttcaggcaggacccaagactctcctctgaggtagcagcccccagagaaggttagctgttctctgatggtaagaattgatttttcttgcctgcagatgtatgctccagtttgcttttctctgcatgtttctaaaatgactgtgccatggtaaagaggcagctctgaaaactgagatttggggtctaactgctgagctgtggtggtctggggaccctgtgtgctagggggcacctttcacagatccaaggcatgagcagggaggaaaaaaaaaaaagacgtgggtcattgtgtgagagatcaggaaaagcggatgggaggaggagaaagatttatgaaggatgtcttggagagaaaggaagtcttggctcccctagttacctggggagcagtttcgtagttggagctgtgtgatggagaagcagagtggtgatgtgattttaatggagtccaaaccttgcttcctccatgtaactttttccaagtaagaaacttggattctacccacctatctggcttttaccccacggcccagttctagctggggcattgtaaggcaaaagccatttgaggactataaaactttatgaaggtaagtgggagctcctggggtcatggctccctagcagaagtacctgcccagtaatgcactgtgcttccaggcttggctgagacatctttccagcttggtggtggaggctgcaacagtgatgatggaagctcttctgatacttagcagtacaacagccttgtttcaccaatctttccacccccagaagttacgcatccatcttctttctttgcaaaggaggacctccaagagagtggtgatcactctcttgaggctctgtacagctgtgagaggtccaggttgcatggaaaggctggcctgttttggtacatggtctccctccaggatatgctctcccacctccctgggcc

SEQ ID NO: 1928 - DNA, 6000 bp, Homo sapiens
tggtttgatcaagtggcttaaacaaacagtgtcagcagtctgatgtttctctatctctgattccctgtcttcctcatcagccctcttccttctgcattggctccattctcagtgagacttctgcgagttgtcagcgtgaccatcagcagcttcaggcttgcatcttgtcatagtaatacatctttccccagtaattccaaaaccaaattccaggtatccagccccagatgggtaatatgccccttcgtgaactagtaccgtggttggggagagggcacgtgctaattggccaggcaggagccacttgctcccggaaacctcgagggctgagaatgaggtgaggtggttccacagtagaaaaatcagggtgcttctttcagaagccggggtacgtatggcctgctgggcaggcccacacagcatacagatgctacgagagcctgctgtgctttgtaggtcacagacccccacggtgtgcttggaaatgccagatcatgctgtgaggcttttcctctgccccagcctctggcacgagactcccacgtgtgaaaagcagactcacagtccctgcgtgtcgtggagcccgggaaatgaaaacgtcaatctgggaggccccagaaggtgtaggggattgagtgagagagccaagaagctgcagcagccgccgctgctgggacttcgtgtttacaaatcacattatcggagcatctttgaacttctgttggcacgtgtgtgactaatgttcgagctggtgagggccatgttgggaaatggaaaagggaagtggggacgagcgctcgtgctaaaatggtgctctctttggcaatggcctttggaggaggtgactcactaggggcattgaggcaacaaagaaactgctgtggctggatgaaaaaaagatgcttcctctgcccccctcaccacccgtgcaaggggaagcccatgacctgagtgtcttgaaggaagcatttgaccagggagggtgacccagggtggagccatactagacggtggtcaggaagctgccgtggtgaacaggttagagtggaggtgatgagttaagagttccagagccagatgtgcagggctgagccctcagtgtcgtatcttgttagcagcctgaccttggatgagatcctcaccctgacaccctgatctcggcaccgccattattagctgtttaagtgtatgcactctgccccagtttgcctggggcaaactgccgaactgtttgaaccttgaattcattctctggaataagcataatcatagaaactagatgatttgtcagggttttgccggagctgctgcttctctgctttggagcagagatggtagctttggcagaaaatggtggatcattgcaactgagaagttaaataagaggtttcctcagcagagagagcaggatggaaggggtcctcctgaggtgtaggacatggggacgtctttgtgagtatcatgcgcacgcacacacacacacagacacacaaacgcgtgcgcgcgcacacacacgtgccaggtgccaccatgccgttgcctattattttgatggaggtaggcaggagcaggaactccttttgcaagaatgacaaagaagtggcattagcaagttctgcctgtctgttcctctaggggaaaccccatgaaaccaccacagagccactctgcttccctttcttggcccactctggcaaacccagccagcaggtaagtgggagcacagagcgaggcaagggttgcctttgctgtggggaggggtccatcctactgtgtgccccctgatgtctgcacagtgtggatggagctccctggacatccctgccttcccctgggctgccccaagtactgcaggcctcactcacgtggtgcaggactgctcggctacccacaggatcctggggggtgagagggcatttgcggtgggagctgagatctgcagggtcattaggaattagtgtcagctaatggtggctcagcactcctgggggagagaagaaaggaaagggagagaatagggatgtgagcagccctgatttgctggttcagggatttctgagaccaaaaagcaacccaccagcaaagcagaattagctgtgttatttaaagttattcacatcaggatatttaaatgatctgtgcccactgtgttcgtgtggtttctatgggcaagatgtgttttatgtttttaaagtttgtttaacttttctctatatccatggagaatcattggaagatcaaatgatatctcgatcagttgtagaacttattttattttctattttattttatttttgagacagagtctcactctgtcgcctgggctggagtgcagcgacgcaatctcggctcactgcaacctccacctcccgggttcaagtgattctcatgtctcagcctcctgagttgtcgagattacacgtgtgcaccaccatgcctagctaatttgtgtatttttagtagagacgaggtttcgccacgttggccaggctggtcttgaactcctgacctcaagtaatccacccgccttggcctcccaaagtgctgggattacaagcatgaaccattgtgcccagcctagaatttactttaaagtaattaccagaatggtaaatttcctccttcatgtaggtcagaacttgtctgtgatctctaaaagtcctgagcttgatccctccgtggacatgcacctgggtcgggggcaccgggaaccaactgaagcctggtcagtgtgtctgtaccagggttttcggccatgttactgttgacatttcgggttggatggttgttttgttgtgggcggcggtcctgtgcattgttgagtgtttagcagcgtccttggccagtaaatgtcaccaagtattgccccattggcccctggggaaaaagcgcccctagttcagaaacacaggctacacatggagtgccatattgttcccctagaaaccaggagaggaaagagttcctctgttctggcctgagagggaggctgggagtgggaacgcccagcacagttcgctgtgggagaaatgaaccaggggcctgaaagggggtgggtgccacagctgccccttcctacagcttccccccagaggctccagagctgtcacactgtcattaacgacaccgcattcctgtcggtgcttgtgtgcatctttggacgaagctagaaaagaagctgaactatcttcaactgtgccataaaagaggatataaaaaaactcaataaaacacgaaaatgtcagccgaagcaggattgcttgctggggccttggcaaggaggggcagacagcaggctggacgcccctggcgctgtttgtgggagtcatgggtggggaggagaggccaggagagcccagcccatgctgggggccaccaagcctgggctctgggccaaacacacagtcccctggtttcttgagcccaaccccaatgctgtaattctgtttattttgctgaatatgaaatccatatggttctgatttcttccttgtaatccgtcatctctgtgtggcttcggagccagcaaccacgcaaagtggctttgaagttgttgttctgggtaagtaggaagttgtgttcttccagggttcagtggggcaaccatgaggtttgcatttggtttgggaactgctccaggagagggaagcagattggcacagtcagttttggtcctggcttaggagcttgggctgggtcagaagggagaccatttacagagccttcggtggatttgcacagccaaggccactctctagccctcagcttaggtcagagatactcttggttctaggtgtctctttggaaacaacagaggtctctgcagggagctaatgcactcactcagcctctcccacctccgtcatgacaacccataaatgtgtccaaggcttgccaaatgtcctcaggggggacaaagtcgcccctggttcagaaacacaggctacatgtgggatcgctgggccacatggtaaatgtatgtttaatgttacaggaaactgccacactgctctgcagaaggaccataccattttgtgttcgcacgagcaacgtgtgagaattccagttgctctgcatccttgtcggcacttggtattgtcattctttttaatttcagtctttctagataacacttgattttgacatttagaaatgagccccagaaaggtccaagatttgttcaaggcccctagctccttgaagaccagaatctaggcattctgtcttggggactgcgggctttctgggtggtggccaggtgtacagaatgaaagtgacagggttattccatgtgccagacctgggaatcagtaacttctgtctggccctggggcttcagcaatatccaagaggaatgtagaaaaaggaggtggtggtagcagggaaaagttgcacatcccggagtcatgaggttgaagaccctgcgctgctgctccctcctcccactcccagctcattttaagctggaagctcagagaggtacagaagcctgcccagtgtcactcggctagctggtggcctctcgactcttcgttatggcaggcagtggcagaaggccagccttgtttccagaagcacccttactaaagcaccagggctgcttctcctcggcgctttaaggagtagagtttttgcaaattgctctacctggttggattatcacactccctcagtgtcttggccttgggtccactctagaccggaaggagcatgtgcaggggatgatggctgctgctgaaagcagagtgggtgacctaatggggaggtggaggttcatcaggaccaggcacttctccagaggcatcccacccaccctcagggggaaagggcccagctgccctggaaggctgtggacatgctttcccgattgcagaatacttctctttcattttgaatatcatttgtttggttgccacggcaacgtcaagtctctattttaatgctaacctgcgtggctgcaactttctatatataaatgctgctttgcacagtgaattagccgatgccacggggaagcagcggatgtggggatggtggcagaaaatgaccagcgtgtcagatttgcataaggacacaccacaaggctgaggtgagttggaaccagggctctgctggttatctttgatgcagatgctcgaagctaattggaccaggttgagtgcgaggcagccgccactcctgcaggaggagaaatcttccttggatgacctcttgcttggctagggtttggctctgctctgggggggatttgggggattcttctgtcttcccgtgtatcagtcctcctcatgcatccagtgagtctgggtcgcaccatgacccaagggtctggaaagaagagaaagccacttgggcaggggaagtatctgagatgagctctgtgggaagtgagtttttcttgatttccggggatttacctcagtttcctgttttggatcttctcctcctcagtttgccttttcttaattccccagtgtagcgagaatttgtagaggccacgtggctccaagtagcataatagagttctcaggagaagcctgaaaaggcccttgggaaccagcagatacagttcccccaggttctagatgagggagatgctcagagaggtgacacgctctgccagatgtcacacagctgccctggggaaagtgggatgggaaaccaggtccacactggtcttctgacttactcatgcatgccacgtttgtgcgcattctgtcatgggaccaggcagcgtgtgggtgtacacaacagtgaaaggggatacagcgtggacagcataccctgatgttcctttctggttttgcaagccggagacgtgtaatgaacacaggattgtataacttgatctggatcggcctctggaaagagcatggaagtttgaatctacaaaacttggatttgcgtggattcagccactttctacctgtgtgaccattttgtcaacttttctgaggctctatttccccacctaacctcaagatgtgctaaatatcttcc

SEQ ID NO: 1929 - DNA, 6000 bp, Homo sapiens
tcagcctctcaaagcattgggattacaggtatgagcgaccacgcctggctatgtttaacgttgtaaagaaatggaaacctttccatttctctgccatccataggctgatagaaaggtgtataaggttgtcttgggtagaaatgaaataccagccaccacataactaacaaatgcacagtgtctagagaaagctctgacacaggtttatacaacaacttagcaagtagaaaatctaaatatgaacagggtccaaacaatctatgcaaaagatcaagaagtactgaatgcctgctttttgtatgagtcaacgttaggctttaagaaggatagataggctaggcatggtggctcatgcctgtaatcccagcactttggtaggcagaggtgggtggatcacctgaggttaggagttcgagaccagcctggccaacagggcgaaaccccatctctactaaaaatacaacattagccgggcgtggaggcgcatgcctgtaatcccagccactcaggaggctgaggcaggagaatcacttgaacttcggaggtggaggttgcagtgagccaaaatcatgccattgcactgcagcctgggtgacaagagtaaaactcagtctaaaaaaaaaaaagatagatggaaatttaaaacaaagatgctatccctctcctgagttactaacagtctaaccagtaaaataagacttaataataattattatttttttaaaaagcaaaagtaggctaggtgtggtggctcacgcctgtaatctcagcactttgggaggccgaggcgggcagatcacgaggtcaggagattgacacctgcctggctaacacggtgagaccccgtctctactaaaaatacaaaaaattagccgggcgtggtggcaggcgcctgtagtcccagctacttgggaggctgaggcgggagaatggcatgaacccaggaggcggagcttgcagtgagccgagatagtgccactgcagtccagcctggctacagagcgagactccatctcaaaaaaaaaaaaaaaaaaaaagcaaaaataaattagccaggcatggtggtgtgcacctgtagtcccagctagcttctctggaggctgaggtgggaggatggcttgagacgcgaggcagaggatgcagtgagccaagatcacaccattgcactccagtctgggcaatacagccagatcttgtctcaatttaaaaaaaaaaaaagcaaaaataattaaagatttaaatacaatttcaagatagtaatataaatcagagagggagaaggcaggagggaaaattgataagggaggaatttatctttccttcaagatcctgggagaaaacagaaagccaaagtgtgtttctacaaaatttgtggcatcccaaagatgtaagagttcctccttctattgttgctctagaaatcttagttaaaaaagaagtgttacgtaataaatcaccaggacccttgaactggatagataaaaacaatcgctaacataggggcatttaatgtgccaggcactgctctaaacagtttacatgcttcctcacttaatcttcttaataactctatgatattaatactactgttgtcttcttgtagtgatgaggaaaatgacgctcagagacgtaagtaaatcacccaatgccacacagctagaaagtggcagaaatggggtttgaataaaggcagtccagagccaacatatttaaccactaactacatttaaccatttaaattcccatattccagttactggattcgatctccaattacagacggggaaatagacccaaaggtatgggaagacttgaggatttggaggttacctgattgataagagatcagcaacaggagttccactaactgctagtccagtcttatttctatgaagactgacattgggtatcaccagagagtcttttcttttcttttcttttcttttttctgagatggagtcttgctctgtcgccaggctggagtacagtggcgtgatctcggctcactgcaacctccaccttccaggttcaagcgattctcctgcctcagcctcctgagtagctgggattacaggcacgcggcaccacacctagctaatttttgtatttttagtaaagatggggtttcaccatgttggccagactggtctcaatctgctggcctcgtgatccgcccgccttggcctcccaaagtgtggggattacaggcataagctctcacaggctgtgcccagcctagagaactttctcttaagatgctatttgtgggtgagtcactaggatacctgctttctgactggcaggggggacgacagaaagcaacaccagtgtacaataagctagaattgagttcaaagctgattctgctgttgaccagctgtatgatggtgagcaagtcacactctttgagcccagtttctttacctgaaaactgggacaacagtcacctcatcagctcgtaggattacaggaatgaaatgaattaagtggagaaattaacagctattatcatttttggttgctgcaggaatgtttgaggtgggtcaggtagaactcaagtgtatggcatgctgtgtaggctgcgatttctcaagtccaaactggatcacagttcctcacgggcatgcagagaattagggttgcaggatggctggaaatcagttgtcctaccttgattcaggccacatcatcaggaatgaagcctcagaacagcctgctggaagtcacatattttcctgatacaaggaattgtatctcttttaaaacttcattgggccagctatttttaatgactgtttttgatatgaagttatgcagctccgctttaagggactcttagtggtgactgtggtcaagagtttgtttctttatatttccggccaagcgaatgttcaagactttgcaattgatggactattacaaataatctgcttgtgtcactttgcccatggccagagaacagatggaggctgctcaggtgagatggcttagctgcagactagggctcagtagtgactcttaaaacctgggcatgagtatttttaaaaagttgcataatgactgtaatgtgcagccaggattgagaaccattgaactaggtgaaaggctctgtgccagggtctgattcaaagcatagacaggtgcgcaagatcttcaggctcttggagcccggcctgactggttttgtaatggatatctaggcagtcatagtaagaggtgaagctagaggaggcgttgtggagggcctgaaatgtacaggcagagaagtttgtaccaaatttaaaaggcaatagggagccacagaaggtgactgggggaggggggaaggagtagacagaggtatacaggcgtattaaagggtccagctttttttttttttgagacggagtttcacccttgttacccaggctggaatgcagtggtatgatctccgcccactgcaacttccacctcccgggttcaagccattctcctgcctcagcctcctgagtagctgggattacaggcacccgccaccacgcccggctaatttttgtatttttagtggagatggggtttcaccttgttggccaggctggtcttgaactcctgacctcaagtgagccattcgcctcagcctcccaaagtgctgggattacaggcgtgagccaccgcgcctggccgagtccagctatttacaggctaaaaaatgtactttattttatttctttaaaattttttatggagtagactagcaaagaaaccaagctttcttttacttctgtacggtcagttcaaggtcaacattctgcagcactcaggttcactggtccctggagagcagggactggcccaaatgatgtttgtagtacctggcacatcgcatggaacatggcagcctcctggtaatgtttgttgactgactacatgagtgtagactctttagccaacccatctcgatttcgggagggctggtaccctgggccggccttccctctgcaagtaaaagcattggtgctgttcctctcaccgttcgcctttcctccatttatccccatcgactgtttccaattctatcaactccgaccccgtcttctctccattccgtccctccagcgtgccacgctgccaccaggctgctgggctcaggcgccaggcttcaaacctgtctttcacccattgttcagtttccggtgagacaagttcaaccccaggttcaaccactacaatgacaaccacaaacgatccctcgcagacacctcgaagaagccgcccgcacgccacgggccgccaggcctacaaagcaggcacagaacagaggggcgtttccattcccgcggtccccggcggtgggggcgcgagtgggagcccctctccccagtgacaggcccctctgcgagggagcgcgcagccctccgcgggcgtggccgccctggccccgccccggcccgccccctcgccagtgagctaacccccgcccggccacccggccgccagctcctctccacggccgcccgccgcggagtcctgccgcgggggatgctccgggtcccacctcccgggggagctgcgcatttccgcgcgccagggcggccccggccccggtcccggccccggccccggccagccctcgcggcggcagcccgcgttccgcgttcccgggaagttgtctccggagcccgcggcgcctgggtctcctccccctgagccccgccccccagcccagagctaggatccgcgagctgcccggcccgggggcgtcgccgctcgctctgcgaagccaacgagtctctgcttcccggcgcggagcgcgcgtcccccgcctgcctgaggacccccgcgcaccccagagacggcgcgcgcccagagcgcgggagcccggagcgccgggcgcctgggaccccgcggagccgctgcccagcccgtggggctcggcgggaatgcaggctgcgctgtgaacccgggcgccaaggccatgtccggcgctcgctgccggaccctgtaccccttctccggggagcggcacggccaggggctgcgcttcgccgcgggcgagctgatcacgctgctgcaggtcccggacggcggctggtgggaaggcgagaaggaggacgggctccgtggctggttcccggcgagctacgtgcagttgctggaggtaaggggcgagggccggggctgtaggagccggggctgcggtcctcggtgcgctcgcgtacctgttgcccgttccggggatgccgcagcgtcccggtcggaggggcgccccggggggcagcccttgccggcgctacctgtagctccacgctcctggggggcagcgacggcagcgggcgcccctcggggcgtgggcaacgcggactcgcggggagcttccaccttgcgccgggcctccggagcacaccgtggctgctctgaggaagcgagaacttgttgcctgtgtgagttaaggagcaggcgggagcgttcccggcagtggcaggggccggtgaagggtctggcggtcttgggaagaggcacggaggatcaggggtgcgagaaagtggcaccgactcggtcccgcagccccgcgtctccaccccggagtctagagcctgatgacccgtggacggtcgtgctgccttgggtcaggctgcctggccgcctcgggaccacccacttgctggtcagccgagcctgctggccaccagcccgagccccctcagcaggcttgatcctggggtgccgtagcaccccccgccactgcctgctcccctggtccagctccccgaggctaaggctcagaacccgaaagtggcttgttcctggggttctggcctggccccagggctgcacaggacctgctgaggcaaggcggctggctgtttattgtctatgtgacaggctgtcctctaatcactgagctcgcagtcacagcctgagtgagacccgaagtttctaaagtcctttgtgtgtgggggggtgaccttccaggacatcccctttactagaagcccgcctgcccccaggattcttgtaaag

SEQ ID NO: 1930 - DNA, 6000 bp, Homo sapiens
tctgttgaccttggggttcaggggggccttggtcagcagcactaggtgctcctctggggccacgtgcagctcactgcagaaggtgtggtgccagatcttctccatgtcatctgtattagtccatttttgcactgctgataaagacacacctgagactggacaatttacaaaagaaagaggcctaatggacttacagttccaggtggctggggaggcctcacagtcatggtgggaggcaagtcacgtcttacacgaatggcagcaggcaaagagagagagagcttgtgcagggaaactcccattttaaaaaccgtcagatcggccaggcacggtggctcacgcctgtaatcccaggactttgtttgggaggccgatgcaggcagatcatgacgtcaggaaatcgaaaccatcctagctaacatggtaaaaccctgtctctactaaaaatatgaaaaattagccaggcgtagtggcacctgcctgtagtcccagctactcgggaggctgaggcagaagaatcacttgaatcccggaggcggagcttgcagtgagccaagatcgcaccactgcgctccagcctgggtgacagagcgagactccatctcaaaaaaaacaaaacaaaaaacacaaaacaaaatatgaagttttgggtttgtaagtcctaagtttctgggttccaacctgaattggtacccactttgtggaaggttatgttatttggacctaagtctgagcagttgcaaaggggccagagaaaataaatgactaggtaaatcaggtatctgtgaataagaaaatgtgatggctatctttttaagtaactgaattacttaatgatagtgaacaaagaaaatcctatctgtatcctttcctaacatcaaaggctgaaatcagagaactttaattgcaaaaagcatttaataagtctgaatccataggctggctctatagttgattgttagacgaaaatgtcaacacatggtatttaataggcacctagtagtagattaaaacacaaaaggcatagcagatgaattctaattagtggagagaggttaatttttaaaagcttacagaaattgctatggtaagaaatattaaattaatcctaatggcctttattgaaccactaataactcatacctcgcaactgactggatgccttatgtgcagagttgattgtctaattacctaaaacctgaacttagaaactgtgcatgggctaggctgggcgcagtggctcacgcctgtaatcccagcactttgggaggccgaggcaggcagatcgagagcatcctggctaacacagtgaaaccccgtctctactaaagatacaaaaaattagctgggcctggtggcagacgcctgtagtcccagctactcaggagactgaggcaggagaatggcatgaaccctgggggcagagctttcagtgagcggacatggcgccactgcactccagcctgggcaacagagcaagactccgtctcaaaaaagaaaaaaaaaaaaaaaaagagaaagaaagaaattgtgcatgggctgggtgcagtggctcacgcctgttatcccagcactttgggagggcagatcacaaggtcagcagttcgagaccagcctgaccaacatggtgaaacccgtctctactaaaaatacaaaaattagctgagcctggtggcatgcgcctgtagtcccagttactcgggaggctgaggcaggagaagtgcttgaacccgggagggggaggttgcagtgagcgaagatcacgccactgtactccaacctagcgacagagtgagactccgtctcaaaaaaaaaaaaaaaagaaattgtgcatttatctcaccttctgaaatgttactcattgcttgctgcctttcagcagctggccagactcctaaactgttcaaaacatctaaaaacggaatgttttctcagttgctggaagaaacaaaaacttagatcattatttttataacagggaatcaattatagtaacttgaaaatatgagatgtgattaaaaatattaaattgaaatgcttacaaatgaaatacaccccttcttcctgaaactggaaactaagagtcattgacatgtggtttgactgaaagataaagcccagctgtatcctacagctacatcagagcccctgtggctaagggtacatataaaaaactctaaaacaaatttctgaataagatgtgacttttccctgccacttggctctatggtcctggcaactgatgccttggaagtgattgatcagtttggatactcagctataatgaagcctcttggtttagcagtagtaagaaggcagaaaagcatcaaaaaaccttaattctgattgagcctatttcagtggtggaaaaaaatcttaattctgattgagcctgtttcagtggtggaaaaaacacattctggattgtatgcatgccaggcagtaacatatccagagcttctggaatcatttcatacaatttccattatgggatagaagctttgagattagcattgcatttcatttggttgtgaattgttgaacattattggtatctgtgctttctgaacattactgctgagtttcaattatctttcccatgagaatgggcacattttccgacttctaagatgtcccttttgttgcatgaccttgaaagtttttataccccatgagagcccaatttaaataacctttggtacaattcactgaggcaaagatttggcagttgttaattttttttttaaagatttataggtttatttaagaaagtacctccaaaagaggtaggtggctgaagccagtggtgttgggaaagatgttaatggcctaaattgagcccaggtgtggtaaatgcacattgacttttactgaaaatacactagttgaataaccttccgccattagcctatcaccatggaaataaggataatctgagcaaggtggtgaactccactaacaaactgaaaaaggtaattcctggaattaaagttacaaggtgaaaaaaaccttgttcttgacttaaaaatctcattaacaaacattagtttcaagaacttgaacccgggaggtggaggtagcagtgagccgagatcgcgccactgcactccagcctgggagacatagcaagactccgtctctaaaataaaataaaataaaatcaccctgtaacttactacctcctcagaaattaagtttgcgctgtccaacagcaagaggaattcgcttgataagaataattaaacacataaaggcaatgcctaacctcgtaacgccaccccatattccttaatctttaccaagccactataagacggcagaaaacacaagctgcactttcgttcttttctcgtgtcccgttttcaacagaccatggatttttttttttttttttagatggagtctcgctctgtgccaggctggagtgcagtggcacgatctcagctcactgcaacctctgcctcccgggtttaagcaattctcctgcctcagccaccagagtagctgggactacaggcgtgtgccaccacgcccagctaattttttttgtattcttagtagagagggggtttcacctgttggccaggatggtctccatctctttacctcgtaatccgcccacctcggcctcccaaagtgttgggatattataggcgtgagccaccgcgcccgaccagaacatggaaatttaaagagaaaaaaataagtgacttctgatttcaaaaacacaaccacccacttttctattctattcctggtgagcacattctggagactctgcggcaaccatagcctcggccgcggcggaaggctccggggcggccacacctcagggggcagccacacctcagggggcagcgcgcacaggcgggtcaggctctgattcccatctctctccggtcttcactggaaggacccacactacatcacaaactaatggctttacaattaacttctaagtagctaaatttagtaatgggcgctctagttttaaaaaatattattcaggccgggcgcggtggctcacgcctgtaatcccagcactttgggaggccgaggctggtggatcacctgaggttaggagttcaagaccagcctggccaaaagggtgaaaacccgtctctgcaaaaatacaaaaaattagccaggcgtggtggcggacgcctgtagtccccagctactcgggaggctgaggcaggagaatcgcttgaacccgggaagcggaggttgcagtaaggcgaggtcgcgccactggactccagcctgggcaacaagagcgaaagcgaaactctgtctcaaaaaaagaatattattcaaaaactgattttcacatttttaaaaaagacccactgagggaggaagaccgaatcccacacatgcgcgcgcacagcggttccgagttctgcaaccaacctcccacgggcgccgcgccttctccgcgtcacgtgacggccgtctcccgcaccttccatactctcaatgtagggagaggacgggttccatcagcaatttaataaaaaccattggtgaagcaaaaaaaaaaagcctgccaacctcttataacgttttttctttatttttctcttttatgtggacaggaagccttaggttggctatatttaccctcaaatctctttttaaaatgatttttaagtttcagcatactcccgcgcttaatgaaatggtttcccccagcatccccagctggtgcggtctgaaccattcggaacttcccagaggggggcaccggaataggggcggtggaaaagggtaattgtcgggcagcggcccctgcttcccagtcagacctcggagttgtaggactcggactgtgttcctgggcttgcgagagctagggaggcccggctctcctcgcggtgcaggacgcgctcggacggctcccgcacccccaccgcagtgttgggtggtggtacggctcagggagtcacgcgcctgggtgtcggcggggctgcgggaccgcgagtgagtgtggtcgctcctggttctgccagctcccctgagagcctgaacccgggcttgagagcctcgccaccccgggtgacatccctgccgtgggcttgggggctctgggtgtgattccgccggtccgggtcccgcagcgaccacctacccagcgcagtcaggggcggggctgggacccagagcgggaccccggctgccgagtccaggtgtcccgcgggcctcgatttggggagcaggtaggcgggggtctgaggggttggcggaggggcatgtccgagttttcgttggtcccaggtggacgagtaatgggggagggtttagggccagagtccagggcgtcgccgagaccctgagatttgaagataggttgggggcacgcccattaaccaagtctatggggatgaggactgtgatctcatttgatgttgccatgaaacgggactgtttgccttcccttctcccaggttttgtcttcgctctgtttggaggagagggtgtgtgtcatcctcttctcccagtttggcgttcaggagggtcctctgatgcgctaatagggtagcaccgtgtcctccagggagggtggaagaccgcgcttctctccagttgagagtactgtcagtcgcgtccttgtctcctggaaagaatggattggcttgtggattgaagtccaaggtgtggtcactagcagtctcttcaagtggggacacagggcaaggaggagcttgctggaagtaggttctggctctctagcctttggccacagccagtttagtgccagattatcaccgtggtcatcaagtaattgagtaatagtggcaggtgacactgcgtttgcccttctagtgtcctatgtcagggagctctgtgaatggaaatccagggaaacggtggaaatagagccacagtgagagtggatctgaactggcagtcatcccctgcagaacttttcaccctgggcttgttgggatcccagctgctaacttaatgaggctccccagtgggagactagttatagaa

SEQ ID NO: 1931 - DNA, 6000 bp, Homo sapiens
tatccagtgggtgcctcaaccttaacccacaccaggctgagctccaggtagctctccccaatctgttcttctcactgaaaggcagctgcctacttctaagtgctcaggctaaaagccctgctgtgaatcctaactcctccttctctcagacctcacatccatcaaaagaacccagcggctctatcttcagaatatacttgcagtccagcccctcccaccaccccactgccactgccctcctctcccatctccactgctgtcagagccaactgggctgcctgctcttgccctttccccccgagtctatccttgtcgtagaagccagggaatcttctaaaaacataagtcagatcactttctctgctgaaagttctccagtgggatcccatctccctttgagtaaaggtcacagtccttactctgacaagacctgcccaggtgcctctctgctccagccactctcctgctggctcgctctccagtggccacacagcctccttgctggtcctcaaacatgccaggcaagctcctgctccagggcctttgcactctctgctgtttctgcctggacagttctcacgggtttccacatggcttgttccctcacttccttcaggtctttcctcaaaagttactttctcggcaaggccctccctggcagccttagcgagatcgcagcctccttctcatcactcatccctgtcacttcctggcttggtctcccctcacacttctggcttactaacatcctagaatatgcactccttattatctgaccccccagcaagaacgtgcgctccgggaaggcagggtcttctggtttggctttgctcacccctgcatccccagcacccagaagacaatcaataaagggaaaagaaggattatcatctcagttgtacaaatgaggaaactgaggctcagagagcttaaataagttcagtctccttttcttaaactgctatgaagatgaaacaagtgctttgcaaacagcagagcacagagcgggctgaagttgtcaccacagtccctcacctggtggaggcaagctaccccttgggaagtcctggaaggagagctcctactctgtctttttactccaggtcctccccactggctgaggagaggccaaatggtgagcggactggccagagtgtccacagctcagccacgtccaggctggctcactggggcctgcctcctactgcaggtgttgctctttgctgccccggggaagctcacagggtagggcttctgagtgcagtcttggtggatggatcagggagtccaaccatggctgtgtcctctgctcccgctttaccaggaacactcatgtttgggttcccctgaactcagtctctacctcttaacttgttctgaatggggaggggaaggatatgacaccttcagaaaccccaaaagtcatgaaggcggtaagggaggcccaagagtccagcttaccgctgtgggggcccagtcctggccgtacacaaagcagtacttgcagtagaggtcatcatactctggaaactgaaaaaagcacagacagattctgtcgactggtattcatgctgaggccaatgcatttgctaggcaggtgcagccaaggggaattctgaacgtgagacacctgggagtgggtctaagagacggctggagatgtgttcagaggagaggctgaggaccaagaagcgggagtccacgggagactcccaggtgccacggcccctggcttttgctcaggctctgccttgtctgatttgtccttcctacttcatccggaaaactcctgctcacccttcaaaacttacccttcagggagcctgctctaactctcaagctggtttaaggtctcctcttggctcccttagccccgtgcttccctccataaaagcaatgattgcctgtgtctaagtctgtcagttcctctagaccatgagtagagaagagatttaatgcctttctgtgtccccactgcctggcacagggctgggcacagataaggtctaaggcaggggtcctcaaccagtccgtggcctgttaggaacgggtccacacagcaagaggtgaggagcaggcgagcaagcaaagcttcaactgtatttacagctgctccccattgctcgcatgaccacgggagctccacctccttgtcagatcagtggcggcattagattctcataggagcacgaaccctactgtgaactgcacatgtgggggatctaggttgcatgttccttatgagaatctaacgcatgatgatctgtcactgtctcccatcacacccagatgggaccatctagttgcaggaaagcaaactcagggctcccactgattctacattatggtgagttgtataattatttcattattatttacaaggtaataatagaaataaagtgcacaataaatgtaatgtccccaaatcatcccaaaaccatccctcgccacctggttttccacaaaaccagtccctggtgccaaaaaggttgaggaccactggtgtaagggaatggtgctgaagtgaaaggtctgagaacccaggaagccatcatatgcaaggctggagctgaggccctgaaaagagggaggtgctgagagcagagcagggaggaacagtgtgactgtcagtgtgtgtgtggcgggggggtcgctgatgctgagagcacagacacatgtgactcagcccagccgagagcccctaataggaaaggacaggagagtggggaaagacggtcttaggcactaggctaaggcagaggcggacagggtgggagcatggagtagtatccctgatgaaataggaaggcaggagacacctacaaagcatcaggccctgtcagagccttacccaaaccgtctcagtcaatcctcacaataatattataaaataataataaacaccacctccaacagcctggaaggacagtgtagtgaagctttgaggtcagataggcgtgggttcaattcccagacaggccagttcctttggtatatttccccagctgtaaaatgggggtgttagtagtgcctatctggtaaggctgtaagggtggaccagtgcggagcaccgactttgggacatattgaggacttggtgagcgttggtttatatttacaataaatgattcctctaaagtgtagggggatggggaatagcgtccctcgggcctagcaggcacaccttccttgggtcaattccaggccaccaccattgttggatggttggattcgaacccgagttcaaggatctggggattcagaacgcgggacagtaactccacacgggacacagcgcaaatgctggaaactcggccaagcctcggctcctcgcgttaaccccaggaggctcctgccagtgatccaagcaagtgggcatgacccgtgcgagggcccacaggcttgcccgagtgtgacctcggtactagctcaacatctcgaggtctgcttctattcctgcacatcgggactcaggatccgggcaacctcgcgccaagctctccaatgctggctcccctcccccgcctaaccgagaggctcagaggaatgacgtggctctccgggggccacagggcagcccggggggttgcgggaagggccccgggggacgctggggggcgggccccggcggggtccacggccgctcacctgggcgctctccacctgcccgttgaccatgagtagaaagacgctaggactcgcggtcgccatggcaggtctgggggtgccggggggacccacctaggccgcgcgcggttgctaagagacgccggcgttgccctagaaacagacggcgtagcgcgcaggacacgtttcttggcagcgacaccttcgcgaaggccacgcgagtgcgcgtgtggcatgcgcaggcgcagtgaacgggcgccgttataagggggcggggcacaaggggcggggatccacgccgaggctccacccctccttagggcaggtatgaccgagagctggggcgggagcgttgacctgtcgggtaaagccagccctaccgctcgactcagttgcacgcgcagggagtgtgtgttcactctgactcggcccggctccccgtccccgccgaagcgcagaggcgaatgagagctgagtcctggggagcagcgctccgactcacgccctcagcaagccgagtgtttaaaatacattcagccactagatgtcgctgtggccccaccgcgaggacgcggagggaggcgctgcagagcacgggcgacgtgaccacagctgtcggggctaactctggaatgccgggtgctcggaggagcctccccagctggggccaagcagcgtccaagcaggtgaaaaggatgcgcccctgtggcttggagacgcttgccctcgaaaaagtttattaaacaaacttgggagggacctcaagaatccttacatccaagccatcgctctttagttcgaagctggggaaactgaggcccgcagcgggcggcgcctggcaccccaatcagccagcgctcaggggagttgctagccaaaatccacgaatctgtcaagatacagtcttgtatcttagtggcctgtcacagagtaagcacttggtaactactaacttgttgataaatgaataattgaagacatctccattttacagaggaggaaacagattcagatggcaaaggcaggtaagtagctaagtcaggattcaaacccaggactccagaggctaacaaccctcactgcctctgtcttgtcctgggccagccccaacagcatctgttggcagaggtgtcaaaggagacgttggagacattatcttggatccaggaaatgaagggattcacaggtgtgtagactcccgggaggccaggctccgagcagggaccccaggtcatcacattctgcagcttctagcttgggagcagactaggggagtcccatcaaccatctgcacgagggagggaaggagcagtctcagcccagcctgcacccactgaaccaccccctgcctagtgagcaaagatatttgatcaggggagggaggcagcgggtaaccagttcacacatctgacaagagcagctgggggaggggatgggtgggctggtggcccaagtgctgcacccagagcccaagacagggcccatttcccctcctggagagggggtcatactcccttcttcccccgctctgtccatctctttccagttaaagtgctttctcccacacattctatcagtctcacccaattatttcctccctttggcctttgaggctcggtgttgcacacaagttagttttcagcaaaatgcttgtagttatcgaataactgggggctcccagtagtttaagacctggctataccaaaggtggccccacattcaaataggacataatgggggagtctccccaaggggtgggaagttctagggtggccttcaggggtacaaataagcccgacccctgggtgttggggaatggaagactccaggataggatgggagggtgaccaggcctaactttaacaagtctagtggcattagaagcgactttaggagaggggtctcaggggcttgcataggggcttgcatagggcctgctggaatccttaccaccagttcaagggcccagtggagagcctggtgtactagaagtccttgggcaggctgtccttcaggtcaggacagtcaggttggaggagaaggtagtttctgcagatgctgacacacagcgatctcagcaggacactctgcagctcttggggtgggatgtagggatctgcaatggggtggggcagaccctcagcccagctgacatccagccgatctgcaccagtccagccatgctggttgttaacatatattgctgagcttccctgcctgtgcctgtgccaagtctctccacccccagatgccttcctgggctcctagacattcctcgctcccacctcactcttagtacagctctgtcctctggtacactcccacgcagtcccctcagggaagcttccagcacattgggcaggcggggctgtc

SEQ ID NO: 1932 - DNA, 6000 bp, Homo sapiens
gtctgaggagtttggctgagccggactccctgtgccacttccagaggtggacaggtgattcaggtctggccaatcagcatacccctcccctcccccacgctgagcctgtccaatgggaggctaccctggaacccatgctgggactgacaaaaagggatgcccactgccgtgatggatgtccctgaaatgagggtaaggttctggggctcaggaaggtctccaggcttggattagagataataattaccatatcacagatgactaaaagagtctcaaagcacatcagcaccccccaacctgttctgcttcttggttcctcattttggtgacatctccattgctagaaatggacactatcacatgtcctgcatttacccctttatatacctcttttttttactttttttttttttgagacagagtctcactgtgtcacccaggctggagtgcaatggcaccatcttggctcactgcaacctccacctcccgagttcaagcaattctcctgcctcagcctcccgagcagctgggattataggcgcctgccaacatgcccagctaatttttgtattttgtatttttagcagagacagggtttcaccatgttagtcaggctggtctcaaacccctgacctcaggtgatccacctgccgcggactcccaaagtgccaggattgagacaccgcgcccagcctaatttttgtatttttagtagagacagggtttcatcatgttggccaggctggtctcaaactcttgacctcaggtgatcccccagcctcagcctcctagagtgctgggattacaggcgtgagtcaccgcacccaatcccacgtctgtcttttaatcaaggcatgctctgccttcaagtacaccctccatgatgtctgccagaaatacctttcaggaaggcagctctgaagggcatttgtctactcaaaaatcctaggtagacatttacattagttcaggggcttttggtaacctaaaccagaaatcttgaactcaaatgcccactgtggccatgcaggaaacgtgagccaagtgagtggagtatctgtatataacacatgagattgtctttgttcccacaaaaagatatacttggtctttcttttcctgaaacacatgtcatctcagcctcttttgttttcctgcttttaataagatgtagaaaacagttgtgaaagcacaatgataagtagcatctgaccctcggcctgtgctggggaggctgtcagggagtggcagggactgtggtgaattagagagcacatgttctttcaatggcggggtcacagttcgatggctacgtagaaatgctgatctgatttcccaaaagaaagcaaaaatcaggattcttatggcaaatctccccatttttgacaggcaaataattccaagcttttaaaaagcaccgtgtgagtcattctctcataccactggtgggtgtctaaatcagtataatctctaaggatagaaatttgacattagctactaaaattgtaagaacaatactctttaacttgacactcccacttctggtattcttcctgcatatacacttgctgtgtgcaaaatgatgtgttcaagaaaatttattgcagcattgtttgcaatagtgaaaaaactgaactcatctaaatgtctatctagggggtcttggttaaataggttatattcgtaaaggaatatcatgcagctgtaaaaatgagtgctttttttttagatatgacaatagcacaagtgacaaaagacaaaacagataactggacttcatcaaaattaaaaacttttgtggaacagaggatgttatcaagaaagtgaaaagacgatctgagaaatggaagtaaatatctgtaaatcatgggaagtaaatatctgtaaatcatctaataaggtaatatctgtatctgtaaatcatctgataagggacttttgtttagaatatataaagaactctgacagctcaacaataaaaaggcaaataatccaattaaaaatggacagagggctgatgcggtggctcatgcctgtaatcccagcactttgggaggctgacgtaggccgatcacttgagctcaggagttcaagactagcctggccaacacagtgagaccctgtctctgctaaaaatacaaaaattagctgagtgcaatgatgtgtgcctgtagtcctagctacttgagaggctgaggcaggagaatcacttgagcttgggaggcggaggctgcagtgagctgagatcctaccaccgcactctagcctgggctggagtgaaaccctgtctcaaaaagaaaaaaaaaaaaggtcaaaggatttgaatagatattgaacagacatttccccaaaggagacaaatggccaataaaccgtgaaaacatccttagtcattagggaaatgcaaatcaaaactacaatgacgtatcacttcacacccactaggatggctataattaaaaaataataataataataaggctgggtactgtggctcatgcctgtaatcccagcactttgggaggctgaggcaggtggatcacttgaggtcaggagttcgaaaccagcctgaccatctctaataaaaatataaaaattagctggacatggtggtggggacctgtaatcccaactactcgggaagctgagggagaagaattgcttgaacctggggtgcagatgttgcagtgagccgagatcgtgccagtgcactccagcctgggcgatagagtgagactcagtatcagaaaaagaaaagaggtgttggtgaggatgtggagaaatcggaactcttaaatattgctggtgaatttgtaaaatggtgcaactgctggagaaaacagcttggcactttctcaagaagttaatagtttaccatgtgacccagcaatcccactcccaagagaaaggaaaacatgtccacaaaaaaacttgtaaacaaatgttctcagaagcattatcataatagccaaaaagttgaaacaacccaaatgttcataaactgatggataaacaaaatatggtatatctaaacaatgcaatatatttggccataaaaattagtgctaatatgacaacatgaactttatgctaagtgaaataagccaaacacaaaagactacacagtgtgtgattccattagtatagagcatccacaatacgcaagtccatagagacagaaagtagttcagtggttgcaagggctctggtgaaagaggaatgaggagtgaccgttaatgggtataaaccaaaaataaaattagaaggccctttgcaaccatctgaatggactccctccttggccagcacaccctaaaatttaacctgaaagactggttcaggccacgatgggaggtgagagttggacatgccttattatacccctccaacattaacatcaacactgaccttaagtctgataagaaatatttgtctattctctctatagcctgctactgggaggcttcaactgcataataaaacctaggtctcctggccaggtgcagtggctcacgcctgtaatcccagcactttgggaggccgggagcaggggggcgtggatgacttgaggtcaggagttcgagaccagccaggccaacagggtgaaaccccatctctactaaaatacaaaaaaaaaaaaaaaaaaaaaaaaaaagccgggcttgatggctcatgcctgtgatcccagctattcgggaggctgaggcaggagaccaggagggggaggttgcagtgagccgagatcgcaccactgcactccagcctgggcaacagagtgagactcactcttcaaataaaataaaataaaataaaataaaataaaataaaataaaataaaataaacaaccaaaaaaccctaggtctccacaaccccttatcataacccagatattcctttctatagataataactcttgtaaccaactgccaatcaggatatgtttaaatctacctgtgacttggaagcccctcccctttgagttgtcccgcccttccagaatagacattgaacagacatttccccaaaggagacaaatggccaataagcacatcaaatcaatgtcaatcttgcatgtattgacttatgtattatgtcttcctgaaatgtataaaggctgactatgccccgaccatcttgggcacatgttgtaggacctcctgaggctgtcaccaccatgtccttaacattggcaaaataaactttctaaattgacttgagacttgtctcagatacttggttcacataggtttcttttaggggcgatgaaaatgttccataaaccactctacctaaaattaggtagtgatgatggctgctcaactgtgaatataccaaaaaacactgaattgtacactataaaaggatgagttttatggtatgttattaaaagttgtttaaaagtgagggacccctccagttattgatatggaatgatcttcaggaaaagagcataatatgctacatttttgtacaccaaaggggaggtaggtacgaatatgcatacatattgcttttttctagaagccgcctaggagtgaaaccaaaattcttcacttcttttcggccctacctcgagctccctttagaaaacctttccttccagctcacagtatccaccatgtccaccttcgcctcccggcactgagccttagaggggcggtgctccataaacatttgctacatgaatgaacgaataaactatcggattttggggtgggtcgggacagctcggttccagcgagggctccgcccacccgcgggctccgcagaggagcagaggttgggcggccgcctcggttaactccgctgcagcccaaagcacgggaatcgcgggacagacaaacgagcggagggaagatacctagaagccaggaaaccgcgagctgcagtccaacttggccggaagctgcggagaggctcagccaccggaagtcagtggagggttcggccggacgctctagaatcccggaggaccgggatctctgtggttggccgtgacgggcaccctctaccggggatgacacattcccagagctcctgggaccaagcaaatggcggacacaattccctgggcggaaggggacttcgggagccagtagccaaggtaacagtcccagacctgggcatctcaggccgggcagttccccgagctcacgggactagctgtgattggccggatgaggttgagagcttcatggggacgcgcgcgctacgtgcaggggcgttgccttccattcacttggcgcccgactgccagtgcgcatgcgtttgaaggcggtgcagggcggggagcacacccctgcgaagtgccgggcaccctttgggcggctcccgccggcgagctggacagcggcgcgcgccaggcgtggctttctcggccggtgggctaggattggacgcagtaggtagaaggggcaggaccctccgcagcagtagctcagcgattggccaggagctggagggagcgtggccttgggaggcggggcggagggggacggacagggcagctcaagacgctgaggtggtggctgcggcctttgaacaagtaagtgagccaccctcggagacccccgcgctggggacgggaggccggcgagcctcgggacctctgaaagccttgaggaggcgcgggggtgagtgcggccctgaggaaacccaggtgccccgcccctccctttcttcctggcccgcgcctcgcctacccctcccccgaccctggcgggcccccggctctgggcccggacccctggggtagctagtctgccacgaaccagccgcgcgcttctgcccttgtcggtttaggaaactgggaagttccctggtcctgctccccagcccgcagaggggacactgaggcccacggtaggtggtcctctcctcacccgagtctccacacagacaccatggccgagcctctgaaggaggaagacggcgaggacggctctgcggagccccccgggcccgtgaaggccgaacccgcccacaccgctgcctctgta

SEQ ID NO: 1933 - DNA, 6000 bp, Homo sapiens
aggctgagagagaggctgaatctgcctggctgcaggggaaggaaagggaggggtgctattagcctaggctggaccctcacccatcccacaggtgcatgtctcctgcaccaggaacctctccccacagtcccagtctaggagctcagtccagccaccttacccatcctgtggcccatcagccacgcccatgtcgaaagactggtttaagaattcctccaggtcaaagccaacaccgtagccagccccactgccctttggtgtgcctgagaacacagggggcagggggtcctccacctgcagggaatgacaggttacaatgcagacagactgaggtctgtaggccaccctgtcccaatgctgctgactactccgcctggatatctgggagtgctaacaccagtctcggcagtcagtgagtgctggctggccccatctctgggctaggcactttgcaggccatatttaacttgtctcctaacaacctcttcattgccattatgctccttctgtgagcaagaggacacgttcagagataaagccccatctgctgctcagtttttgtggaacactgaccgcttcctgaacccattttcctttggcccagacccaggtgtccccatggcctgggcctccctctcacctgtgacttagatagctgctgggtcacaaggttgacatcaggtgactctgacatggaagactgaggggctcccccggcgtctgggggcggcaggccaggtgggaagtaaggcaaaactcctggggtgctggagccaggcagcccagggggtggcacaagtgactgggcagccaggaggctggtggaggtggcaatctggggtggcgcggggacagggatgggcccaggagggccagtggggtggggtgcagggccagggggtgggcaggcaggctggggtacagggccagaggtagagcccgcagattgtggttgcgggccagtgggctgggctacagggccaggaggaggactggtaggttggactggggttggggttggcgttggcgctggggcaggggccggcacagaggtgagggctggggctgcgggccgggccattcgagtccagcgttccaacaggcttctgtcattgtcactgagcactagtccagccaaggggtcagtggaggggcccccagaggccccagccccccgttcctttcgctcccgctcctgccgccgtttctcccgctccttggctcgttcttgccgcctccgccgcttctcctcccgctcccgctggcgctcctgggctgtcaccggcttccgaggctcaggagcctccaggggtgcgctggggccatctgcggggaagttgggcaggggagaaggtaaaagcctgaagccttgtccaagtccaagtctcccctctgcccacccgacctgcccacaaggcacctctgagccggctcctcaaagacttgagcagggcagctttaagggcagccttagtattgtctgagatggcaccatctttctttggtggggcaggctcactgactggtggaggtggctgcagggtcagatcaatggtgtcaggtgcagggccggggcatggtggcggggctggtggtggagactccatggcacagtccccactgggagcccagggactgggcatttcaacatctggacagccaggctcactagccacaggctgtagagaaggctggaagcggatctgttggcggatgccctcacgccttgcatggaagtcctcaatttcagccacaatggcctccttaatgcgctcccgagtgagggcttcgcggtcaaaggcaaagtcaaagggcggggcacagtcaggctcatcatcaggatcatggtacttggccaggaaagggtggcgaagggcagcagctgctgagatgcgagcgctgggctcaaaacgcagcatgcgacccagcagtgatagggcctggcggtcggcacctgggtacactgtctcccagggcacaggctggcgtggtggcaagctctggatataggcccgcaccctctcagcccccacagcctgaatcacggctggtgatggggtacccagcaccatcatgatgagctgtagctggtgtacatagtttttgcctgggaagagctggcgccgggccagcatctcaccaaagatgcagcccacagaccagaggtcaatagcctgtgtatactcatgcaaagagagcatgagctcgggcgcacggtaccagcgcgtggccacatactcagtcatgaagtactgatgttcagcgggcgaggtgcacaggccacgagccataccaaagtcaccaatcttgagctcacagttctcattcaccaataggttggagggcttcaggtcacggtggatgacctgagccgagtgcatgtacttcaggccccgcagcagttggtacaggaagtagcgcacgtgttccagtgtgaggggctgtgaggagtggatgatctggtgcaggtcgctttccatcaggtccaggaccacgtagctggaaggggaaggaaggagagaagcatgggttggcctgatcacactccagggacaagccccatcctcaccacacccttccgattccagacaggtaacagccttaccctgggaccccataggggctgacggcatggtatggaagaagagcatcacgttttagattctctacgacttttccatgaacttggttaaatcacttttgtctccagacctagtttccccatcagataaaagatggggttggactacaccagggctggccaataggtttccttttggggctatctccattgtttggtagtggcagcttgaagaactatgatgaaaattgaccaggcttgtccactgtctgtaggaaagtgttctgtgattgattagtgaagtctgctatgggaataggagggtgtggtcatagtaggaatgtcctacatttgacatcctatatactaagattctataaaactgtaaaatcatctgtacacttcttgaggaataacagttgtccctggcaaaactctaaagaactggtcctagaactgcgggaattttcccagcctgcttcagattagattcagctgcctttccagaacttcggcaacatggttgcagccttcagaaaagtcccaagtctggctccctctcccatcccgcttcttacacagatttgaattcgccatagggcacggtgggcctcaggatgtccttgatggcgatgatgttgtcgtgtttaaagtgcttgaggatcttcagctccctgagggtccgcttggcattggtcaccacatcgaaagcattagggatcttcttgatggccacctgctggcctgaggagcagggaaaagggacataccagaggataccttggagaaactgcagagtcgactcagcccctatcaacacctcccttctaggatgcaaatgacaacagctaccaagtattgggtacctactatgtgccaagccctgtgctaagcatgttacctacattattaaatgttaccttcacaactcccctgcggggcaggtcccaataggtcaacgttaaagagaaggaaatatggcttagtaacttgttggaggttgcacggatgcccagtggtgtagctcagcctcttatgcctacaccctctccatctcagacctcacccatcccaccaccagttccttatgccagtgtctggctccagaacacatttctctcttagacacgaaggactggctctccattctggtctaactgggactatcattttcctaaggaggaagtaggcaggcaggatggcaaaaccaccaggccggagtttcagagaaccgagcctccccggagcctggcaggcagaaggccctggtcagtgtgtgttgactggagccagaactcgcaccccgctttccttcccggctgtctgggacaggccggtttcccactccctgcgacgctgccacatctgggaggcgacggctcaggaagctcaccggtgaggcggcggcgggcggaggacaccactccataggccccgttgcctatggtctcgatgatctcgtactcgtcgcccacgtcaaaggtcacatcgaaggagcgggctttaagcagggccaggttcttggccgctacagaggcagcggtgtgggcgggttcggccttcacgggcccggggggctccgcagagccgtcctcgccgtcttcctccttcagaggctcggccatggtgtctgtgtggagactcgggtgaggagaggaccacctaccgtgggcctcagtgtcccctctgcgggctggggagcaggaccagggaacttcccagtttcctaaaccgacaagggcagaagcgcgcggctggttcgtggcagactagctaccccaggggtccgggcccagagccgggggcccgccagggtcgggggaggggtaggcgaggcgcgggccaggaagaaagggaggggcggggcacctgggtttcctcagggccgcactcacccccgcgcctcctcaaggctttcagaggtcccgaggctcgccggcctcccgtccccagcgcgggggtctccgagggtggctcacttacttgttcaaaggccgcagccaccacctcagcgtcttgagctgccctgtccgtccccctccgccccgcctcccaaggccacgctccctccagctcctggccaatcgctgagctactgctgcggagggtcctgccccttctacctactgcgtccaatcctagcccaccggccgagaaagccacgcctggcgcgcgccgctgtccagctcgccggcgggagccgcccaaagggtgcccggcacttcgcaggggtgtgctccccgccctgcaccgccttcaaacgcatgcgcactggcagtcgggcgccaagtgaatggaaggcaacgcccctgcacgtagcgcgcgcgtccccatgaagctctcaacctcatccggccaatcacagctagtcccgtgagctcggggaactgcccggcctgagatgcccaggtctgggactgttaccttggctactggctcccgaagtccccttccgcccagggaattgtgtccgccatttgcttggtcccaggagctctgggaatgtgtcatccccggtagagggtgcccgtcacggccaaccacagagatcccggtcctccgggattctagagcgtccggccgaaccctccactgacttccggtggctgagcctctccgcagcttccggccaagttggactgcagctcgcggtttcctggcttctaggtatcttccctccgctcgtttgtctgtcccgcgattcccgtgctttgggctgcagcggagttaaccgaggcggccgcccaacctctgctcctctgcggagcccgcgggtgggcggagccctcgctggaaccgagctgtcccgacccaccccaaaatccgatagtttattcgttcattcatgtagcaaatgtttatggagcaccgcccctctaaggctcagtgccgggaggcgaaggtggacatggtggatactgtgagctggaaggaaaggttttctaaagggagctcgaggtagggccgaaaagaagtgaagaattttggtttcactcctaggcggcttctagaaaaaagcaatatgtatgcatattcgtacctacctcccctttggtgtacaaaaatgtagcatattatgctcttttcctgaagatcattccatatcaataactggaggggtccctcacttttaaacaacttttaataacataccataaaactcatccttttatagtgtacaattcagtgttttttggtatattcacagttgagcagccatcatcactacctaattttaggtagagtggtttatggaacattttcatcgcccctaaaagaaacctatgtgaaccaagtatctgagacaagtctcaagtcaatttagaaagtttattttgccaatgttaaggacatggtggtgacagcctcaggaggtcctacaacatgtgcccaagatggtcggggcatagtcagccttt

SEQ ID NO: 1934 - DNA, 6000 bp, Homo sapiens
cctcaggtgatccacctgccgcggactcccaaagtgccaggattgagacaccgcgcccagcctaatttttgtatttttagtagagacagggtttcatcatgttggccaggctggtctcaaactcttgacctcaggtgatcccccagcctcagcctcctagagtgctgggattacaggcgtgagtcaccgcacccaatcccacgtctgtcttttaatcaaggcatgctctgccttcaagtacaccctccatgatgtctgccagaaatacctttcaggaaggcagctctgaagggcatttgtctactcaaaaatcctaggtagacatttacattagttcaggggcttttggtaacctaaaccagaaatcttgaactcaaatgcccactgtggccatgcaggaaacgtgagccaagtgagtggagtatctgtatataacacatgagattgtctttgttcccacaaaaagatatacttggtctttcttttcctgaaacacatgtcatctcagcctcttttgttttcctgcttttaataagatgtagaaaacagttgtgaaagcacaatgataagtagcatctgaccctcggcctgtgctggggaggctgtcagggagtggcagggactgtggtgaattagagagcacatgttctttcaatggcggggtcacagttcgatggctacgtagaaatgctgatctgatttcccaaaagaaagcaaaaatcaggattcttatggcaaatctccccatttttgacaggcaaataattccaagcttttaaaaagcaccgtgtgagtcattctctcataccactggtgggtgtctaaatcagtataatctctaaggatagaaatttgacattagctactaaaattgtaagaacaatactctttaacttgacactcccacttctggtattcttcctgcatatacacttgctgtgtgcaaaatgatgtgttcaagaaaatttattgcagcattgtttgcaatagtgaaaaaactgaactcatctaaatgtctatctagggggtcttggttaaataggttatattcgtaaaggaatatcatgcagctgtaaaaatgagtgctttttttttagatatgacaatagcacaagtgacaaaagacaaaacagataactggacttcatcaaaattaaaaacttttgtggaacagaggatgttatcaagaaagtgaaaagacgatctgagaaatggaagtaaatatctgtaaatcatgggaagtaaatatctgtaaatcatctaataaggtaatatctgtatctgtaaatcatctgataagggacttttgtttagaatatataaagaactctgacagctcaacaataaaaaggcaaataatccaattaaaaatggacagagggctgatgcggtggctcatgcctgtaatcccagcactttgggaggctgacgtaggccgatcacttgagctcaggagttcaagactagcctggccaacacagtgagaccctgtctctgctaaaaatacaaaaattagctgagtgcaatgatgtgtgcctgtagtcctagctacttgagaggctgaggcaggagaatcacttgagcttgggaggcggaggctgcagtgagctgagatcctaccaccgcactctagcctgggctggagtgaaaccctgtctcaaaaagaaaaaaaaaaaaggtcaaaggatttgaatagatattgaacagacatttccccaaaggagacaaatggccaataaaccgtgaaaacatccttagtcattagggaaatgcaaatcaaaactacaatgacgtatcacttcacacccactaggatggctataattaaaaaataataataataataaggctgggtactgtggctcatgcctgtaatcccagcactttgggaggctgaggcaggtggatcacttgaggtcaggagttcgaaaccagcctgaccatctctaataaaaatataaaaattagctggacatggtggtggggacctgtaatcccaactactcgggaagctgagggagaagaattgcttgaacctggggtgcagatgttgcagtgagccgagatcgtgccagtgcactccagcctgggcgatagagtgagactcagtatcagaaaaagaaaagaggtgttggtgaggatgtggagaaatcggaactcttaaatattgctggtgaatttgtaaaatggtgcaactgctggagaaaacagcttggcactttctcaagaagttaatagtttaccatgtgacccagcaatcccactcccaagagaaaggaaaacatgtccacaaaaaaacttgtaaacaaatgttctcagaagcattatcataatagccaaaaagttgaaacaacccaaatgttcataaactgatggataaacaaaatatggtatatctaaacaatgcaatatatttggccataaaaattagtgctaatatgacaacatgaactttatgctaagtgaaataagccaaacacaaaagactacacagtgtgtgattccattagtatagagcatccacaatacgcaagtccatagagacagaaagtagttcagtggttgcaagggctctggtgaaagaggaatgaggagtgaccgttaatgggtataaaccaaaaataaaattagaaggccctttgcaaccatctgaatggactccctccttggccagcacaccctaaaatttaacctgaaagactggttcaggccacgatgggaggtgagagttggacatgccttattatacccctccaacattaacatcaacactgaccttaagtctgataagaaatatttgtctattctctctatagcctgctactgggaggcttcaactgcataataaaacctaggtctcctggccaggtgcagtggctcacgcctgtaatcccagcactttgggaggccgggagcaggggggcgtggatgacttgaggtcaggagttcgagaccagccaggccaacagggtgaaaccccatctctactaaaatacaaaaaaaaaaaaaaaaaaaaaaaaaaagccgggcttgatggctcatgcctgtgatcccagctattcgggaggctgaggcaggagaccaggagggggaggttgcagtgagccgagatcgcaccactgcactccagcctgggcaacagagtgagactcactcttcaaataaaataaaataaaataaaataaaataaaataaaataaaataaaataaacaaccaaaaaaccctaggtctccacaaccccttatcataacccagatattcctttctatagataataactcttgtaaccaactgccaatcaggatatgtttaaatctacctgtgacttggaagcccctcccctttgagttgtcccgcccttccagaatagacattgaacagacatttccccaaaggagacaaatggccaataagcacatcaaatcaatgtcaatcttgcatgtattgacttatgtattatgtcttcctgaaatgtataaaggctgactatgccccgaccatcttgggcacatgttgtaggacctcctgaggctgtcaccaccatgtccttaacattggcaaaataaactttctaaattgacttgagacttgtctcagatacttggttcacataggtttcttttaggggcgatgaaaatgttccataaaccactctacctaaaattaggtagtgatgatggctgctcaactgtgaatataccaaaaaacactgaattgtacactataaaaggatgagttttatggtatgttattaaaagttgtttaaaagtgagggacccctccagttattgatatggaatgatcttcaggaaaagagcataatatgctacatttttgtacaccaaaggggaggtaggtacgaatatgcatacatattgcttttttctagaagccgcctaggagtgaaaccaaaattcttcacttcttttcggccctacctcgagctccctttagaaaacctttccttccagctcacagtatccaccatgtccaccttcgcctcccggcactgagccttagaggggcggtgctccataaacatttgctacatgaatgaacgaataaactatcggattttggggtgggtcgggacagctcggttccagcgagggctccgcccacccgcgggctccgcagaggagcagaggttgggcggccgcctcggttaactccgctgcagcccaaagcacgggaatcgcgggacagacaaacgagcggagggaagatacctagaagccaggaaaccgcgagctgcagtccaacttggccggaagctgcggagaggctcagccaccggaagtcagtggagggttcggccggacgctctagaatcccggaggaccgggatctctgtggttggccgtgacgggcaccctctaccggggatgacacattcccagagctcctgggaccaagcaaatggcggacacaattccctgggcggaaggggacttcgggagccagtagccaaggtaacagtcccagacctgggcatctcaggccgggcagttccccgagctcacgggactagctgtgattggccggatgaggttgagagcttcatggggacgcgcgcgctacgtgcaggggcgttgccttccattcacttggcgcccgactgccagtgcgcatgcgtttgaaggcggtgcagggcggggagcacacccctgcgaagtgccgggcaccctttgggcggctcccgccggcgagctggacagcggcgcgcgccaggcgtggctttctcggccggtgggctaggattggacgcagtaggtagaaggggcaggaccctccgcagcagtagctcagcgattggccaggagctggagggagcgtggccttgggaggcggggcggagggggacggacagggcagctcaagacgctgaggtggtggctgcggcctttgaacaagtaagtgagccaccctcggagacccccgcgctggggacgggaggccggcgagcctcgggacctctgaaagccttgaggaggcgcgggggtgagtgcggccctgaggaaacccaggtgccccgcccctccctttcttcctggcccgcgcctcgcctacccctcccccgaccctggcgggcccccggctctgggcccggacccctggggtagctagtctgccacgaaccagccgcgcgcttctgcccttgtcggtttaggaaactgggaagttccctggtcctgctccccagcccgcagaggggacactgaggcccacggtaggtggtcctctcctcacccgagtctccacacagacaccatggccgagcctctgaaggaggaagacggcgaggacggctctgcggagccccccgggcccgtgaaggccgaacccgcccacaccgctgcctctgtagcggccaagaacctggccctgcttaaagcccgctccttcgatgtgacctttgacgtgggcgacgagtacgagatcatcgagaccataggcaacggggcctatggagtggtgtcctccgcccgccgccgcctcaccggtgagcttcctgagccgtcgcctcccagatgtggcagcgtcgcagggagtgggaaaccggcctgtcccagacagccgggaaggaaagcggggtgcgagttctggctccagtcaacacacactgaccagggccttctgcctgccaggctccggggaggctcggttctctgaaactccggcctggtggttttgccatcctgcctgcctacttcctccttaggaaaatgatagtcccagttagaccagaatggagagccagtccttcgtgtctaagagagaaatgtgttctggagccagacactggcataaggaactggtggtgggatgggtgaggtctgagatggagagggtgtaggcataagaggctgagctacaccactgggcatccgtgcaacctccaacaagttactaagccatatttccttctctttaacgttgacctattgggacctgccccgcaggggagttgtgaaggtaacatttaataatgtaggtaa

SEQ ID NO: 1935 - DNA, 6000 bp, Homo sapiens
atgataatctgaacaacaacaaaaaaaacgagtacttaagctttaactacaacataaatacacacacaaagacattttagaaataataaatattattttaaataaaaaatgtcagtaaaatgaattgaaagagtaaattattagagttgaaactagaattactggcctggacaagtggaagaaatatcttaaagcaaagataaaaatataaagaaatgtaaatctgaagaaaaagctaagagaattagaagataaacccaggatacctaacagttaaataaaagaaattccagaagagaacatatatacatgaggcgctgattaacaaatattagaagaaaactaccctaatgaaagacctgagtttgcacattaaaatggctcaccagtttctaagcaggactgactagaaaagatacatgctagacacataattataaaatttctgtgctacaatgaagaaaaaactattctggaagctttagatagaaagtccaattatttattaaaaaaataatcaaacagaccgggcgcagtggctcacgcctgtaatcccagcactttgggaggctgaggcgggcggatcacgaggtcaggagatcgagaccatcctggctaacacgatgaaaccccgtctctactaaaaatacaaaaaattagctggctgtggtggcgggcacctgtagtcccagctatttgggaggctgaggcaggagaatggcgtgaacccgggaggtggagcttgcagtgagccaagatcgtgacactgcactccagcctgggcaacagagcgagactccgtctcaaaaaataataataataataatcaaacatatgaaatttctcatttatattagtggatgaaacaaaaccaaggttaggttaaaaagggcttctgatattctggtactgtcctacttactgacctgggtattagttacatggatgtgtactttatagtaatttgttatgctgttatgttttattgtaatttcatgtatcttactttaattttgaaattattaaaaggtatgatggctcacacctgtagtcccagctattcaggaggctgaggtgggaggactgctagagctcaggagttcaaggttgcaataagccaagatcacaccactgcactctagcctgggtaacagagcaagaccctgtctcaaaaaaaaaaataaaaaagacagggcatggtggcttacacctgtaatcccagcactttgggaggctgaggcggtcagatcacaaggtcaggagttcgagtgcagctgggccaacatggtgaaaccccatctctactcaaaatacaaaaattagctgggcatggtggcgggtgcctgtagtcccagctactcgggaggctgaggcaggagaatcgcttgaatctgggaagcagaggttgcagtgagccaagatcgcggcactgcactccaatctgggcgatacaacaagactccttctcaaaaaaaaaaaaaaaaagacaatataaagatgagtgtgtgtgtgtgtgtgtgcatatatacaaaatagacacacataaagagatgtatgaaagaactgtcaaatatgacatttatctaagataccagaaatatttcttccttatacatttatatattcaaatgcttcaaacaattaatatctattaataatcaaaaatttacaaaacaggccaggtgcagtggcccacgcctgtaatcccagcactttgggaggccaaggagggtggatcacttgaggtcaagagtttgagaccagcctggccaatgtggtgaaaccccgcctctactaaaaatacaaaaaattagccaggcatggtggcacgcgcctgtaatcccagctactggggaggctgaagcaggagaattgcttgaacccgggaagcagaggttgcagtgagccgagatcacaccactgcactctagcctggatgaaggagtgagatcctgtctcaaaaaaaaaaaattaggccgggcgcggtggctcacgcccgtaatcccagcactttgggaggctgaggcaggcagatcacgaggtcaggagttcaagaccagcctgacccccaacatggtgaaaccctgtctctactaaaaatacaaaaattacctgggcgtagtgatacatgcctgtaatcccagctactcaggaggctgaggcaagagaattgcatgaacctgggaggcggaggttgcagtgaccctagatggcaccactgcactccagcctgggtgacagagcaagactccgtctcaaaaaaaaaatctgccaggcgtggtggcacacaccgtaatcccagctacttgggagggtgaggcaggaaaattgcttgaatccgggaggcagaggttgcagtgagccaagattgtgccactgcactccagcctgggcaacagagtgagactctcaaaaaaaaaaaaatttttacaaaacaaaaataattgctattttattggggaaaaacccttttcattgtgtagctgactgcatctggaggtagtaagcccagcagttaagagggaaggagaattcgatttcaatctagtattctgctattgtgattaaataattatggttaaattctataagttcaggctgggcgccatagctcacacctgtaatcccagcactttgggaggctgaggtgggcggatcacctgaggtcaggaattcgagacaagcctggccaatatggcgaaaccccgtctctattaaaaatacaaaaattagccaggcatggtggcacgtgcctataatcccagctactagggaggctgaggcaggaggatcgcttgaacccaggaggcagaggttgcaacgagccaagatcgtgccattgcactccagcctagggaacaagagcaaaactgcatctcaaaattaattaattaattaataatcataataaattctataagctctatagagctaatttccacctagtacttatttatttttcatcttaagctgtactgtctaatatgatagccactagccacatgtagctattgaaattaaaattaaaaattcaggccgggcacagtggctcacgcctataatcccagcactttggaaggcggaggcgggcagatcacctgaggtcaggagttcgagaccagcctgaccaacatggagaaacccgtctttactgaaaatacaaaaattagctgggtgtggtggcacatgccggaggctgagacagaagaatcgcttgaacccgggaggcagaggttgcggtgagccgagatcgcgccattggactccaacctgggcaacaagagcgaaactccatctcaaaaaaaaattaattaaattaaattaaattaaatattcaattattcaggccaggcacagtggctcacacctgtaatcccagcactttgggaggccgaggcgggcggaccacttgaggtcaggagtttgagaccagcctggccaacattgtgaaaccctgtctctactaaaaatacaaaaaattagccaggcgtggtggtgtgcacctgtaatcccagttactcaggagcctgaggcaggagaatcgcttgagccctggaggcggagattgcagtgagccaagatcacgccactgcactccagcctgggtgacagagcaagactccgtctcaaaaacaaaaaaattcaattcttcagtcacctcagccacgttttaagtgctcaataaccatgtgactagtagttaccatgctggacagcacagattatcaaatatttccctcatcccagaaagttctattggacagtaggtattttgcaactctttcaagaaagactgctatgctatcatcatacttctgttactcaggatgtcatctgtctatacactcttctttcctcctcatacctattttattgatatcccatctccttccaaaaataattcatatgcatgaaaatgaatagatacgattaatgaaataacaaagtcatggtcaaaaaagaggaagcaaaacttcctatacagctataacagtagctgtatgtgatgatccagtttggccttgagctttctagaaggcagagcaagagggaaaatatggtaaactacatagttctcattatcagaaagaaaaggatagcaatttcttcaggaagacaatttttccaggcagttagtcctaaagcctttcttggaggaatcttatacaggagtcaagctgcttccttgacaagttttgacagcaactgaaatgcagtttctacatggctacgtctctcaaaacgtttaacaaaagtacaaatcagtgagggcaattctgcaaggagctagtttaaactaaggtgattcaagtaccctaccttccagtggtgtaacttgatcccaggagagttctaactacctcctagagtaaatggatattgcctcaatcttgcaggtgactgacctttccgtaagtgaccccatgttggaggaagagcactaatcagggtggtaggatttctcaatagtttgataaaggtcgaagggaggaggaggaggtaataaaaactaacagctaaacagagattcaagttctcactggatttcctttaaccaccctagggcacctctctgttggcctgaatagctgtaaatggatgtcaccgacgtagaagacttcattatcgttattaattattgtagccctggccctctgttcccctgagctctcaccctgggcaaacagcccagtcgagaagctgtccaggcgaatctcacctgcagccccagcttgcacagtgatggggtcagcgaggagcaagcgggggatctttttccagagttggtgagggcaccgggctgcagggtaagttcacggagaggagttctcatagatggttttccctgagaaagaaaccaagaaagagggcgagtgtgaggaagcctgggttctgccagcccgcccctcctccctccctaagaagcccaaaatgcgattagaagagtacgctcgcaccctagtcgcgcaggagcagcaaggcgaacaaagactccacaagcccccaaccccgggctcgacccaactttccaggacagtagacacggccggtgcccccgcgacagcagcccggcccagttctctccgccagagatctcccgcttaccgtctggggcgaaggcgacaggctgaggctcagttttttcactcgccacatcttcaaccagaaggcaggcctatcacgtctcagaccaagtcgaggacgccatgttcacccgccgtctgtgtttgaacctgctctgcgcttcctggttggctgcttcaggcgcgcgcgtacgctcgggggtagagcccggggggcggggcccgcgttgaccacgcccccggccctgcctgcccctccgttgtcgagcgttttccgctgacggagccctcacctcagacaccggcggtagggctggatgcgggcccggcccaggaccggtcttctgtcctcacaccggggaggaccacgcaggtagctggagagtccaggagtccatccctcctgcttccagcggacctcctcacatccatggtgttcatatccaagttgtctccgtggatggagaagaggaatcctctccctaggtctccctcagtcctctccagccgcagccttgacgggaaagagccggccagggagtctagaagccgaagcggtgccgagcggcttccctaggcttggtgggcccgcgtccgggacggcccgggccgtggttctcgacctgggctgtaatgtctccagagtttctgggcttttcctgggacttactcaggccggctaccagtttactgggctaaccgcctacatgtattgaacattgagtgtgtgcctggcgctatgccgaatgccgtgtagtagctcatttaatgcgcataaggacctacgtagtgagaaatactataaatatccccatttgtgacaggaaggagctgagtcagagagaccgtgtgtaatttgctcagcgtcacacagatagtaaacggcagagccgctcttcctccctgtcccgccagc

SEQ ID NO: 1936 - DNA, 6000 bp, Homo sapiens
ctgggccaccaccccgtctgggaggtgtacccagcagctcattgagaacgggccatgatgacaatggcggttttgtggaatagaaaggggggaaaggtggggaaaagattgagaaatcggatggttgctgtgtctgtgtagagggaggtagacatgggagacttttcattttgttctgtactaagaaaaattcttctgccttgggatcctgttgatctatgaccttacccccaaccctgtgctctctaaaacatgtgctgtgtccactcagggttaaatggattaagggcggtgcaagatgtgctttgttaaacagatgcttgaaggcagcatgcttgttaagagtcatcaccactccctaatcgcaagtacccagggacacaaacactctgcctaggaaaaccagagacctttgttcacttgtttatctgctgaccttccttccactattgtcctatgaccctgccaaatccccctctgcgagaaacacccaagaatgatcaataaaaaataaaataaaattaaattaaaaaaaaaaaaaagagaggaacccacaaaaaaaaaaaaaagaaagtatataaaataaaatattgaagtcctttcccattaaaaaaaaaaaaaaagaaaaagcacggactctttcatccagttctgatgtgattatctctggaaggcattttctcctcctcttccctccacctccattcagagtcactgacttataccttttacatattcacatgaaattcacttaatatatacacctatatactcacaaaaattaaaaattaaaattaaaaaaattcctggcccggcgcagtggctcacgcctgtaaatcctagcactttgggaggccgaggtgggcggatcacgaggtcaggagatcaagaccagcctggccaacatagtgaaaccctgtctctactaaaaatacaaaaattagccaggtgtggtgcacgtgcctgtagtcccagggaggtggaggtgggagaatcgcttgaacacgggaggcggaggttgcagtgagccgagaccacgccattgcactccagcagccagggtgacagtgagagtccgtctcaaaaagaaaaaaaaaaaattcccttaggcccagtgcagtggcttatgcctgtaatcccagcactttgggaggccaaggtgggtggatcacttgaggccaagagtttgagaccaccctggccaacatggtgaaaccctgtctctactaaaaatataaaaattagctgggcatggtggtgtgtacctgtaatcccagtactcaggaggctgaggcgcaagaatagcttgggcctgggaggcagaggttgaagcgagccgagattgtgccactgcactccagcctgggtgacagagtgagactgtctcaaaaaaaaaaaaatttttttttttcatttttttcaatatacaatctgaaatgatcttttaagtttatatgctctgatttttttttttaatctaaaagaaatcaggaccaggtgcaatggctcatgcctataatccctacactttgggaggctgaggaggattacttgagcccaggaggtcgaggctacagtgacctataatcagctttgggcagtggcagtatcatagccagtaaggtttatccgaggcacaattattactgattattgccaattgaaacagtgagttatgatcatgccactgcactccagcttgggtgacagagaccttgcttcaaaaaaagaaagaggtcaggtgtggtggcccacgcctttaatcccagcacttcgggaggctgaggcaggtggattacttgaggtcaggagtttgagatcagcctggccaacgtggtaaaaccctgtttctactaaagaaatataaaaattagccaggtgtggtggcacgtgcctttaatcctagcctgggtgacaaagcgaggcaagactccgtctcaaaaaaaagaaatctgatagacttcacttgtaatggatatttaattctatatttcatgttatcttttgtaagaatttaagattagtcaacaccaatcctatactcctctagaaaagtatctttgtagctctactcattatttcttatctctaacctaagttactttattacatattaatctgttcatttgttcacttgctcattgatgtaataaattagtaatctcaatttattggttacttgtttgatagagtcttcaatgtagaaatgttgtcaaagcttttttaaaaaaatttaaataggccaggtgcagtggctcacgtctgtaatcctagcactttcagaggccgaggcgggcaggcagcttgagctcaggagttggagaccagcttgggcaacatggtgaaaccccgtctctaccaaaaacacaaaaagttagctgggcatggtggcatgcacctatggtctcagctactcaagagactgaggtgggaggattgcttaagcctgggaggcagaggtttcagtgagccaagatcagccaaaccactgtgcctggcccacataagtaatttttaatttgctagtatccacattcaaaaagtaaaaagaggggccgggtagagtggctcatgtctgtaatcccagcactttgggaggctgaggcgggtggatctcctgagctcaggagttcaagactagcctggctaacatggtgaaacctgtctctactaaaaatacaaaaattagccaggcgtggtggcacatgcctgtaatcccagctccttgggaggctgaggcagaaggatcgcttgagcctaggaggtggaggttgcagggaggtgagatcgtgccactgcactccagcctgggcaacagcgccagaccatgtttcaaaaaaaaaaaaaattagattaaaaaaaaaagtttaaaaaggctgggtggggtcgttcatgactgtactcccaacactttgggaggctgagatgggaggatcgcttgagcctaggaattcaataccagcctgggcaatatggcaagagactgtctttataaaaaattagccaggcgtggtggcacatgccggtagtcccagctactcaggaggctgaggcaggaggattgcttgaacctaggagttcaaggctgcagtgagccatgattgcaccactgcactcctgcctgggtgataaagcaagaccctgtctcaaaagaaaattaattttaatgtattttatttaacccaatattcctaaaatatttcaatatgtaaacagtattaaaaaaaaaaaatatatatatatatatttttttttttttttgagacaaggtcttgctttgtcgcccaggctagagtgcagtgggatgatcatagctcacagcagccttgaactaggttcaagcgatcctcccaagctgggattataggtgtgtgcccccaaccctgccacccctggcttaacttttttttttttttgagacggagtctagctctgtcacccaggctggagtgtagtggtgccatctcagctcactgcaacctccgcctcccaggttcaagagattcttcctgcctcagcctcccaagtagctgggattacaggcgtgtgccaccacacctggctaatttttgtatttttagtagaaacggggtttcgccgtgttgggcaggctggtctcgaactcctgacctcaggtgatccgcctgcctcggcctcccgaagtgcgggattataggcgtgagccaccgtgcccggcccaaattttttttttgtagacataggtctcactatattgccgaggcaggtctcgaactcctgggcttaaaggatcctcctgcctctgtctcctccgtgctgggattacaggcatgagccaccgcacctggcgatattttgcattctttttttcatacgacgtgtttgaaatccagtttgtacagtgttttacatttatagcacattcccactgggactagtcacatctgaagtgctcaaaagccactatggctagggctaacgtactggacaacacaatgctagaggagcccgtccctgaggacgctgcagtttataacatcatagttcctcctctttggactgctgctttccccctatgtattaagacttgcagagtgtaaacagggcgccgtgagtgtgcaaagcacacacaccttcgcaaacggctcactctgaatactgacctttcggctgtcctaccttcaacaggtttcccgtgcataggagatccaagacagcagaaggcaggagctggcgggacagggaggaagagcggctctgccgtttactatctgtgtgacgctgagcaaattacacacggtctctctgactcagctccttcctgtcacaaatggggatatttatagtatttctcactacgtaggtccttatgcgcattaaatgagctactacacggcattcggcatagcgccaggcacacactcaatgttcaatacatgtaggcggttagcccagtaaactggtagccggcctgagtaagtcccaggaaaagcccagaaactctggagacattacagcccaggtcgagaaccacggcccgggccgtcccggacgcgggcccaccaagcctagggaagccgctcggcaccgcttcggcttctagactccctggccggctctttcccgtcaaggctgcggctggagaggactgagggagacctagggagaggattcctcttctccatccacggagacaacttggatatgaacaccatggatgtgaggaggtccgctggaagcaggagggatggactcctggactctccagctacctgcgtggtcctccccggtgtgaggacagaagaccggtcctgggccgggcccgcatccagccctaccgccggtgtctgaggtgagggctccgtcagcggaaaacgctcgacaacggaggggcaggcagggccgggggcgtggtcaacgcgggccccgccccccgggctctacccccgagcgtacgcgcgcgcctgaagcagccaaccaggaagcgcagagcaggttcaaacacagacggcgggtgaacatggcgtcctcgacttggtctgagacgtgataggcctgccttctggttgaagatgtggcgagtgaaaaaactgagcctcagcctgtcgccttcgccccagacggtaagcgggagatctctggcggagagaactgggccgggctgctgtcgcgggggcaccggccgtgtctactgtcctggaaagttgggtcgagcccggggttgggggcttgtggagtctttgttcgccttgctgctcctgcgcgactagggtgcgagcgtactcttctaatcgcattttgggcttcttagggagggaggaggggcgggctggcagaacccaggcttcctcacactcgccctctttcttggtttctttctcagggaaaaccatctatgagaactcctctccgtgaacttaccctgcagcccggtgccctcaccaactctggaaaaagatcccccgcttgctcctcgctgaccccatcactgtgcaagctggggctgcaggtgagattcgcctggacagcttctcgactgggctgtttgcccagggtgagagctcaggggaacagagggccagggctacaataattaataacgataatgaagtcttctacgtcggtgacatccatttacagctattcaggccaacagagaggtgccctagggtggttaaaggaaatccagtgagaacttgaatctctgtttagctgttagtttttattacctcctcctcctcccttcgacctttatcaaactattgagaaatcctaccaccctgattagtgctcttcctccaacatggggtcacttacggaaaggtcagtcacctgcaagattgaggcaatatccatttactctaggaggtagttagaactctcctgggatcaagttacaccactggaaggtagggtacttgaatcaccttagtttaaactagctccttgcagaattgccctcactgatttgtacttttgttaaacgttttgagagacgtagccatgtagaaactgcatttc

SEQ ID NO: 1937 - DNA, 6000 bp, Homo sapiens
gcagcctctacctcctgggatcaagcaatcctccagcttcagcctcctgagtagctgagatgacagctgctcaccgccatgtccagcaaatttttttattttttgtaaagatacgattttaccatgttggtcaggctggtcttgaactcttgggctcacgcgatccacctgcctcagctcctaaagtgctgggattacaggtctgagccatggtgtccggccacactcatggatttaattgcccttggaatcaacaccgtgcaggaaaggagtaggattgagcagaaaaagttgaactaaatgtagttacagcaaatgcctcagcttccggatcctaagggagctctggtgccaggagagcccttcagagcagccccaccctgagccctgcatctgccagtcagtgcagacggacctggtgagaggcagctttcttcagctgaaggcaactcctggaaagggatttagctgataggtgttgacaagtaatgcgcccagcagctgaggaaatgagcaccttagtcctgaagagtggtgtgctctttggtatgctgggatggttggttgtgccagtggagatgggggtggtgggcagaatgaagggaatactactgtaaaagctttttattttttatttatatttattcatttatttattttttaagacaaggtctaactctgatgcccgggctggagtgctggaatgcaatgacaccatcacagctcactgtagccttgacctcctgggctcaagcgatcctcccacttcagcttcccaagtaactggaaccacaggcacatgccaccatgcccagctaattaaaaaaaaaaattttgtagagatgaggtttcgccatgttgcccagggtggtctggaactcctgggctcaagtgatccacccaccttggcctcccaaagtgctgggatgacaggcatgagccacggctcccagcttggaacaaaactcttcgaagaaaaaattggcagagcttgttgcctgaccaaaaaacagaggctgaatgagagagatgcatttaaaacaatacgaaacactaagggttccctgaatactgttggacagtgcaaaatgggggaagttaggatacaaatctaattctgttctactgtaaggctcatgccttttcactagactagtgctggtcaaactggtgttccatgggctacattcagacagcagacgtattttgtttggctacacagcatttaaaaaatgtaaattggctgccactatgtaaaaattggaagagtttatatgtaagttcagatctctagcttctcttgagtaactagaagatctagcaacactgggtcaacattcctgcatggcagtaactggagttgagtgacagatactctttaaatggagagagtatctcttatctggataaatggaggtgggtatatgcttcttaattcaccacagtctctatgcattaccttctttggcattttttttttgagatggagtcactctgtcgcccaggctggattgcagcagcacaatctaggctcactgaaacctcagcctcctgggttcaagcaattctcctgcctcagtcaccctagtaagtagttgggattacagccatgtgccaccatgcccggcttttttttttttttttttttttttttagtagagatggagtttcaccacattggccaggctggtctcaaactcctgacctcaggtgatctgcctgcctcggcctcccaaagtgctgggattacaggcatgagccacagcgtccagtcttctttggcacttttgtttagcattcctgccatatgtactatgtatggtctaacaaagtacataatacataacaggcatttgggtacttttatttttatttattttttagagacagggtcttgctctgttgcctaggctggagtgcagtggcgagatcacagctcactgcagccttgacctctctagctcaagtgatcctcccacctcagcctcccaagttgctgggaccacagatgcacaccactatgcctaactaatttaaataattttttttggtagaagctgggatctcactatgttgcccaggctggtctgaacttctaggctcaagcaatcctcccacctcggcctctaaaagtgctggcattataggtgtgagccaccacgaccggcccatttggacacttaatactggttcagcagaactgaatgaatttaattggagaggaagttggggtgaagtctaggcctctgactataatgagaggtttggcactgaggggaggcaacagaacagggagtacaaattaggatgaattaatgacatgctggcaggagcttgagtaaaggaagaagagcagagggccagggcctgaagtttgggtgtcttaccacagagctaaagaagagtgggcaatggtagactaaactagagaagaagaggagagaaaggcacagaggaacttcagcaacggaatgccagggaaggcaagggagctgagggtttgggcagttgcatccagtgtagggaagaagatcagggagatagacaggcaaaaagccatggcaacaaggaagtagttagggactttcagaggaagtatgagaaaaggagaggaaggtcataggtctgaagtttagcagtgcagtagggggcactggaatactatcttgggggtatgagtgagtgctttttcaggggtcctacttgggagaaacatagatagacattcatttaatattcatccatttctttccagcatagtcatcattctgacatcatctaaaagaaattagtatctgcattgcatccttaaagaagaagggacaaaagacatgtccaaactgtctgtctgttctagtggaataaaacattaatttaatatgtattttggacaaccaccaacctagagattggaaacttttctcaaggatatatctctctgtatgtgggctactggctttgtggcttttctgtaggaaaattaaaattctagttttgttctcccttatcacccagtgtctgtgtggcttaactggctgattagcgcgtgcttggaatgtgtaaattcattttaacattggcctaggggcctgtgtggtagctcacccctgtcatcccagcactttgggaggccaaggcagggggatcacttgaggccaggagttccagaccagcctgggcaacatagcaagactgtgtctctaccaaaaaaaaaaaaaaaaaaaaaattagccaaagcagggtgacactcacctgtagtcccagctattcaggagcttgaggtgggaggatcacttcggcccaggagtctgaggctggagtgagctatgattgagccactgcactccactgcacagagtcagaccttgtctctgaaaaacaaaaacatttgcctaggtaaaatgtatcgaggaagacaaattttaaaattactcattccaggccaggtgcggtggctcacacctgtaatcccagtactttgggaggctgaggtgggcggatcatgaggtcaggagttcaagaccagcctggccaatatggtgaaacaccgtctctactaaaaatacaaaaattagccggctgtggtggcgcatgcctgtagtcccagctactcgggaggctgaggcagaagaatcacttcaaccgggaggcggaggttgcagtgagccgagatcgcgcctctgcactccagcctgggtgacagggtgagactctgtcttaaaaaaaaaaaaaaaaaattagtcattccaaagtccaatgtcagacatagattatccgttgttttggatgtaatcctcttcctggaaaactggcacaacccaattacacatgaaatcctttcaactctggtattggaggtatagggaaggactttgttttaggagacccatagtctacctctattgttctaggagttaaaccacgttggtttacatcctgactttgccacctgtcaactcagaccttgggcaaatcaaaggtctgagggaggagtgcaggctcccagcgttcccacgggggtggggacgtgacgtattcatcagttcatgaagttaatgatatgtattgaaaaggtttgttcaaggatttaaataagacgatgaatatattgaattaataatgaatgcaaggccttaaaggtgttttgagggtggtgaaacttgaatctctcatcaactgtgcaatagttatattaacttggatggctatgagttttgcagaggaaagctgggcttaaatcccaatgctagacctggtggctagaccttgattgccaccgggtctagcattgggatttaagcgacctctaaaaaaaaaaaatcacggaatctctctttggccttccttttttgtttctcagcagtctaccaagctacgaagaacctgaaaatcggaggtcgtgtaccttattttttctgagagcttaagctgagagcacagcctccccaggagattagcggcagagatccgcgcgctgggagaaaggctagccccagggcgccctaacttccaactccgggagcaatccaaacccggaggccggcgggggaggggacagctgtagggggcggtggggatgggagtggatgctcccgggtcagctctggcactcgccagctgagcccagcgccagtctaggtgagccccacggcggtgagggacgctcgccagacggcccagaggagttagatgacgtcacctccaggaggactcgctttttcattaatgaaaccggccggcgcgggcgcatgcgcggcaggccgccttccctctcgcttccccctcccctttcccagccgcgctctcaatctctagctcgctcgcgctccctctccccgggccgtggaaaggatcccacttccggtggggtgtcatggcggcgtctcggactgtgatggctgtggggagacggcgctagtggggagagcgaccaagaggccccctcccctccccgggtccccttcccctatccccctccccccagcctccttgccaacgccccctttccctctccccctcccgctcggcgctgaccccccatccccacccccgtgggaacactgggagcctgcactccacagaccctctccttgcctcttccctcacctcagcctccgctccccgccctcttcccggcccagggcgccggcccacccttccctccgccgccccccggccgcggggaggacatggccgcgcacaggccggtggaatgggtccaggccgtggtcagccgcttcgacgagcaggtaaccggcccgtggcgggcgggaggtgggagcggagtgggggtggggacagagtaggtgaggggaggtaggagcggccgcctcccccgcggctgcctcaggctctggaggaaaggaagggaagggaagagaagggaaggggggataagtgggggtggccaaggcgggaggtgaggggtaggaggggacagctgggagcttgggcaccctttccctcctaagtcggggggtggggccttgtccctgaccagcctccgaccctccatcccctttatcccagcccttccgcttggaaatggggatgagtgacctgggggcgcctttaggggcgcgccatctggatttaataattacccccttacttttgtttttgagcagaggtgggtaacgtttaggggttctctcttcctcttccctccgtgaccctcctaactggggacgagcgaaccctaaggcctgtcttatataccctcaataggagaacgataacattccgcccctcccccagtttcttcagcttcctctcctggagggggaagagcagaagaaagcaaggaaggcacaggttttcttactttctgctccatcgtctcatcctgccccgagagcttcaagtgcacactcactgcacatctttgtgatgccctacaacgtcgtcccccatatcctgatgacacagactgccttttttttttattgccgtttgcagtggaaaccgtggttctgaaatatcttccccttccttgataat

SEQ ID NO: 1938 - DNA, 6000 bp, Homo sapiens
tgcgatagtttactgagaatgatggtttccaatttcatccatgtccctacaaaggatatgaactcatcattttttatgttttttaaaaaagaatatttgtacaaaaaaagaaaaaagccaggcaccatggcacatgcctgtaatcccacctgctcaggaggatcgctaagcccaggagtttgagaccagcctggacaacatagtgaggcccccatctcaaaaagaatatttatattttaagaaattcactaataaaagccaattgaaagaatagtgagataatcagttatcagcttggcaaagattttttttttaagatccattcctggtggtctgtggaattgtgagtagaggcaatttttctagaaaggcatttggaagtggataacaagaccttaagactattcataccttttggcctcataattctgctttttagcatttatcctaaagaattaatgttaaaatgtttattatagcattatttttatgtagatttttaaattgaggtatatcttgtcatcagtaaagtgcaagatcttaagtcaacagcttgatgaacttctacatgcaaatacatcatgaaagtatctccagatctagacatagaacatttctagcatccagagggatattctcagtaccctcccttcaccaagagtaaacactattatgacctctattgcacagatttattttgcctactttagaacttcatatgacattatttataatagcaaaaaaatgaacaggccaaaagtcaaagaataaggaactgattaaattattggttctccatctgatggaataatatgaagccattgaaaaatggctttgttacagaatttcagtttggaagatgaaaaggttctagagatggatggtggtgatggctgcacaatgatttgaatgtactcagtgccactgaactgtgcccttcaaaatgggtaaagccacggaactgtacatttaaaaatagttaaaatggtaaattttgtgttgtgtatattttaccacaattttaaaaactctttgagactttaggtaaagtgtatagataaatttttgtacaatttttgtcttataaatgtgaagctttttcaagtaagtttaaaagaagtttgcagaatttgtaatgttgaataaataatctcagtataggccaggggtggtggctcacgcctgtaatcccagcactttgggaggccgaggcgggcagatcacgaggtcaggagattgagaccatcctggctaacacagtgaaaccccgtctctactcaaaatatgaaaaaaaatttgccgggcgtggtggtgggcgcctgtagtcccagctactcgggaggctgaggcaggagaatggtgtgaacctgtgaacccgggaggcggaacttgcagtgagccgagatcgctcctctgcactccagcctgggcgacagaggagactccatctcaaaaaaaaaaaaaatgaataatctcagtataatcactgaaaaaaatattcagagcctactgcatgtatagcataatccccgtttttgcgggggagtgggagtgggttatacctgtgtacacacacataaatgtacattaactctacataaatttgaaagcctgaggagagatgagatgatacaccaatgttaatacagttttcattttgtggtgatgctttccttttaccaaactttctatgattaccacatttccttttataatgagaataaaacaactttttaacaagaaaggactaaaatggaggaaaataagacaaaacttttcaaaaattggcttactggcttttaaaattactttcttcaaggactgttctttcttcgcctctacaaaaatatatttgccaagtgtcttttctccaggcctgattctaggtaatagtctttaccttttaccattttttccccgaattctttatgttaaataattgttgatgtgattttcattgaccatcacatgctaatagtgtatttttttccaggtattgaattgaaacacctttgtttggaatacatgactccatggctgtcaaatctagttcgtttttgcaagcataatgatgatgccaaacgacaaagagttactgctattcttgacaagctgataacaatgaccatcaatgaaaaacagatgtacccatctattcaagcaaaaatatggggaagccttgggcaggtattgagtttgctcaaatatttatctagtatctcctttgtgcacatatttatctggtgccacattgggcaaagcactgcgctagacactagggatagagttgtaaaaaacacagtttcctccttcagaaagcatgtagacactcacccagctcttcatctggttcaaaattgtaaatgtctagtgcatgtctcagagccagagaaaagctagttatttgcacagtctccttcaaggcataattatatatatatatatatatataattatgccttgaaggagactgtgcaaataactagattttatatatatattatatagaactgtagaaatctggtgacatttctagtgctttattctagttctctacattccaaaggtgtcagtagatgtttcttcttattgatgctatttgggacatctgctttcatttatagttctacataagaatgccaatattaaaataggatataatgtaaattttatttttatctgacaagaattaggcatatcatttcttcaaagtaatcatttaaggaaataatgccctcactcaaacactgctgctcctcctccaaataattagaaataaccttggagccagtgttgcagccctagaaaacatcctggtacttaatgtcatttcctatattttatttttttttgagactgagtctcgctctgtcacccaggctggagtgcagtggtacagtctcggctcattgcaacctctgcctcccaggctcaagtgacccttccacctcagcctcccaagtagctgggcctacaggtgcacaccaacacacctggctaatttttgtatttttttttttttttttttttagagatagggttttgccatgttgcccaggctggtcttgaactcctggcctcaagcaatccgcccgcctcagcctccccaagtgctgggattacaagcgtgagccactgcacccagctctgtattttcaaattactattttatattgatgctacattactgtcttagaaaagcatagagatactttgcaagtgactgaagatagtattgatagagatttaaaatttttgaataccaatctcttaatctctgaaggagtcaaatgaatatactcatcctttactggatattttataataaattgtatttactgacaggcctgtaaataaaatctagtatttttgaggcctcaggtaaaatagaattttcatattgattaggctgttccaatgaatattttttaattaaaaattaaattggtagagtgattaaaaacatgttattttccttcttcaactagattacagatctgcttgatgttgtactagacagtttcatcaaaaccagtgcaacaggtggcttgggatcaataaaagctgaggtgatggcagatactgctgtagctttggcttctggaaatgtgaaattggtttcaagcaaggtaatcacttttcttttgccttctgtactatagcatatctgttttatcatcaggaggttttttgttttgtaattacttttaaattaaactgaacttttttgtgctaaaactttgagtcccatgtttttttttttaaaaaaaaaaatcctgcttctttacaggttattggaaggatgtgcaaaataattgacaagacatgcttatctccaactcctactttagaacaacatcttatgtgggatgatattgctattttagcacgctacatgctgatgctgtccttcaacaattcccttgatgtggcagctcatcttccctacctcttccacgttgttactttcttagtagccacaggtccgctctcccttagagcttccacacatggactggtcattaatatcattcactctctgtgtacttgttcacagcttcattttagtggtaagttctaggaaaggaatttgtgtttaccagttcctttctccattttacttcacctgatcaatatagattatcttatttatgtttgtgctctaacaccaagttgctaatttaagcctccagtaatgacatgaaatattaccaaaaagaaaataaattacttccattccatatcaagctatagtaaagattttctatgcatacttgtcatgtagagttatcccataagcggaatactcagtgccagttgaccatgttcagttaccagcactaatttgtagataaatgaagcaaggagcattaatacaatgtatctagaggtttgatttagggaacatgattatgtaatttttatatggtattcaaattttctaaattcaaaatgaaacatggaactttagaaattaaaaagtaatattttctgtctttacttgttcctttattctcttacagaagagaccaagcaagttttgagactcagtctgacagagttctcattacccaaattttacttgctgtttggcattagcaaagtcaagtcagctgctgtcattgccttccgttccagttaccgggacaggtcattctctcctggctcctatgagagagagacttttgctttgacatccttggaaacagtcacagaagctttgttggagatcatggaggtatagaagccaaaatgataagaaactaagttaaaatctttttttaaaaatatgttaatactatatagaagaaatattggtttattgtgctattttgtacttaatgcttaaataaaaacacttgcatggactgtgttattggtaacaggtcacttaatgacatcataataaacattatttaaacagttctaaaaacatttatgtacaatatgtattcagagtatccccttttttaggcatgcatgagagatattccaacgtgcaagtggctggaccagtggacagaactagctcaaaggtatgtcctaaattaaatataagttgtaaaaatatgcatattgttgaaaatacagctattactgtatgatcaatgttataatttattatttagtatatataaacacaaaggtttttataagttctgtggatcttttaattgcagatttgcattccaatataatccatccctgcaaccaagagctcttgttgtctttgggtgtattagcaaacgagtgtctcatgggcagataaagcagataatccgtattcttagcaaggtacctgttccgccctcacttctcccaaatatttatggttctcaagttgtaaagcatatctttcatttttctaaaagacgtttaaatttgaggtcaatgaaatatcttatatgttacttattaagcctttaaaatgtattttgattatttattgtaattctttgaagaagtcttctctaaagaagctgtctttatatgtaaactctgattacttcattaaggaagatgtctttaaaataaaatatgttgcctcttttgctaagcaggtacacttagtattttaccagttttcaaagcatttaattatatggtaagactatagccttgcataaaattatttaatttgtaattactataataatgtctgactcttataatgtagaaatgtcaaaaaataagaaaacaaatgtacattaagctagctaccaagatcaccatagcatgagaaatcattctagcatttattaaataagtaaatgttcctgaattcattccgagattcagtttaggagttaatgttttatttcaatgaaagtaaaataaaaaattctgttttcctaaaaggcacttgagagttgcttaaaaggacctgacacttacaacagtcaagttctgatagaagctacagtaatagcactaaccaaattacagccacttcttaataaggtaattactgtatagaaaatgagtgcattcattttgggt

SEQ ID NO: 1939 - DNA, 6000 bp, Homo sapiens
aactgaggctcagagacgtgacttggccaagctcattaaccattaaaaagtagagtggaaacttgaatgcaagtcttctgttccatggttctttgcattactacacactaatctagtgattgttactattaaagatcttaggcctaaattacattttctcctgcaattttaatttcatagcctattttgtcccctggtgtgtaaaaagcagtcattacttccatcaataaatgaaaattgtaaggcactggacacatatatatttgaaggctagttggatcagcatttttttttcttctttcaagttaggggtattgatttaaatcgataagtgaagttgggtgagaggatacctttatagcctttacacttctatattgtgatgacggctgaattagggggcattctaaaaagagaagtgactggagggagtccttgggaccaattcttacaatttaggaacaatgatggtattcagtcaaatgccgaaacctatttgacttagctcagagaaagtataataatggagctttccaatgtataagtggatcaggaaagatgcactagctactatagctgcttacgctgacctcaaattcaacaaggattcatttgagcactgattatggtcagggccccatttctactgctccggaatacagagcattgagaatcagattttgagggctttttggccgtcctaaaagcccaacgggggttcacgtgagtagtaacacacacctggcacttcttaagcacttctttgactgtgttacaattaaggactcaatttacaaggataaattgttaacttagaaagttcaaattccttagagcttggcattcaagctcctccacatgttcctaatctaccttttcaatcataattcccactgttgccaggactgaaccctctgctctagttaaattggatgctcactacctcctgagcatgtttatcttttcacctggataccttactctttagatctacgctgttctttatagtagccactagtcacatatggctatcgagtacttgaagtgtggccagtctaaactgagatgtgctgttagatacacctagatttcaaaaatgtagtaaaaataatcaatctttaaatattacatattggaacattaatattctggacatagatgaaataaaacacattaaaactactttcacttctttttactttggctactagaaaatgtaaaatttatctatggcttgcattatattttatttttttactttttgagacagggtcacactgtcacccatgagggagtgcagtggcacaatcacagctcactgcaaccgccaccttccctggcacaggtgatcctcccacctcagcatcccaagcagctgggactacaggtgaatgccacacctggattatttgtttatattttttgtagagatggggttttgccatgttgcccaggctggtcttgaacttctgagctcaagtgatccacctgcctcggattcccaaagtgctaggattacaggcatgagccaccacacccagtcgcattttatctttagtggacagtactccactagattgttggccaaggcagtactgggcccaccattcaaacccatatttgtactttcttgctagagtaatagtgatgaatgaagggaaaattctgagtaacactgggttcacacatttgaggcaagcaagccgtgtctcatcaaatagaagctgctatcactgatcagctagcagctcaaggaggaagactgccaaaggcagcaggacaattattaataataatttgtggtacacagcaactgttcagtaagtgttagataactccttttaggcagtgacactaaatacaaacaaaatcttgaatcccatacttatccctcctgtttttcttcttccacttctagtcactaaaatttagctattctggccgggcgtggtggctcacgcctgtaatcccagcactttgggaggccgaggtgggcagatcacgaggtcgggagattgagaccatcctggctaacacggtgaaaccccgtctctactaaaaaatacaaaaaattagcttggcgtggtggcgggtgcctgtagtcccggctactcgcgaggctgaagcaggagaacggcgtgaacctgggaggtggagcttgcagtgagccgagtttccgccactgcactccagactgggcgacagaccgagactccgtctcaaaacaaacaaacaaaaaaaacaaacaacaaaagaatttagctattcctatgacatgctttcacttctattccttttctcccaatcctcagctaatcagtcttgtcaccttgcttttgaaaatatagttttcaaatagctcctagcttccttctaccctccgtgttcattccattctatatactgttaataatgtcccatgatacttctttgcagatgtaattctttgctcaaaacctccattttcatatgaacttcatcaaaaattttcacttagcattcaaggcttttcaaaccttgtctcttggtactcctctccataaaaaaagactttagggaaactagattgagttaatatatgtaaagcacttagaaccatgcctggcccatactaagaaatatataggtcttagctattattattattgctcacttttatttgaatatgctgtatgcatttcaactccagaacactgctaattcccttttcctatttgagtacctcaatctctaaaggaaggagtgatttaaactatcaatgaccagcaagagccaattgttactgctggaaagacaacttaaatattctttctacaatagataggacctgcaaacaaggaaccctaatttaccaccaaataacaaaatttaaggctggatgaaataaataaaagataatattttttccttcattcaagaaacagcaaatttatggaatgtgttatttaaagaaaaagaaaaaacctgaaaaacataaatgggttctggatttagggcagttactctctaaccctggcatatattagaataacctgggtgcttaaaaaacacagttgcctgggcccaatcccagatttattgaaggggaaggcctcagacactttaattattttaatgcttcataggtgactctcatgtgcaaccacatctgaccatcattggtttggtcatgtttggcatatagttttcttatgtttttaaaataaagcacactaagagaactgattaacctacaatgacttatgtgtttatgaagtgttctaaaaaaccatacaaaaaccaaagaaacaagaaaacaaaccttttcaacttgatgtagggttcagaagatacatacattccaaataccacagtaagcattcatctgaaagtttgccggttggtctttctattaattaaaaaaattcaaaacagaatacagatttaactatgtacaatatttacaacttacagattttacaacgaaattatacagttaagtctgtcgtggaaatgttggcattttggtatataacacttcagaaatttcaaaaacaactttacctcaaaaacatgttacacaaattttccaaagtgctgtagctcactggctcattttatctcaacaatccagtttagcaatccaggtacccaaatcttgaggcatgaagtaaccgctatactactgagagacagcactttttatacaacagcagaggctgttagaaaccttgggtctttaaaaccctataacaatgcccctttcaccctccaatcctgagacaacaaatcctgtagttccccctcatcatcgctgtcagcattctcttcttcctttttctgcagttcttttatggtcaggatttctttaagtttattttttatttcatcctggcgattccgtagcttttccacccgtcggtaacactctatctgctcatcgatctccccaatctggcggtccaaccgtccctcctcatcctcttcggcaactatggcttcggaaatagtgttgacctgcctcatggctttttggaattcgtcccactctttgtccatctgatcttttggagcatcaacctttcgtactcttgcatctacctcagggtcgtcaaaaaaaccttccggtaacgcttccgcggtgttttctctcctttccaccactttttcatgtatttctgctttctcaattgaccctgaatgaggaattatgggggccttgggaggattagtactaaagaaatcgtttggcagcacactacttgttacctcccgtgaagaggaaactgagtgctccttgccctgtgcgtcggagagcggcttgctggcgtcccccctttttctttctccatctccttcctcctcctcttcctcctcctcctcatcttcataatcggggagtaaactgagtcctgaaggcttactgggagtcgctctaatgaactcctttcctattttgtcaaagttggtggtccacgcagatgtggagggctgtacctgaggcaccaaggtggccttcgctctcttgacatcttggtcgtctgcgtccggcgctttcctcttgacggaatgaggcgctgaactggcggacgaaccctggctggcttccttcgcgcctttcagctcggccactttctctcggtgctgctttcccaggacgtgagtctgccacaggagctcgctcttaaccggagtgttacacagggcacaactcagctgccccaaacggttgtacttcgcgaatggagattctatccgtttccgactggtgctcagacgctgcttctccttcattaaccgccgcaattcttcctgatttatcactcgcttccctgccggagtccgggcggaggcggaggacgccatcttggcgaccagacccaaaacgattctggtttccgtcgggcgaggcatgataacgtcacttcctgtaagggcgatgattggccgaggctcaagagagcgtggcgtcgcattgccgtttttgctcagaatcgcgactaaggctttttttttttctccctctgaacggttaggctatggctgcgataaaggccgtcaactccaaggctgaggtggcgcgggcccgggcagctttggctgtcaatatatgcgccgcccgagggctgcaggatgtgctgcggaccaacttgggtcctaaaggcaccatgaaaatgtgagacagcggttggagcggccattacgcggctaggggcccgttggtgtcctgtcgccctctgaggcaggcgtccgcgtagcgctgtggatgttcttgcgagcttgatttccctcattctcatccctgctctgggggtatttctcgcctggtgcaggtggaggagaaaagcctcccctagtagagggccccgggagtgaagctgtggcgcttccccgacccccgacttgtcgtcaaggttcatatgcagttagaaagtcagttaatttagtgtctcattggaaacaaagcatttaactcctctgctccttaagactgtatacccttggtccataaattcaacaagtagttttgttttttgtatggcaatgtattgtagtggagaggacacaggctttggagccaggaaggcatggggtcaaatccaagttctacttgaataccccgtgtctatggttgttcagatctattcatcttttcagtatatattaagcacccttttctatagacaagagtgaggaaaagagaccagtgagggcaaaagggtataagaggagagacacatcctcatagtaatgaacaaaataatattaatggtaaaataagtcacttaggtaccagttgttgggacacagaaatgatcaagataacggtttctgttcttaaggagatgtggtagagacggatgtggtagagtaggatgtgctaattatatatagatgcatataattatgctgaagaaagggactgatggcagaaggaaaagcatcttaagtaacatgtttgatcagtcttgaaagaagaataagacttcactagttggaagagggagtaaaggcctgggc

SEQ ID NO: 1940 - DNA, 6000 bp, Homo sapiens
ctcccacttgtgctttggagaaagctgatcttatccccagctcaaggagtggatcctgattagtctaagtcaattcccataaaaactgttactggcttgggatggacataatactaaagttggcccaatcatactaaagaaaagcctcctgaatggctttatcttgccctctgcctaatttcctctgacagtctttcttcgctctcctctgtcctctctctcctctctcctctcttctctctctctctttcttttagagactgggtctcactctgtcacccaggctggagtacactggtgcaatcatggcttactgcggcctccacctcctgggttcaggcaatcctcctgcctcagcctcccaagtagccaggaccacatgcagcatgccaccaagcctaatttttttttattatttctaaagacagggtctcactatgttgcccaggctggtctcaaattcctgggctcaagtgatcctcctgcctcagcctcccaaagtgctgggattacaagcatgagccactgtgcccagccagtcttactttctttttctttcctttttctttccattttttttttttttttttgagatggagtttcactcttgttgcccaggctagagtatgatggcacaatcttggctcactgcaatctccacctcctgggttcaagcaattctcctgcctcagcctcctgagtagctgggatcacaggcgtgcaccaacacgcctggctaattttgtatttttagcagagacagggtttctccacgttggtcaggctggtctcgaactcccgacctcaggtgatccacctgcctcggcctcccaaagtgctgggattacaggtgtgagccaccgcacctggcctcttactttcaagatggaaatactcttaggatgaaacagcactgtgagtggaagaggtaagagacaaagaacctgtgtacttgatgactgaattttgttatcacacaacctgacagtctcccttatctctcaattttctattatgggagataatcatttccttattgttcaagtgagttttagtcaagttgtttacagccaaaagcatcctaagttgcaagtactgaattaatagaaaattcccaatactaaacgaaacacagagaatcattttgactaggttactctttgctgaaatggtccctgaaagagagaaaacattcagatatggagaaaagagatacttaattagagaaaggtaaaaatgtacatgatgttttcagaggccagtgaacggaggagtctggctgaagtagatgatttataaagaaaatgaaactagaaaggaaggtaaattcacaataagtaaaaccttcaataatttttctccagtggttttataaaggtgcataatttggtttcaactttatctatggtgttttctttcttaattacccatggatacatgggtaattttttacttttttaggtccgttaaatatttcatttttaaaagaggtatataattccaacgaaaggcattattttggccaacaaagttcattattatttccatttataattgtccaagaatatcttaattaaaattaactgtctagaccaggcacggtggctcatgcctgtaatcccagcactctgggaggcccaggcaggtggatcacctgaggtcaggagctcaagaccaggctggccatgatggtgaaaccctgtctctaaaaaaaatacaaacattagccaggcatgatggcgcatgcctgtaatcccagctactcgggaagctgaagcaggagaattgattgaacctgggaggcggaggttgcagtgagccaagattctgccactgcactccagcctgggcgacacagtgagactccatctcaaaattaattaattaattaattaaaacaaaattaactgtctaaaactcaaccattttactagttaaaaaaataatttgccattcaaaataacatataaactgtgaaattctaatacctcagaaatgtacaggtcagcttgttttaataactctccaataattagaacatttgaagtagtaccatctcctgtgacgtcatcctgagctgttgctacttttgctatcaaggaagctgttggatgttgaatttgctggaaaaagcaagcaacagatttaaaaagacaggatgagataaggaagtaggtcaccaaaagcaagataacctaggggtcagtagcaaaattaaaaaatgaaataagcttcattctacaagtttacaagttttgtattatcaatacctaaatgtcaagtccaaaattttaaaagtgacaggtaatgaggcctgaacatttcataaaagtctttgcttcagaatgcaatgacatttctaaaataagattaaatcattcaatctcaaaatgaatacatgtattaaacttgcaaaggatatttttatttttccataattacaaagaacataaggcagtgcccttaaaagatattattgatttataagtatgcctaagtatacaaagtatgtataagtatacaaagacttggaaacagccaaaaaaaaaaactttttttttttttttttttgagacagggtttcactctgccactcaggctggagtgcaatggcacaatctcattcactgcagccttggcctcctgggctcaagtgatcctctcacctcagcctccagagtagctgggactataggcgtatgtcaccacactgagcaaaatttttttttttttttttttttgtagagacggttttcaccatgttgcccagcctggtcttgaactcctgggctcaagcaatttggccacctcagcctcccaaagtgttgggattacaggagtgagctaccacacccggccaaaaaaatttttttattgaggtctaattcaacagtcttcagcatatctcaagactgcagtatttagctcacagccttggcttaaagatacacaagttctactatgcttctaattaaggcttattaaggtttattaaagtcagcagcatcagctcaccatctcatcgagcagcacattgccatctttggtgagtttgatgtcacctgcaccagaaacaagcctgttcagagaagaatgatattaacttcatgtggtaggaagacattcccagtgcttgccactccattatccttaatagagggaactgggctcggaaaacttccactgtaccatgggaatatgccatggtaattaccaccatttgcagctcacagaatcatttctccccagatggacagattatggagatttcattccaaatggactatttacaggtttaaagataaaagcacttgatgagttacgaactgtggtttggtcaaagaatacttggaagtctacaaagcacaaattcgcaaatttcctgcaggttttaattttggtgaatgttttcattcattcagtcactcaacttagtttccctcatccctgcatttattagatcaccaagttctatcaattctactacctaaatatctcttgaatctgccaccttctctccatctccactgttatcatctctactttggatggcatccggatatctccaaacttaaatataccctccacacatttttctttctaaaaggcaacgtgattcagtcagttccctgatcaaaagtcctccaatgatttttatgttttccatcattttcaagttaaaatccaaacacagcaatgacatacttgacctttcccaatatcttccctgcctcatctacttttccacaagcaaatcttctggttcccttaatataccatgttttgtttcgtttctgttggatttgcaccattggtctttcttattcctgaaattactttgcccaggcctttactccctcttccaactagtgaagtcttattcttctttcaagactgatcaaacatgttacttaagatgcttttccttctgccatcagtccctttcttcagcataattatatgcatctatatataattagcacatcctactctaccacatccgtctctaccacatctccttaagaacagaaaccgttatcttgatcatttctgtgtcccaacaactggtacctaagtgacttattttaccattaatattattttgttcattactatgaggatgtgtctctcctcttatacccttttgccctcactggtctcttttcctcactcttgtctatagaaaagggtgcttaatatatactgaaaagatgaatagatctgaacaaccatagacacggggtattcaagtagaacttggatttgaccccatgccttcctggctccaaagcctgtgtcctctccactacaatacattgccatacaaaaaacaaaactacttgttgaatttatggaccaagggtatacagtcttaaggagcagaggagttaaatgctttgtttccaatgagacactaaattaactgactttctaactgcatatgaaccttgacgacaagtcgggggtcggggaagcgccacagcttcactcccggggccctctactaggggaggcttttctcctccacctgcaccaggcgagaaatacccccagagcagggatgagaatgagggaaatcaagctcgcaagaacatccacagcgctacgcggacgcctgcctcagagggcgacaggacaccaacgggcccctagccgcgtaatggccgctccaaccgctgtctcacattttcatggtgcctttaggacccaagttggtccgcagcacatcctgcagccctcgggcggcgcatatattgacagccaaagctgcccgggcccgcgccacctcagccttggagttgacggcctttatcgcagccatagcctaaccgttcagagggagaaaaaaaaaaagccttagtcgcgattctgagcaaaaacggcaatgcgacgccacgctctcttgagcctcggccaatcatcgcccttacaggaagtgacgttatcatgcctcgcccgacggaaaccagaatcgttttgggtctggtcgccaagatggcgtcctccgcctccgcccggactccggcagggaagcgagtgataaatcaggaagaattgcggcggttaatgaaggagaagcagcgtctgagcaccagtcggaaacggatagaatctccattcgcgaagtacaaccgtttggggcagctgagttgtgccctgtgtaacactccggttaagagcgagctcctgtggcagactcacgtcctgggaaagcagcaccgagagaaagtggccgagctgaaaggcgcgaaggaagccagccagggttcgtccgccagttcagcgcctcattccgtcaagaggaaagcgccggacgcagacgaccaagatgtcaagagagcgaaggccaccttggtgcctcaggtacagccctccacatctgcgtggaccaccaactttgacaaaataggaaaggagttcattagagcgactcccagtaagccttcaggactcagtttactccccgattatgaagatgaggaggaggaggaagaggaggaggaaggagatggagaaagaaaaaggggggacgccagcaagccgctctccgacgcacagggcaaggagcactcagtttcctcttcacgggaggtaacaagtagtgtgctgccaaacgatttctttagtactaatcctcccaaggcccccataattcctcattcagggtcaattgagaaagcagaaatacatgaaaaagtggtggaaaggagagaaaacaccgcggaagcgttaccggaaggtttttttgacgaccctgaggtagatgcaagagtacgaaaggttgatgctccaaaagatcagatggacaaagagtgggacgaattccaaaaagccatgaggcaggtcaacactatttccgaagccatagttgccgaagaggatgaggagggacggttggaccgccagattggggagatcgatgagcagatagagtgttaccgacgggtggaaaagctacggaatcgccaggatgaaataaaaaataaacttaaagaaatc

SEQ ID NO: 1941 - DNA, 6000 bp, Homo sapiens
ggagtttgaagctgcagtgcacaataattgcgcctgtgaatagccactgcactccagcctcggcaacatagcaagacccccatctctaaaaaaaattttattaagaacaacaaagaacaataatccagtaagatagtatgtaagtgctacttgattgggaatatttgtaacaacatcttacatttgtatagagaaaaggaatggggcctcctaaacttagagcatcatgtcaattaagatgtaactggctagtcaaatccataatgcctaactaataatagctcaaactttatacaatttattaatttacttagtaaagggctccaggattggttcagtgtcttgatggagttattaagggccctgcttattctcacctttcctctttgccttccttgtctcctcttggttacaaaatggctgctgcagctccaggcattgtggcttcatgcaactatgaccaaagcaggaagaaaaggaatggcagagacttctcagaagctctccaacagacttctctttgaatctcattggccagaactggagcacaaacccattcctaaaccaacttatggcaaaaagagggttgtcaagattgtcctagaccagttgtaattggtacctttgatcaagtgggactcatggagtatagttataaaacaatttcatttttgtctcctacagtctattttttattttatttatttatttatttatttatttattttgagacagagtctccctctgtcacccaggctggaatgcagtggctaattctgcctcctcccgagtagctgggattacaggcacctgccaccacacccagctagtttttgtatttttagtagagacaggatttcaccatgttgcccaggctgttctcgagctcctgacctcaagtgatctgcccgccttggcttcctaaagtgctgggatgacaagcatgagccactgtgtccggcccagtctttttaaacatgctcaagggaggaaaatacttcttcccttgtctctggagaacaactcagacaggccctatgacttattctgagtcctcttaggaaatagaaaagccaccatgcccagtggagaacatcttaatagaaagataggccgggcgcagtggctcacgcctgtaatcccagcactttgggaggccaaggtgggcaaatcacttgagctcaggaattcgagaccaccctggccaacatggtgaaaccctgtctctactaaaaatacaaaattagccaggcgtgacggtgtacctgtaatctcagctactcgggaagctgaggcaggagaatcacttgaacccgagaagcagaggttgcaatgagccaagatcattcctctgcactccagcctgggtgacagagcgagactccgtctcaaaaaaaaaaaaaaaaaaatgaaagaggaacttggtgcattccgtcctctctgttctgctttactgcagcctgaggacaaagttctgggagatcggcattgactatgtaagtaacaacaacggcctaaagaagcaacaagaaaggaaccgagtgcctggagaacttcatggagcagagccacttgcctactttggatcatctgtctctaagagagggaaataaacatttcttttgtgtgagccactgttttcagtggcctttttgttatatgtagcagcttagcttggccctaactaataaaggcagacatgtggctgcctctattgcagaagggctttctctgtgtgataggaatgcatcccccaaatcttcgccatctgattgggaaaagaacctggccctatagctccaattttaaaagcccagggaagggctgtttggactagctgagtcccatgcttacctcctagattattggctctcagtggggagggagaggattttgccccccagggacattgtcccccagaagacattgccaaatgttaatgtctggagacatttttggttgttttaatgggggcagggggccaggtgtggcggctcatgcctgtaatcctagcattttggcaggccaaggtgggtggattgcctgagctcaggagtttgagaccagcctgggcaacatggtgaaaccccatctctactaaaatacaaaaaattagccgggcatggtggtgtgcacctgtaatcccagctactcaggagtctgggggaggagaatcgcttgaacccaggaggtggaggttgcagtgagccgagatcatgccattgcactccagcctgggcgacagagcgagactctgtctcaaaaaataaaaaaataaataaaaaaatgggggcaggggtgctgctggcttttggtgggtagtggccagggatgctgctagatgtcctacaatgcccaggacaacctccacagcaaaataattatctgacctaagatgttaatagcgccaaggtcaaggaaccctgttttggaccaatcctattaacttttcaagggttaatatggaatgtgactacttgtcatcaactccataggcaccacttggtttaagatacccttgctctgccctggatgactgcagtagcctaactgtccccctgactctgtccttgcccctgcagttcttcttcgcacagcagcctgaattagagcatgtccctactcttctcaatctcctgacttcgtgatccgcccatcttggcctcccaaagtgttgggattacaggcgtaagccaccgcgcccggccacccctacccttctcaaaacactctagggcacttctcatttcactcagagaaaaagccagactcttcagagtcacctacaaggccctgcatgatctaggacctcatttcctagattcttatcctacataccctacctctcttagggattcttcttcttttcttctccttttactttttctccttctccttcttcttcttcgacaggatctcactctgttgtggtgcagtcatagctcactacaacttcaacctcctgggctcaagtaatcctcctgcctcgcctcgcatgtagctgggaccacaggtgtgtgccaaccacacctggctaacttttaaaaaaagtttttgtagagatgggggtctcagagcttttgcactggctgtccctctgcctgagcactcatcccccagacagctgcagagcacgcttccgatcttctttcaggtctttgctcaattatcaccttatccctgaggcctttaaccatcttatagaaaattccacacataccctcgcctcctttattcctttatttgtctccctggaatggatcaccatctgactatttatttatttatttatttatttatttatttatttatttatttttgagatggagtctttgtcgcccaggctggtgtgcagtggcacgatctcggctcactgcaacctccgcctctcaggttcaagtgattctcctgcctcagcctcccaagtagctgggattacaggcgcccaccaccacgcctggctaatttttgtattagtagagaaggggtttcgccatgttggccaggctggtctccaactcctgggctcaagcgatccacccacctcagcctcccaaagtgttggaactacaggcatgagccaccacacccagccttagatttatttgtctatctgtcattcaccactcggtaacatggaagtagcccccataaggtcagggacctggtcttttttgtttactgctgtatcctcaggcctgcagttgtgcctggcacatagtcggtgctcaagacttttttcttttttaagacagggtcttgttgtgttgcccaggctggagtgtagtggtgcaatcatggctcagtacagcctcgatctcctgagtagctgggattataggtgcgtgccaccatgcttggctaatttttgtattatttctgtagagacagggtttcatcatgttgcccaggctggtctccaactcctggcctgaagtgatccatcctcctgccttggccttccaaagtgctgggattacaggcagcacttacaccgtgaccaaccaagaaatgttggttgaatgaatgcattgctgtggccatgggggtggtagggtgttatgacccacagcctgctgtagcgcaatcacatggttagtgtggggggtggggcaggttcttcagagaaagtggggatcatggtgctaacagagctgccgggagaactgggacccactcagacctgtgcctgcctgtgagttctgatggtctgatactttcacatacattatttctttatccctcacaacacaccaaaaaggtaaacattattacccccattttacagttgagaaactaaggcacagagaggctaggtagtatatgatggtcacacaggatttaaggctacacttatgagttttgggccctatttctatgtctgtttcattcccattctcctgtactcactaaacaccaaggggtatggcaacccctacccctgctttccctccactcccccaaagttcccatttggccagccccgtgagagaagccagccccagccccaacctctcctccctctcccttggttctgcagggcagtcctcgcctgctgggaagggttaacaaggagtgtttgtagcagccgctgtctccaaggagaggggaggaaagcagagtggggaggccggcagccaccccaggctctgtggccgcagccagcagagggtaggaggcagccagcttgatctctccagctctggggaaagagaggagtgtcctcacttccatctggcctcagaggggtgaactccaagtggactgggcagcctgagagcaaggttgctgcagggccaccagggaaagctctggcaaggactgaggaatgtgggggggcaggggctgggccaggcctggcagctgaagccagtggcaagtagcagcactggaggtcccgggctctcagcgagtacacgggaacctcagaatcaggaagaacccagccgagacccagcagcagcgggaggaaagaggcggcagtgggagaggggaggtgcccacctcctgccctgctggggtccagccatgtcccagcctgcgggaggcaggaggaagcccaggaccctagggccgcctgtgtgcagtatccggcctttcaagtcgagtgagcagtacctggaggccatgaaggaagacctggctgagtggcttcgcgacctctatgggctggacatcgacgcagccaacttcctgcaggtgctggaaacgggcctggtgctgtgccaacacgccaacgttgtcactgacgctgccctggccttcctggctgaggcacctgcccaagcccagaagattcccatgccccgggtcggggtctcctgcaatggggccgcccagccaggtaccttccaggccagggacaatgtctctaacttcatccagtggtgtcgaaaggagatgggcatccaaggtaaccacgctgcaccctcgtccccattccagatgcttatcttggggggtattggtcctttctcaaatgcacaggctagctctggggggcaggagcctggatcctcattctagatttgccttgaaccagctcttttttcatgcctcagtttccccacctcatagtaaatcctcaataaataaatatattgatgattgataaatgtttgttgatgattacttcaataagcatatatcaagcacctcttctgtgctgagcactttgctgggcaccaaggaaagagaggaaagagacccagcgcccaacaaattcatggtctagcaagagaggcagaaggctgggtgtggtggctcatgcctgtaatcccaacactttgggaggctgaggccggtggatcacctgaggtcaggagttcaagaccagcccggcctaacatagcaaaaccctgtctctactaaaaatacaaaaattagctgggcatagtggcaggctgagataggagaattgcctgaacccaggaggcagaggttgcagtgagctgagatggcgccactgcactccaacctgggtgacagagtgagagtctg

SEQ ID NO: 1942 - DNA, 6000 bp, Homo sapiens
ccttgatcaacttccactctagtttgctattaatagtcacctgaaggccgggagtggtggctcacacctgtaatcccagcactttgggaggccgaggtgggtggatcacctgaggtcgggagttcaagaccagtctggccaacatggtaaaaccctatctctactaaaaataaaaataaaaaaaattagctgtgtgtggtggtgcgcgcctgtagtcctagctactcaggcggctgaggcaggagaaccgtttaaagccgggaggcagaagttgcagtgagccaacatcatgccactgtaccccagcctgggcaacagagggagagtccatctcaaaaaaaaaataataataagtcacctgagacttgttcccactgtacttactgctaaagggacccaaacggtccattccctaattggcaacgagtgctgctttggtcttcctcagcagagcttcttcaagacttcagaaccggccaacacatacaccaaagcttgatgactccctaggaacaaacaaaagtggcacatggatcagaaaatcattcaaagggacaagataaagagaagatatgcaacatactcagctctgccacatcttagctttgtaatgttgaaaaattattccacctctgaaaacctgtttcttcctctgtagtgggtataacagtgcctaccttccaaagttgtgagaattaaatgttataatcaaatatcataatccatataagtaatgtagcatggtacctggtcctctataaatgctacatatttttcttttttatgaggaaggatctgggtctatggggcactgagggtggcaggggcaaatgctacatatttctaataaacaactgttggctttctctactcagcatcatttctctccttagctgccatctttatttgggaaactgaccctcccacatttcatgtgatactggtggggctgccaatcacaataccccattccccacccctgacaaaagctaaagcaaccaggtctcttcttccagaaatctggatcttgagtaagacatgaaaggacagaaggcagttggagcttagttattcactagaattcattcaaagaattcagtccatgtgctctggctgttgaaatccctagccccaggtggctcaactgtttaactcttctctcatttctctctctttaataaactttaataaactcaactttaatcataagactgaacgagtttctgtaactggaaaccaaaaaatcctatctattacaacatacatttgttcctcactctttcaacaagtacgtaacagggccaggcacagtggctcatgcctgtaatcccagcactctgggaggctgacgtgggaggattactgggacccaggagttcaagaccagcctgggcaacatagggagaccccatctcttaaaaaaaaaaaaaaaagttagccgggtacagtggcccatgcttatggttccagctactcaggaggatgaggtggaacgcttgggcctaggaggtcgaggatgcagtgagccaccactgcactccagcttggaggacagactaagtctctttttcttttttttttggagacacagtctggctctgttgcccaggctggagtactcattgcaacctctgcctcccaggttcaagggattctcattctccatttggttctcattttttattcttgtgtcttgtgcctcagcctcctgagaagctgggattacaagcatgtgccaccaccatacctggctaattgttttgtatttttaggagagacagggtttcaccatgttggccaggctggtctcgaactcttggcctcaagtgatccgcccacctcggcctccaaaagtgctggagtgctgggattacaagtgtgagccaccatgcctggcccaaagtatcttctttgaagcagaaataaaataatattttacactaagtcaaaaaataatccttcttctgtacactcacagctttttgtttttgtttttgttttttttttgagactaagtctcgctctcgttgcctaggctggaatgcaatggcacgatctcagctcactgcaacttccgcctcccgggttcaagcgagtctcctgcctcagcctcccaattagctgggattacaggcgcgggccaccaggcctggctaatttttgtatttttagtagagacggggtttcaccatgttggccaggctggtctcgaactcctgacctcaggcgatctgcccacctcagcctccccaagtgctgggattacaggcatgagccaccgcacccggcccactcacagctttttatctggcatttttcacattctactttgtgagtattacttctgaatgtctattttcccccacttctaaattaagtgaaagcaggctgggtgtggtagctcatgtctgtaactccagcactttgggagactgaggcagatgaatctccagaggtcaggagtttcagaccagcctgggcaacatagtgagaaccccgtctctaccaaaaatacaaaaaaatttgcttggcgtggtggcgggcgcctataatcccagctactcgggaggctgaggcatgagagttgcttgaaccaggcaggtggaggttgcagtgagccgagattgtgccactgcactccagcctgggcaacagtgcaagatcctgtctcaaaaataaataataaataagtgaaagcagagactatatcggatacctatctgtatgcttttaaaatgccaagcatacaggaggaatacaataaacacatagtagtggactaataaatgttaattctacaaaaggttaatttatctttagcttttctgaagtgatttttttcaccctggtaatttttagcttggagaataattcatcactaagtgtgggcaacatttctgctaacgctgccatcaaagaactttccctttttggggtggggtaggtctccctttgctgtcctctcaggaaaagttgagctctgaagaaaaatgagtctagcaagggtgtattacgaacgcagcaatcaaataacagccaaatttactgaactttttcaatttgctaggtacccgtgggtaccaaggtgtggggattctttgaatcctcactcccacacttttggggcaagctgctttttcaaaagcaagcaagctctgaaagagtatgttacttgcgcagtgtcttacaagggatagctgtgtcatttcaaatacagatgtcaaggctggacgcagtggctcacgcctgtaatcccagcactttagcaggccgaggcaggcagatcacctgaagtcggcagttcgagatcagcctgaccaacatgtagaaaccctgtctctactaaaaatacaaaattagctgggcgtggtggcgtatgcctgtaatccagctacttgggaggctgaggcaagagaactgcttgaacccgggaggtggaggttgcggtgggctgagaacgcgctgttgcactctggcctgagcaacaagtgtgaaactccctctcaaaaaacaaaaacaaaaacagacgtccagtaaaggatgcacagtcaatagggactgatcaacactcgaaaaagcacagtaggaggccgggtgcggtggctcacgcctgtaatctcagcactttgggagtcccaggtgggcagataacctgaggtcaggagttcgagatcaacctggccaacacagcgaaaccccatctctactaaaaatacaaaaaatagccaggtgtggtggcgggcgcctgtaatcccaggtactcgggaggctgaggcaggagaatcgcttgaacctgggaggcagaagttgcagtgtgttgagatggcgccattgcactccagcctgggcgaaagaaacgccatctcaaaaaataaaaaaatagtagggccgggcgtggtggctcacgcctgtaatcccagcactttgggaggccgaggcggaaggatcacttgaggtcaggagttcgagaccagcctggccaacatggtgaaaccccacctctgctgaaaatacaaatattagctgggcgtggtggcccacgcctcaggcacgagaatcgcttgagcctgggaggcggagattgcagtgagccgcgatcgtgccactgcactgcagtacagcctaggagaaaaaaaaaaaaaggcaaaaaagcacaatattgcagtctgcagaatcttctttctccccctttcacaagagaccacattctgacaccaacttccgtggaaacactggcgctagctccaaactaacaatcaccaaattcgaatcagttaccgggagaaggaagtgaggcacttcgccgggcaggagtccacgttgggaggaggaaaggcgcaggctcccgagttgtggagccaacgttcaaatccttacggggtgggaccggcctgggccagtcattttacctgcgcctcagctctaacagggtactgaaatacctactttggggggcctgctaggaaattcaaatgggcaacgctggtcaggggcatctggcacagtggccattcttggtagagctacgcgctccagggctgagcgggaaatggcgaggccggggcactggggcaccgcccagacgcggggcgggcccccggggtcaggcccggccccacaccgccctcccccacagagcggcgaggcccgccgctgcccgcccgccggcccgccagcctgccgcgtcaagcccgccgccggggcccgcagcccgcgactcctcccccgccgcacctcgtggcccccgcttctccctagtcccgctagaggggctcgcgctccgccacccgcccgcccgcccagcgctgcctggcgcctcacctcgccgagaccccctaatccgcgccaaagagccgccggtcgcgcgcgcctccgggctttgcgtgcgcgcccccgggcggcgcagtggcgagcgcgccgcgtgccgcgcgcccgccgcctccgcccctcggccgtggaggcccccgccgggtgctgagcgcccgccaccgccctcttggccttttcccggtccccgccgcgcgcctgctgctgtccccgtgcccgaggactgggaggatggggctgagccgcttgcctgacttttgatccgaccagtaatcactttgcccgtgtggcgcgtggcccgttgcctgaggcttcctggcgcgtggggctgtttggtcccctccggagtgcggtgaggcgggccgagccgggactgcctgggtttggggataacgttcccatctccacccctgttgcagcaagggaaattgaggctgagggaactgggcccagggacggcgagccgtggctgcctctccagtccgggccccgaagggctgctcgtggatgaaccagactgattttaaggggtgaagagggtgcgtttcaatcagatgcttctggaacgtcgaaattgtcttctttggaaagaaccatcccctctttgggcttcagaggcccaaattgaggcgcaatgatgagaggatgtggtggtctactctgatgtcaatcttgagggctaggtatgtcccaagatctcttattactgctgttaatgatgattctaatagctaccatttgtcgagtacttattgcatgccagacattgcacaaagcaggttacacatacggtctcatttaaaacttgtgaggtaggcacctgttgttatccctattttccaggtgaagaaatctaggcactgacataaataacttgggatcacactgctaggaagtactggggaagggaattcaaaccatggtttatctgaactatataactgttacatctatttagaagtctgcctttgataaatttgcccaacctttttttagaattcacttacactttatacctgtgtgaaccctttcattcttttttggtatatgcataatacaagttcattccaaaaaaaaaaaaaaaaaaaagccctgccgggcgcggtggctcacgcctgtaattccagcactttggcaggccgaggcgggcggatcacagggtctggagttcta

SEQ ID NO: 1943 - DNA, 6000 bp, Homo sapiens
caaggtgtactgggaacatgtaagagggtgacttaactcagccattggggggtcaggagaagtgttcctaaggaagtgatgtctaagtgaggtaggcagtaccttggcaaaaaaaaccttgaagttaagagtgcatatgagaaatgaaggtatgtccacctggctggcaaatggagtctaagatagggcagtgatgataaagatacaggaagatgctagatctggaagggccttctaaaaagaatgacaatataaatttattgtacaaatggagactttactgagagtgaaaccaggcaatattaatacttaggtagggacaacagatataaaccaggctattctcagcaaatcagaaattatggtcaccctacttgtaagtcacattcaggtgcttagactttcagtgaaagcatagagtatgtatcttctacattttgcctaagtgacttcattctttttttttttgagacagagtctcgctctgttgcccaggctggagtacagcggcacgatctcagctcactgcaagctccacctcccaggttcacgccattcttcttcctcagcctcctgagtagctgggactacaggcgcccaccaccacgcccggctaattttttgtatttttagttgagatggggtttcaccatgttagccaggatggtctcgatctcctgacctcgtgatccgcccgcctcagcctcccaaagtgctgggattacaggcgtgagccactgcacccagccagtgacttcatttttacttttgcctttacttactcatttcacaagtatttgaggatacacttcagagcactgaggttacaaagacaacagtgtctgtcctcaaggtctgtctaggtaagacacacagccaaataaacaattctaatacagttatacagttttagttctgacacctccaatgagctgtagacttgtatttgtcatttccagtcagaatgcaaaacacagatccaaaacagaactttcaatttctcctccaaatctattcttccttcagctggtcgtgtaagtgatgccactatcacatccacttaagacaaaaacccagaggagtactgccttaatcagtaatcagtgttacccttcttctcactgtgcatgttaattttgccacatcttttttttttttttttttttggtacagtgtctcactctgtcacctaggctggagtgcagtggtgtgatactgggtcaatgcagcctcaaccctctgggctgaagtgatcctctcacctcagcctcctaagtagctgggactacaggcatgcgccactacacctggctaatttttgcaatttttgtagagacgaagtttcaccatgttgcccagttctcatgcctccttgaactcctgaactcaagtgatctgcctaccttggcttcccaaaatgcagggatcccaggtgtgaggcaccgtgtcctgccctctccacatctttcttaagcacactgactaaattggtctaagtagagcctaacatcaactgaagggagagggtaatttccaggtagttgaatgctatgatttttgtttttttgtttttgagacagactcttgctctgttgaacaggctggagggcagtggtgcgatttcagctcactgcaacctccacctccagggttcaagcaattcttgcgcctcccaagaagctgggattacaggcatgcgccaccacacccagctaattgttgcatttttagcagagatgggttttcgccatgttgcccaggctgatcttgaactactggcctcaaatgatccatctgccttggcctcccaaactgctgggattacaggaatgagccactgtgcctggcccctgaatgctatgtttttaacgactagatctcagtattatgtgggactaatttttctacagtattacaacactgattactgatattcattgttgacaatcatgacatccagatctggatatttgccttagccagtctcaaaatttgagtttcaatgacaaagacacagatatgtcctaaatgactgaccccacttccactatgtgaagttgagagtggttgtaaagctgtacagctataggtgaaacactaatgttaatcaactatctgttgaacaactaccatgtaaaaggacaatttatgccttagagagcaatttaaaatttttttagagatgggggtctcgatacgttgcctagactggtctcaaacttgggctcaatccatcctcctgcctcagtctctcgagtagctgggattacaggtacacaccacttcaccaggcaaagggcaattttaatatttctaccatccattctccacacagctgccacagtgattttttttttttttttttttttttgagatgcagtttcactctgttgcccaggcttgagtgtagtggcacaatcttggctcactgcaacctccacctcccaggttcaagtgattctcctacctcagcctcccgagtagctgggattacaggcgcccgtcacaatgcccagctaattttttttgtatttttagtagagatgaggtttcaccatgttgaccaggctggtctcgaacttctaacctcaagtgatccgcctgcctcggcctcccaaagtgatgggattacaggtgtgagccaccgctcccagcccacagtgatccttttacagcaaagctactcctttgctctcaacccttcgtcatattctgtcacttcccaataaaatccaaaccttaccagatgatacatgatctgccttgatttccatctaatttctctcatttgctgtgctccagccacactggtcttgccctttctccatgccaaacaaatccccatttcagggtcactgcacttgctgcttctcttctaggatagtttccctctagaaatccatgttgctccttctctcattaaatgatcagatatttatgtgcctccttagctaagaggccttccttatctaccctaactaagagaatccccatatcactcttatccttttatcctgatttatttttccataaaacttgccacattactgggcattatctatcatttagtaatgtgtatattgcttattgacagtcttccctactataatatgagctccatgaggcagagactttgttttgttcactgctgaattcccagcacctacaacaagcctactcactaaacatttgttgaattaatcttcaggatacatcaaatgtaaaatatcctatcatatatttattgatgtgatgcataggaaaatgtctggaagggtacataccaaaatgttaattatttatttaacctggtgggaggtggtttttctttccttttcttttctttttgagacagagtttcgctctcgttgcccaggctggagtggaatggcaagatcttggctcattgtaacctctgcccccagggttcaagcgattctactgcctcagcctccggagtagctgggattacaggtgcctgccaccacacccgcgtaattttttgtatttttagtagagacgggatttcaccatgttggtcaggctggtctagaactccagaccctgtgatccgcccgcctcggcctgccaaagtgctggaattacaggcgtgagccaccgcgcccggcagggcttttttttttttttttttttggaatgaacttgtattatgcatataccaaaaaagaatgaaagggttcacacaggtataaagtgtaagtgaattctaaaaaaaggttgggcaaatttatcaaaggcagacttctaaatagatgtaacagttatatagttcagataaaccatggtttgaattcccttccccagtacttcctagcagtgtgatcccaagttatttatgtcagtgcctagatttcttcacctggaaaatagggataacaacaggtgcctacctcacaagttttaaatgagaccgtatgtgtaacctgctttgtgcaatgtctggcatgcaataagtactcgacaaatggtagctattagaatcatcattaacagcagtaataagagatcttgggacatacctagccctcaagattgacatcagagtagaccaccacatcctctcatcattgcgcctcaatttgggcctctgaagcccaaagaggggatggttctttccaaagaagacaatttcgacgttccagaagcatctgattgaaacgcaccctcttcaccccttaaaatcagtctggttcatccacgagcagcccttcggggcccggactggagaggcagccacggctcgccgtccctgggcccagttccctcagcctcaatttcccttgctgcaacaggggtggagatgggaacgttatccccaaacccaggcagtcccggctcggcccgcctcaccgcactccggaggggaccaaacagccccacgcgccaggaagcctcaggcaacgggccacgcgccacacgggcaaagtgattactggtcggatcaaaagtcaggcaagcggctcagccccatcctcccagtcctcgggcacggggacagcagcaggcgcgcggcggggaccgggaaaaggccaagagggcggtggcgggcgctcagcacccggcgggggcctccacggccgaggggcggaggcggcgggcgcgcggcacgcggcgcgctcgccactgcgccgcccgggggcgcgcacgcaaagcccggaggcgcgcgcgaccggcggctctttggcgcggattagggggtctcggcgaggtgaggcgccaggcagcgctgggcgggcgggcgggtggcggagcgcgagcccctctagcgggactagggagaagcgggggccacgaggtgcggcgggggaggagtcgcgggctgcgggccccggcggcgggcttgacgcggcaggctggcgggccggcgggcgggcagcggcgggcctcgccgctctgtgggggagggcggtgtggggccgggcctgaccccgggggcccgccccgcgtctgggcggtgccccagtgccccggcctcgccatttcccgctcagccctggagcgcgtagctctaccaagaatggccactgtgccagatgcccctgaccagcgttgcccatttgaatttcctagcaggccccccaaagtaggtatttcagtaccctgttagagctgaggcgcaggtaaaatgactggcccaggccggtcccaccccgtaaggatttgaacgttggctccacaactcgggagcctgcgcctttcctcctcccaacgtggactcctgcccggcgaagtgcctcacttccttctcccggtaactgattcgaatttggtgattgttagtttggagctagcgccagtgtttccacggaagttggtgtcagaatgtggtctcttgtgaaagggggagaaagaagattctgcagactgcaatattgtgcttttttgcctttttttttttttctcctaggctgtactgcagtgcagtggcacgatcgcggctcactgcaatctccgcctcccaggctcaagcgattctcgtgcctgaggcgtgggccaccacgcccagctaatatttgtattttcagcagaggtggggtttcaccatgttggccaggctggtctcgaactcctgacctcaagtgatccttccgcctcggcctcccaaagtgctgggattacaggcgtgagccaccacgcccggccctactatttttttattttttgagatggcgtttctttcgcccaggctggagtgcaatggcgccatctcaacacactgcaacttctgcctcccaggttcaagcgattctcctgcctcagcctcccgagtacctgggattacaggcgcccgccaccacacctggctattttttgtatttttagtagagatggggtttcgctgtgttggccaggttgatctcgaactcctgacctcaggttatctgcccacctgggactcccaaagtgctgagattacaggcgtgagccaccgcacccggcctcctactgtgctttttcgagtgttgatcagtccctatt

SEQ ID NO: 1944 - DNA, 6000 bp, Homo sapiens
cactttgggaggccaaggcgggtggatcatttgaggtcaggagttcaagaccagcttggccaacatggtgaaaccccgtctctactgaaaatacaaaaattaaccggtgtcatggcgcatgcctgtagtcccagctactcgggaggccgaggcaggaaaatcacttgaacccaggaggcggaggttgcactgagctgagatcatgccactgcactaaaaaaaaaaaaaaaaaaaaaaaaaaaaaaaaaaaaaaattctagagttctagttacccttcctgggagattctgatggtccttattttattattattattatttttttttgagacaggatgttgctgtcatccaggctggagtgcagtggtgtgatcatagctcaccgcagcctccaactctcaagctcaagtgatcctcccacctcagcctcccgtgtagctgggaccacaggtgtgtaccactatgcctggctaattttgaaaatttttttgtaaagacagggtctccctatgttgcccagactggtctcaaattcctgggcttaagtgattgtcccacctcagcttctcaaagtgctgggattacaggcatgagccaccgcacccagccagtccttattttatatttccacctaactcccctttgcccacgatttcagggaacctaggaggcttcctggccttgtgaccttttccttgaatctcttataattctttctacctgtgttgcatggcagattctcagattgaggctaaagaaaagaagggtggggacaaagcatacagaatgtgtgtatctgtttttatgtgggtgttggctgtttttcgtcactgctttttaagctgaatcttagctggttttcttgaactttgactttaggtgtaaaaattcaaccagacattctctccttactgtggtcagctgacatcataaccactaaggcttaatgagcttaacttgcactttcatcactagcaaaggtcttgaagttatttctcttactgattcataatgggtgtgtgtatgaatcactctcacataatttagatataaaaacctatgaggatgagggagggaggggaagaaaaaaaaggactcctttcattttcatccgtacttcccagatgggctgaatctccgattatttgacccatcattgttattaatatggttaataaactacctatttattgattgaattgttcctcctgacttgaaatagcctgcaaatggagcttgcctaaatgaccttcgacttcctaaccctataattcattctgtcttcttgtgatggtattgctagtgtgtgtgtgtgtgtgtgtgtgtgtgtctacacacacagtcacacaaaaggatgccagacaggttcttccagtgtgatttgattccttctccatgatactgtgtatgagttagcaggtgataaggacactagttttccttccattactgaggcagagctgcttgccatgaatgtacctcttaagtatttcccaacccaatctaaccatgaactaaacgacccactggaagaaagctgcctgtctccaacttcctagtactctgcaaagagaggtaaaggaactatggaaaatgaattagaactagaaatatgtcagcctcaggattctgactgccccagaggacaactggggaaatgctttgcctctgacatcactggagcccagtctggatcattttcacacataattgaattcattctccattcctaggcttaggggtgtgagacttaaaagactgtatgctctccagccacaagtgtttatgcaaagggtggatgtccacttggcaagaatgtcctttccattccttcattcagcaagctcttattgtacactttactctgtaccaggcatctacaatatgaagatgaaaagtctgtttttgccgggcgcggtggctcacgcctgtaatcccagcactttgggaggctgaggcaggtggatcacctgaggtcaggagtttgagaccagtctgtccaatatggtgaaaccccgtctactaaaattatgggcgcctgtaatcccagctactcaggaggctgaggcaggagagttgcttgaacccggttgggtggaggttgcagtgagctgagattgtgccactgcactccagcctgggcgacagagcgagactccaaataaaaagtcttttttttttttttccaacttggaaatgggtctccctatgttgtccaggctgtcctcaaactgggctcaagggatcctcccacctcagcctcccgagtagctggaattacagatgcatgccactgtgcaaggctaagacatggtctttgactccaaggaactcatagtttagtagacttcaggatagctaccaggagaaacctatgcaggatattaaaaggctttatgggagttagccagggaagatggatggttagtggcattccagacagaggaaacagcaaaaacaaaggcacagaagcaagaaacaatatgatgtgtacgcatcacgttactggaggatcattattagtgcaaaggaaaagcttcaagtagataacctttcagtcctgacattctgtgattatttgcctgcttccacagtggtcatttacacctgtaggcttttcttgggccactgctatgtttcctagtgtcttcttttcttttttttttgaggcggagtctcgctttgtcgcccaggccggagtgcagtggcgtggcgtgatctccactcactgcaagctccacctcccgggttcacaccattctcccgccgcagccttctgagtggctgggactataggcacccgccaccacgcctggctaatttttttgtattttagtagagacggggtttcaccgtgttagccaggatggtctcgatttcctgacctcgtgatccacccgcctcagcctcccaaagtgctgggattacaggcgtgagccaccgcacccagccatttcctggtgttttcataggttccaatatgcatgctaagtactcatagcttcctaggttgtttaccataaccaccccttacagctggctgggcacacattaccatttcaggttattaagggcaattcttaggtgcccatgttataaaaatacgaacagtgaaggttgcttcctgagttctactatcctactaagacatcagaaataccatctagtccttttaaaagcttccactgtggccaagagcggtggttcatgcctgtaatcccagcactgtgggaggctgaggtgggtggatcatgaagtcaggagtttgagaccaacctggccaacatggtgaaacccctctactaaaaattcaaatattagccaggcgtggtgacgcgtgcctgtagtcccggctactcaggaggctgaggcaggagaatggcttgaacccaggtggtggagattgcagtgagccgagatcatggcacggcactcaagcctgggtgataaaatgagacttgtctcaaaaataaaaaaaaaaaaagcttccattgtgtggtaactttctccattcatggcagcccattctcttcacttttgtagttttcagctgctaaaaagccttcacgaaatgtactccaccatctcttcctgtttagaacctgaatctgtctaatcatccccctatgataaagtggtcaagagtttgattttctgtcagagttcagagttcaaattctagctcttccacttactagttgtgtgaccttgggcaagtttactcaactcccctctactgtagttccctcatttgtaaagtgaaataacaccaggttcatgggggtgcttgtgaagattaataaggtgatgtaggtaaaatactgagcacagcccctggcatacacttaagcactcaatattggctctcttcatgaactaggtaccaattcactgatgatcgtaatattgttgcttccctctttctaggctttatggctctattttgtttgttactgaggggtaaaagataaatgtttaccatcacctagaattgggttctggcctctaaaggaacctgaggcttagatgaattattggctttggaagctggccttcaaattactgcgctaatttatatttttcattaaaaactcagcttgcctcttctatatagctgtcttccctggccctgaaaccctagtgtttcgccataaaagattttaaaattaaggggtcataattccctccccatgatgtgtggattaatggtaagaagatgcacagaacataatattcttaggttgaacgaaataaaagtaaagagttggctctgtttctcacctttgaagcacaaatcaagagatactatgatgaagcatagtttttctttatataggtgtgtagaactttaccataaaaatcactagttcagccatcaggagatctggatcctaggctcttcactgtcaccaagatgctgtgacctctaaccttgtatagaagtttgctttgtactttgcgaggttgagcattagagaggtaaggaaagtgcctagcatcatacctggcgcacagaacccaaaacggtaggtatcatgtagcagttctgaaaatctagcccatcaggatgatgcaaatgggtactttaggcagtgagaaggggaaccacatcttgacacttccagtcgaaggaagagtgcgactgcgcggcagcaaagactacgcctcccagcgtgctttgcggcgggccggcccgctttacccagagtcgccctgccgcaatcgcgcgtctttccaccgaggccccggatgtagattccctcccccgttcagtggtcgtggcctcacagcgactctaagacttggggctctctcattggctgtaactcttccactggattggtagcaaaaaaagaggcggtgcccaaggcgaaaggctctgtgactacagccaatcagaatcgaggccgggctttggcgggaggtgggaacgctgtggccattcggatttggcgcgagcgcggctggagtttgctgctgccgctgtgcagtttgttcaggggcttgtggtggtgagtccgagaggctgcgtgtgagagacgtgagaaggatcctgcactgaggaggtggaaagaagaggattgctcgaggaggcctggggtctgtgaggcagcggagctgggtgaaggctgcgggttccggcgaggcctgaggtgaagtgaagggaaaagagctgagctcgctggaggtctgaggtcgggatcagggaaagggcaggtgccctcggggtagttctagcagttatgcgtggtgtgaaggaggtgaaagttgtaggaaggaaatattctggggtgcgttgagagctgcctagaatgaggactgagtgcaggggcggaaagaactgagggaagactgagctgcagtgtgagggcttgggatagaagagactaaatgtggcgggtgctgggctgaactggtgataaagacaccccgcgtgcctggagggaggaaactagaagttctatataaatcaattcatgtaacttttttttttttttgagacggagtctcgctcttgtcgcccaggctgtagtgcagtggtgcgatctcggctcactgcaacctctgcctgccgggttcaagccattctcctgcctcagcctcttcatgtagctgggactacaggcgcccgccaccacgtccggctaattttttttttttttttgagacggagtctcgctcggtctcccaggctggagtgcagtggcgcgatctcggctcactgcaagctccgcctcccgggttcatgccattctcctgcctcagcctcccgagtagctgggactacaggcgcccaccaccacgcccggctaattttttgcatttttagtagagacggggtttcaccgtgttagccaggatggtctcggcccgtctcggcctcccaaagtgttgggattacaggcgtgagccaccgcgtttggccgtaatttttgtatttttagtagagacggggtttctccatgttggtcaggctggtctcgaactcctgacctcaggt

SEQ ID NO: 1945 - DNA, 6000 bp, Homo sapiens
gatcatgaggtcaagagatcgagaccatcctggccaacatggtgaaaccccgtctctaccaaagaaatacaaaaattagctgggtgtggtggcacgctcctgtagtcccagctactcgggaggctgaggcaggagaattgcttgaacccgggaggcagaggttgcaatgagccgagatcgcaccactgcactccagcctggggaatagagcgagacaaaaaaaaaaaaaaaaaggctgggtgcggtggctcacgcctgtaatcccagcactttgggaggctgaggtgggcagatcatggggtcaggagatcaagaccatcctggctaagatggtgaaaccccgtctctactaaaaatacaaaaaaaattagccgggtgtgggggcgggcgcctgtagtcccagctactcgggagactgaggcaggagaatggcatgaacccgggaggtggagcttgcagtgagctgcgattacaccactgcactccagcctaagcgacagagcaactctgtctcaaaaaaaaaaaaaaaaaaaaaaaaaaagactagccttagcggccgagcacagtggctcatgcctgtaatcccagcactttgggaggctgaggcaggtggatcacgaggtcaggagtttgagaccaaactgagcaacatggtgaaaccctgtctctactgaaaatacagaaattagccgggcgtgttggcctgcacctgtaatcccagctactctggaggctgaggcaggagaatcgcttgaaccctggaggcagaagttgcagtgagccgcggtcatgccactgcactccagcctgtgtgacagaatgagactgcgtctcaaaaaaaaaaaaaaaaaaaaaaaagactagcctgggcaacacagggaaaccccatctctacaaaaaatacaaaaattagctgagtgtggtgacatgcacctatggtcccagctacttggaggctgaggcaggacgatcgctggagcctgggaaatcgaggctgcagtgagctgtgatggcgccactgcactccagccttggtgacatggcgagaccctgcaaaaaaaaaaaaaaaattagctggatgtagtggcacgcacctgtagtgctagctacttggtaggctgagttgggaggatcacttgagcccaggagttcaaggttatagtgagctatgactgtgccactgcactgtagcctgggagatacaatgactctgtctcaaaataaataaataagtaagacaaagtaaagacaaacattctggtatttattcttctaggctttttttgtttcagttttctttttttttttttttagactgagtctctctctgtcaccaggctggagtgcagtggtgtgatctcagctcactgcaacctccacctcctgggttcaagcgattctcctgcctcagcctcccgagtagctgggactacaaggcatgtgccaccacgcccagctaattttttgtatttttagtacagatggggtttcaccctattagccagggtggtctcgatctcctgaccttgtgatccgcccgcctcggcctcccaaagtgttgggattacaggcatgagccaccgcgcccagtcctcctttttttttttttttttagagatggggtctccatatgtagcccaggctgggcttgaactcctgaggtcaatgaatcctcccttttcagcctcccaagtaggtaggactacaggtgtgtgccaccattccaccatgtctggttaggctttttttttttttgagacaggatctcactttgtcacccaggctgggtgcagtggtgtgttcttagttagctcacctctccggctcaagctatcctctcacctcagccccccagcgtgagcacaggtctggcccttggccaggctttttgatatacacatatactcaggcatatgaatctagtttgttgtttttataataatggaacaattcagtaatacttgtttgagtcctgattttcaagaaaacaatatatcacgggcatcttttcaggtcggtatagacctataaaattttttttcttcttttttattttttatttatttatttattttttgagacggagtctggctctgtcgcccaggctggagtgcagtggtgctatcgcagctcactgcaacctctgcctcccaggttcacgccattctcctgcctcagcctcccgagtagctgggactacaggggtccgccaccacgcccggctaattttttttgtatttttagtagagacggggtttcaccatgttagccaggatggtctcgatctcctgaccttgtgatccgcccacctcgacctcccaaagtgctgggattacaggcgtgagccaccgcgcccagcctatttttatttttttttttgagacggaatctcgctctgtcacccgcccaggctggagtgcaatagcccgatctcggctcgctgcaacctccgcctctcggtttcaagtgattgtttcgtctcagcctcctgagaagctgggattacagaagtgcaccaccacgcccgcctaatttttgaatttttagtaaagacggggtttcaccattttggtcaggctcgtctcgaactccagacctcgtgatccgcccgcctcggcctcccaaagtgctgggattacaggcatgagccactgcgcccggctatttttttattttttttgagacggagtctcacactgttgcccaggctggagtgcagtggcgtgatctcggctcactgcaacctctgcctccagggttcacgccattctcctgcctcagcctcccgagtagctgggactacaggcgcccgccactacacccggctaatttttttttgtatttttagtagagagggtttcgccgtgttagcctggatggtctcgatctcctgaccttgtgatcagcccgcctcgccctcccaaagtgctgggattacaggcgtgagccaccgcgcctggcctcttcttcttcttttgtttttgttttttgtttttttgagacggagtctcgctttgttccccaagctggagtgcagtggcgcgatctctgctcactgcaacctccgcctcccgggttcactccattctcctgcctcagcctcccaagtagctgggactacaggcgcccaccaccacgcccggctaattttttgtatttttagtagagacgggtttcactgtgttagccagggtggtctcgacatcctgacctcgtgatccaccagcctcgacctcccaaagtgctgggattacgggcgtgagccaccatgcccggcccacgcccggcctcttttttaaaatacagacagtgtctcgccatgttacccaggctggtcttgaactgggctcaagcaatcctcccgcctcggcctccaaagtgctaggattgatgacaggcaagagccaatgcacctggcccctttaaaacttttttttttgaggcagagtttcactcttgttgcccaggctggagtgcaatggcacgatcttggctcactgcaacctccgcctctcaggttcaagggattctactgcctcagcctcctgagtaggtgggattacaggcgcctgccaccacgcccggctaatttttttgtatttttagtagagacggggttttaccataatggccaggctggtctcaaactcttgacctcaggttatccgcctgcctccgcctcccaaagtgcggggattacaggcgtgagccaccatgcccggtcccctataaaacttttaatgtctggataatattttactgaatgaatgtctcctgctttgcttgccaattccctatcgatggatatttaggttgttttcaacttttcacatcattacaaacaatctcatgttcattttttaacataacaacgtttatttatttggaatacatttttgttagtggaattgctgggtcattgacaaattgtctaggtctaattaaacatgttcatactgtgtaccaagaggagatgtagcgtggatggcaccaaagtcagggaagtctttccggctcctggtctgctggtctgcccttttgaaggccttggagtgttacagccataccctggcctttcccaggcttttctttccctggcacggatgcagtgtgtgcggtcagagctggcgagttcgagacttgtccgaaccatccacccgcagccaggccccgctgcagaggctgcggtggccctcccagcccctgggaatctatccccaggtcccctccccgaccgcgggagggcgtgttaggggagcagcttaggcaagcgacgattgcaccatccacgttttgaaaagaaagtccggggagcgcaaggaggaaacttttacaatccaaaggttgagccccagcatccatactcggcccctgcagcgatccttccactcctgctcgctgggttccgatcccttcccttccaccccgtctcggccgaaccctgtgctgggcactggccctttaaggagctgtcacgatggcgtcgctggccccgcccggcggggagggccgagaggcaggggaggggttggtggtggctgcgggcaaggggaaggcggggggggctggggggggggtctgggtctatttttagctccgggtcgggtcacgtgacgggagtgacgtctccgaatgttgttgttggtggcggcggcgagcggagccggaggagccgccgcaaagatggaggagccgtcgaggaggtgctgccgccgctgccgccgccgctgctgccgccgccgcccgcgaagccggagctcgagccgcagcgggtgagcgcgccgccccggcccagatcccatcttccccggaccccgggacgcgaggcggcgccccctcctcctgctgtctctgtccgcgggctcccagcgcgcgcgccgcgctccgcgccccccttccttcctcccggccctgggagccagccggcgccccccgggagcatcggcagcccgtgagcgggacatcggggttgctgcgcgcgcccctccctgcccctcccagacaggggcgccttccctacaggtaagggaggggcccgccttctcgcgccctgcgcccccaaatggctcggagaccggccggggttgtctgatttgccccttccctggcggcgcatgttgcgttgcagagccatttgagccctgcacccggattctgtgcagacccctcttcgctggacacccctttcttggtactctgaggtgaggggtgctgtccacccagagcgcttctccccatagctacgaacgcatccttgattttatgtccttgacttccgtgcatgaggagggggactgcggagtccaccttacttctctctcccattattctcaccccgtctcctgtgaggcgttactgcgtttgttgccaccctcttctcctgtctgacaccttggagccaggatgcgagagctaggagatgaaatggagctcccccccaaccccttcttgtcttgggtggatgccccccatttttcatcctggatctgtatctcatggaagcgggggcactaccagtgccttattaacttggggggagtcagcttctccaccccacccttccctggggccctggggaagatgagaactggctgggtgtaagtaattaatctgggagcttggtgggggctgttgaagtggggaggttgggtgcttcctttgggagaggagatgaccacttgatacccctggctgataccccttctgaaatgaggtgtgtccctaaagaggaaaggtaacagctgcagttgcttttaggagggtgcaaaagggacccatcactcagtcagtgaccaccatgcttttgggatctgggattagatttggagcttggggaggtggtggtgattggtttcagtgtccaactgggaggggaggatggagccagattatgggaacaaaaggaggtgggggggagggtgagatccaggagtcttggtcagagggacccctagccagattgccttgcaggattgcagtctgggtctgggtcctgccttt

SEQ ID NO: 1946 - DNA, 6000 bp, Homo sapiens
ttgagagaaagtcacatggcgggagtacagaaagctaagcaaagagagatgacatgggcagggatcagattacgtagaaactttgggtgtttctttttttttttttcccccaaatatgaggaaaggaccagctgcagtaaaatcccctgaagtggccaggagtggtggctcactcctgtaatcccagcattttgagaggctgagatgggcggatcacttgagcccaggagtataagactagcctaggccgggcacagtggctcatgcctgtaatcccagcactttgggaggccgaggcgggtggatcatgaggtcaagagatcgagaccatcctggccaacatggtgaaaccccgtctctaccaaagaaatacaaaaattagctgggtgtggtggcacgctcctgtagtcccagctactcgggaggctgaggcaggagaattgcttgaacccgggaggcagaggttgcaatgagccgagatcgcaccactgcactccagcctggggaatagagcgagacaaaaaaaaaaaaaaaaaggctgggtgcggtggctcacgcctgtaatcccagcactttgggaggctgaggtgggcagatcatggggtcaggagatcaagaccatcctggctaagatggtgaaaccccgtctctactaaaaatacaaaaaaaattagccgggtgtgggggcgggcgcctgtagtcccagctactcgggagactgaggcaggagaatggcatgaacccgggaggtggagcttgcagtgagctgcgattacaccactgcactccagcctaagcgacagagcaactctgtctcaaaaaaaaaaaaaaaaaaaaaaaaaaagactagccttagcggccgagcacagtggctcatgcctgtaatcccagcactttgggaggctgaggcaggtggatcacgaggtcaggagtttgagaccaaactgagcaacatggtgaaaccctgtctctactgaaaatacagaaattagccgggcgtgttggcctgcacctgtaatcccagctactctggaggctgaggcaggagaatcgcttgaaccctggaggcagaagttgcagtgagccgcggtcatgccactgcactccagcctgtgtgacagaatgagactgcgtctcaaaaaaaaaaaaaaaaaaaaaaaagactagcctgggcaacacagggaaaccccatctctacaaaaaatacaaaaattagctgagtgtggtgacatgcacctatggtcccagctacttggaggctgaggcaggacgatcgctggagcctgggaaatcgaggctgcagtgagctgtgatggcgccactgcactccagccttggtgacatggcgagaccctgcaaaaaaaaaaaaaaaattagctggatgtagtggcacgcacctgtagtgctagctacttggtaggctgagttgggaggatcacttgagcccaggagttcaaggttatagtgagctatgactgtgccactgcactgtagcctgggagatacaatgactctgtctcaaaataaataaataagtaagacaaagtaaagacaaacattctggtatttattcttctaggctttttttgtttcagttttctttttttttttttttagactgagtctctctctgtcaccaggctggagtgcagtggtgtgatctcagctcactgcaacctccacctcctgggttcaagcgattctcctgcctcagcctcccgagtagctgggactacaaggcatgtgccaccacgcccagctaattttttgtatttttagtacagatggggtttcaccctattagccagggtggtctcgatctcctgaccttgtgatccgcccgcctcggcctcccaaagtgttgggattacaggcatgagccaccgcgcccagtcctcctttttttttttttttttagagatggggtctccatatgtagcccaggctgggcttgaactcctgaggtcaatgaatcctcccttttcagcctcccaagtaggtaggactacaggtgtgtgccaccattccaccatgtctggttaggctttttttttttttgagacaggatctcactttgtcacccaggctgggtgcagtggtgtgttcttagttagctcacctctccggctcaagctatcctctcacctcagccccccagcgtgagcacaggtctggcccttggccaggctttttgatatacacatatactcaggcatatgaatctagtttgttgtttttataataatggaacaattcagtaatacttgtttgagtcctgattttcaagaaaacaatatatcacgggcatcttttcaggtcggtatagacctataaaattttttttcttcttttttattttttatttatttatttattttttgagacggagtctggctctgtcgcccaggctggagtgcagtggtgctatcgcagctcactgcaacctctgcctcccaggttcacgccattctcctgcctcagcctcccgagtagctgggactacaggggtccgccaccacgcccggctaattttttttgtatttttagtagagacggggtttcaccatgttagccaggatggtctcgatctcctgaccttgtgatccgcccacctcgacctcccaaagtgctgggattacaggcgtgagccaccgcgcccagcctatttttatttttttttttgagacggaatctcgctctgtcacccgcccaggctggagtgcaatagcccgatctcggctcgctgcaacctccgcctctcggtttcaagtgattgtttcgtctcagcctcctgagaagctgggattacagaagtgcaccaccacgcccgcctaatttttgaatttttagtaaagacggggtttcaccattttggtcaggctcgtctcgaactccagacctcgtgatccgcccgcctcggcctcccaaagtgctgggattacaggcatgagccactgcgcccggctatttttttattttttttgagacggagtctcacactgttgcccaggctggagtgcagtggcgtgatctcggctcactgcaacctctgcctccagggttcacgccattctcctgcctcagcctcccgagtagctgggactacaggcgcccgccactacacccggctaatttttttttgtatttttagtagagagggtttcgccgtgttagcctggatggtctcgatctcctgaccttgtgatcagcccgcctcgccctcccaaagtgctgggattacaggcgtgagccaccgcgcctggcctcttcttcttcttttgtttttgttttttgtttttttgagacggagtctcgctttgttccccaagctggagtgcagtggcgcgatctctgctcactgcaacctccgcctcccgggttcactccattctcctgcctcagcctcccaagtagctgggactacaggcgcccaccaccacgcccggctaattttttgtatttttagtagagacgggtttcactgtgttagccagggtggtctcgacatcctgacctcgtgatccaccagcctcgacctcccaaagtgctgggattacgggcgtgagccaccatgcccggcccacgcccggcctcttttttaaaatacagacagtgtctcgccatgttacccaggctggtcttgaactgggctcaagcaatcctcccgcctcggcctccaaagtgctaggattgatgacaggcaagagccaatgcacctggcccctttaaaacttttttttttgaggcagagtttcactcttgttgcccaggctggagtgcaatggcacgatcttggctcactgcaacctccgcctctcaggttcaagggattctactgcctcagcctcctgagtaggtgggattacaggcgcctgccaccacgcccggctaatttttttgtatttttagtagagacggggttttaccataatggccaggctggtctcaaactcttgacctcaggttatccgcctgcctccgcctcccaaagtgcggggattacaggcgtgagccaccatgcccggtcccctataaaacttttaatgtctggataatattttactgaatgaatgtctcctgctttgcttgccaattccctatcgatggatatttaggttgttttcaacttttcacatcattacaaacaatctcatgttcattttttaacataacaacgtttatttatttggaatacatttttgttagtggaattgctgggtcattgacaaattgtctaggtctaattaaacatgttcatactgtgtaccaagaggagatgtagcgtggatggcaccaaagtcagggaagtctttccggctcctggtctgctggtctgcccttttgaaggccttggagtgttacagccataccctggcctttcccaggcttttctttccctggcacggatgcagtgtgtgcggtcagagctggcgagttcgagacttgtccgaaccatccacccgcagccaggccccgctgcagaggctgcggtggccctcccagcccctgggaatctatccccaggtcccctccccgaccgcgggagggcgtgttaggggagcagcttaggcaagcgacgattgcaccatccacgttttgaaaagaaagtccggggagcgcaaggaggaaacttttacaatccaaaggttgagccccagcatccatactcggcccctgcagcgatccttccactcctgctcgctgggttccgatcccttcccttccaccccgtctcggccgaaccctgtgctgggcactggccctttaaggagctgtcacgatggcgtcgctggccccgcccggcggggagggccgagaggcaggggaggggttggtggtggctgcgggcaaggggaaggcggggggggctggggggggggtctgggtctatttttagctccgggtcgggtcacgtgacgggagtgacgtctccgaatgttgttgttggtggcggcggcgagcggagccggaggagccgccgcaaagatggaggagccgtcgaggaggtgctgccgccgctgccgccgccgctgctgccgccgccgcccgcgaagccggagctcgagccgcagcgggtgagcgcgccgccccggcccagatcccatcttccccggaccccgggacgcgaggcggcgccccctcctcctgctgtctctgtccgcgggctcccagcgcgcgcgccgcgctccgcgccccccttccttcctcccggccctgggagccagccggcgccccccgggagcatcggcagcccgtgagcgggacatcggggttgctgcgcgcgcccctccctgcccctcccagacaggggcgccttccctacaggtaagggaggggcccgccttctcgcgccctgcgcccccaaatggctcggagaccggccggggttgtctgatttgccccttccctggcggcgcatgttgcgttgcagagccatttgagccctgcacccggattctgtgcagacccctcttcgctggacacccctttcttggtactctgaggtgaggggtgctgtccacccagagcgcttctccccatagctacgaacgcatccttgattttatgtccttgacttccgtgcatgaggagggggactgcggagtccaccttacttctctctcccattattctcaccccgtctcctgtgaggcgttactgcgtttgttgccaccctcttctcctgtctgacaccttggagccaggatgcgagagctaggagatgaaatggagctcccccccaaccccttcttgtcttgggtggatgccccccatttttcatcctggatctgtatctcatggaagcgggggcactaccagtgccttattaacttggggggagtcagcttctccaccccacccttccctggggccctggggaagatgagaactggctgggtgtaagtaattaatctgggagcttggtgggggctgttgaagtggggaggttgggtgcttcctttgggagaggagatgaccacttgatacccctggctgata

SEQ ID NO: 1947 - DNA, 6000 bp, Homo sapiens
tgcccggccgccccatctgggatgtgaggagcgcctctgcccggccgccaccccatctgggaagtggggagcgcctctgcccggccgccccgtctgggatgtgaggagtgcctctgcccggccgcaaccccatctgggaagtggggagcgcctctgcccagccgccccatctgggaggtgaggagcgcctctgcccggccgccccatctgggatgtgaggagcgcctctgcccggccaccaccccatctgggaagtggggagcgcctctgcctggccaccccatctgggatgtgaggagcacctctgcccggccacccttcgtctgggaagtgaggagcgcctctgcccggccaccccatctgggaagtgaggagcgcctctgcccggccgccccatctgggaaatgaggagcgcctctgcccggctgccctgtctgggaagtgagaagcgcctctgcctggccgctgtgcaatcttccaagtgtgaagtgacagcctttctgcaggtgtacccaacagctccgaatagacagcgaccatcgagaacgggccatgatgacgatggcagttttgtcaaaaagaaaagggggaaatgtggggaaaagaaagagagataagattgttactgtgtctgtgtagaaagaagtagacatagactccattttgttctgtactaagaaaaattcttctgccttgggatgctgttaatctataaccttacccccaaccccgtgctctctgaaacatgtgctgtgtcaactcagggttaaatggattaagggcagtgcaagatgtgctttgttaaacagatgcttgaaggcagcatgctcgttaagagtcatcaccactgcctaatctcaagtacccagggacacaaacactgcggaaggccggaaggccacggggacttctgcctaggaaaaccagagacctttgttcacgtgtttatctgctgaccttctctccactattatcctatgaccccaccacatccccctctccgagaaacacccaagaatgatcaataaatactaaaaaaaaaaaaaaaaaaaaaaaaaaaaagaaagaaaagaatcattattgggtaaaacatcaaaaaaaaaatttattgaaacaaatgaaaatggaaacacaggccgggtgctgtggctcatgcctgtaatctcagtactttgggaggctgaagtgggcggatcacctgagactgggagtttgagaccagcctgaccaacatggaggaaccctgtctctactaaaaatacaaaattagccaggcatggtggtgcatgcctgtaatcacagctactcaggaggctgaggcaggagaatggcttgaacccgggaggcggaggttgcggtgagccaagatcacgccattgtactcaagcctgggcagcaagagcaaaactccatctcaaaaaaaaaaagaaaaaagaaaagaaaagaaaatggaaacacaacataccaaaatatataggatacaacagaagcagtgctaagacagacattgatagcaataagcacctacatcaaaaaactagaaagttttcaaataaacaacctaacaatgctccgcaaggaactagaaaagcaagaacaaaccaaacccaaaattaggagaaggaaaagaataataacgattacagcatagcaaaacaaaacagagagtgaaaaaaatttaatcaatgaaattagacattgtttgtttcaatggataaacaaaatcaataaactgctagttagactcaacaagaagaaaagagaggagacccaaataaataaaatcagaaataaaaaatgagacattacaactgtttccagagacatacaataattcatcagagactattatgaacaactacacatgaaaaaattggaaaacctagagaaaatggataactggacacatacaacctacaaatattgaaccaggaagaaacagaaaacttgaaaagacccatgacgagtgatgaaattgaattagtgataaaaagtctcccaaaacagaaaagcccaggaacagatggcttcactgctaaattctaccaaacttataaagaagaaataataccaattttctcaaactattccaaaaaaactgaagaggaagaaattcttcctaactcattctataaggccagaattaccctgacaccaaaatcagacaaaaacacaacaaaaaaagaaaacagcaggccaatatccttgatgaacatcgatgcaaaaatcctcaactaaatactagtaaacaaaatccaacagcacatcaaaaggataatacaccatgatcaagtgggatttattccagaaatgcaaagacggttcaacatacataaatcaataaccgcggatacatcacatcagcagaatgaaggacaaaaaccatatgatcatctcaatagatgcagaaaaagcacttgataaaattaaacatccttcgtgataaatattctcaacaaattaggcatagaagaaacatatctcaacataataaactccataaatgacaaacccacagctatcatcatattgaatgggggaatagaggaatgcctttcttctaagaactagaagaaggcaaagatgcccactttcattacttatttatttatttatttatttatttgagatggagttgtgctcttgttgcccaggctggggtgcaatggcgtgatctcggctcacggtaacttctgcctctcggattcaagcatttctcctatctcagcctcccgagtagatgggattacaggcatgcgccaccatgcccggctaattttttttgtacttttagtagaaacggggtttctccatgttggtcaggctggtcttgaactcccgacctcaggagatccgcccaccttggcctcaaagtgctgggattacaggcgtgagccaccgcgcccggcccactttcatcactcttaatccacatagtactgaagtcttagccagagcaaccaggcaagagaaagaaataaaaggcatccaaattggaaaaaaggaagtcaggccagtgcgaatgtagtgagttatctcaatctcacagtaagttacagattgaactccttgttctactctttccccacttctcactactgcacttgagtagtcttaaaaaaaaaaaaaatcaaattgccccctttgaagatgacatgatacctagtatatagaaaaatctaaagatttcaccaaaaatctcttataactgatacattcagtaaagttgcaggataaaaaatcattatacaaaaactagcatttctgtacaccaataaggaattagctgaaagagaaatcaagaaagcaaccctactacctaggaaaaaatttaatcaaggaggaaaaagacctctacaataaaaactacaaaacactgatgaaagaaactgaagaggacacaaacaaatggaaagacatctcgtgttcatggattggtggattggaagaattaatattgttaaaaatgaccatactttttttttttttttttttttttttgagacaaggtctcgctctgtcacccaggctgcagtgcagtggcacagtcacagctcactgcaaccttgacctcccaggctcaagcaatcctcccaccttggctcccgaataggtggaactacaggtacatgccaccacatccaggtactttttatttttatttttgtagagacagggtttcaatttgttgcccaggctagtctcaaactcctaggctaaagcaatcctctgtccttggcctcccgaagtgctgggattacaggcgtgaccaccacgcccagccctcacgttcttattcctatgtgggggctaaaagagttgatcttatagaggtaaaaactagaatgagagctgagcgcggtggctcatgcctgtaatcccaccactttgggaggccgaggcgggtggatcacctaggtcgggagttcgagaccagcctgaccaacatggagaaaccccgtctctacaaaaataaaaaattagccgggtgtggtggtgcatgcctgtaatctcagctattctgggagggtgaggcaggagaatcgcttgaacccgggaggcggaggttgcggtgagccgagatcgcgccactgcactccagcctgggcaacaaaagcgaaactccatctcaaaaacaaacaacaaaacaaaacaaaaacaagaaaataaacacacacgcacacggaggtggggcggcggagtggcggcagggaggaggaggggagaggtaagaaacaaatgataaaacaaatgaagcaaattgttaacaataggtgaatctgagccaaagtttaacgtgcgttcttttgccctattcttgcaacttttccaaataaaacgtttctctaaaatcatgtctaggggacctggattccaagccgagccccttttctcactcggtgcatgaccctgaatgaattccttcctctcggttggtctcagtttttcagcacagatggttctctctgggtctggtaatcaacgtctcacaactctgaggacgtttgcagacagggctttggaaggaagacggcccttcgtttcccccaaagggtctcagcctgccggtgatttcaccacgacttcctccagagttccacctgtcctcttcatcagccatgaacttgcccctactaatttttgccaccagctggacgcccacctcctctttcccggagccctaaggctctccttgcggcagtcttagcctctgtacaggataggcacgtgcatttagccccagaaaactacagcccccaaaaggctttgcggcaacatcctcgcgttgatcaccaaagagaaaacgcttttctccgcgggcccgccgctgcatagccttttgggagttgtagttcatctgctaagagccgcagaaccagggtgaggttctaagccacccttcccagaactcacagcgctcttccacaccaataggaagcgtggatcttggaaagcgggcggggcagaggagctcatgcgcagtatgtgtggttggggaattcatgtggaggtcagagtggaagcaggtgagaatggagggggcggcaaaggctcgtttctgggcatctctgcagtcctcctctgctccatgatgtgcactttgggcgaggagagtgcgtgcgtgagtccgacttgtgagggaggggagaaggggctgagcccgggacgagccaggggttgctcagagtaagggaggtgtccatggaggcagggtgaggaataatccagaagctattacaaatgtaaagggccgggtgtcccagcctcagagaaggaagatttaaatgcactggacgagatcagggtagtctcaggagttgaggtctgggaagtagggagggaggatttgagactggagcgggcaacgacggtggggcggagcgttagaaagttacatgctggcgtgatttctagttaggtcaactgtgcttatgcccaccccgcctcagccccaccctcccagttattccagagctcactgtccctgtgcagctagttagagcctttctcccaaatgggttcttcagttatcttggccccaggatgtcatccagctcctgcttccataagaagcatgtcgttcttaatacacgatgttgacaagcagtatggtgaggaggtaagctgtgtctgctagcattagacctctgggttctaattctggttctaccacttaataactgcaatctcggcttctcatgtaacctctctgtgtgcctctgtttcctctgtagtaatatgcttcatagggtaattgtgagaagtaaataaattgcttttattaggctacctgatataagtgttagctgttacggttactttttttgttggcatcaacatgtagcacattttttaagttatttttttcaaaccataattgcaccaatctaacctcacagcctctttttgggggcctacttgtccaggaaatgagagggtggtttagtgtggtgctaagttctctgtggatttcaagcccatgcattgttttcattattg

SEQ ID NO: 1948 - DNA, 6000 bp, Homo sapiens
cctcctcatctataaaatgaggtcgtaatagcaccaacaccacaggatcgttgtgggattaaatgagataacacacgtcaagtctttagcacaatgtgtgacataataggagctcaataaaaagtcaaagtaggctgagcgcagtggctcatgcctgtaatctcagcactttgggaggccaaggcagactgcttcagccaggagttagagaccagcctgggcaacatggcgaaaacctatctctacaaacaatacaaaaattagccaggtgtggtagcgcacaccagtgatcccagctacttgggtggctgaggtgggacgatcatttgggccagggtaggtcgaggctgcagtgagccgtgattgtgccactgcactccactccagcctgagtaacagaatgagaccatgtgtcaaaagaaaaaaaagtcagtatattagctgtgataccgaagcatgctaagttctgctctaggtgtctctatgtttgtgctgtcccacatatgtctgctatatataggcccattgataagtacagaccacccagaagtacacacactgacacagcagcctggccccaggcacatagtacccacagaccccctcacccagacacatagagacacccactctacacagacacagtcacagagacaatggacctgtgcttcacattacactcgaggctatcagcctggatatgcagacccactctgcacccatctgctctgaaacacacaggcatggccatcgatcagaccacctggtctaggaagagtgtcacagggcatgcatattctcatctgggcaagtaacacagaggtgctgatgccgaccccagatggagacacgtggcacacacacacacacacacacacacacacacacacacacacacgtagtatacacagatgcttacacaagcatgtcaggtgccagcaccctcacaggcatgcagatatacagacttcatattaaaagtctgtatggggcctctgctgggacctagactataggagtcccagtacctatggggcttctgccgtggtggggagagacagatctataggggtcttgcagacatgggagtgtgtgtaccctcccacatgggggtatgcaggagaggaggccagggtttggatggctggggcagaagcaggggcattcctggcagggagaggagctccatggagcttggagtctggctttgaggggaggccagtcaggaggtggcagcatgcctgtcggggagaggtggaggcagggctggactgccaggatgggctctggcttgcagtatcctgcctcccctctaaagactctggccttggtcctacagatagcatggggtatgtggccattgggatttttcggaaagccactgcctacaaagtgggagggcatgaaagtgggcagtgctgggaggcaggcaaactggttaggggcccagacagtgtcctggcaggggtaggccaggactgctcagagtataggcagagggtctggaaaggaagggtaggtgagcgctgcatttccggggtcagagtgacaggccatgttcctgaggtgtatgcagagtatgaaagggaggggcacgccaaaggtctgttagtgcattctacttacagacatcctctgggtaccttctagatgtccagtattgttctcatcaccatgatgggcaaagccatagttgatcgttgttcttgtgcatctgcaaaccagtgactgtgtcatcatcacacgctggcatggggctctgtaggagagaacaggcttactgagctgctaaagcaggaggaacctgattcgggtggaggtgggagtagggctgtgctgttggagggagctgtgggggcttttttggagaagtgacacacagcagagagctgaagggtgagctagagggaaataactaggcaagcaggagggtagatgggggacattccaggcagaggggacagcacacgtaaaggccctgtggcaagtctgaggatctgcaggaaggcctgtgtggctgggggacagagagcaagggatgtttgcagcaaatactggcctgagactgagtgccaacatggctatgaggttgtggcgccttttaacagagcaagtcaggaaaggaggcataggtttgtgcagctgcgggggcctggtctggggcatggtacctgggaggagctgggagctaaagctgggagttgggagcaagggtgggctgggacttgagatttgcagctcagagtgcacagaggtagtgtgggagatgggccggtgccccagggcagtgagtatagagagaacagaggatccggaactgagctgtgggggactggaggtctgcgctggggtcacctggaagctgggagagaaccaggattgttcaggaagccacaagtgcagagactggcgagcagggctggggctgcagagaggggacagagagtaatggtgaccctcatctgcccttttacttcacatgtactgtctcactggagcttttgtgagattgggaggcacatatcactgccattttacagatgggataactgaggcttgggacattagttgcattgcgccaagtcagagtatcagtgactaaccgaagcctccagcctccctgcgagtggggtgcagtgacagggagtctggtgggagctctgaggctgagctctacttctttcctctctgggtttcagttctcaggctcagccaaagagggttagtagttggggtgcaatggactccacaacggtaggaatcccctggcgactctggccccagtgctaggatgggggtaccctttggctcctgctggcccccaccaacccagggccgtgcctttctctctcagctgcagagcctggagcaggagaaggggcgctggcgggtggagaaggcgcagttggagcagagtgtggaggagaacaaggagcgcatggagaaactggaaggctactggggtgaggcccagagcctgtgccaggctgtggacgagcacctgcgggagactcaggcgcagtaccaggccctggagcgcaagtacagcaaggccaagcgcctcatcaaggactaccagcagaagtacgtggctgggggctgggcgggctgggcccagggagcattgagaggcttttggggacagtccctccccatccctccagctgagtagggaggcacagaagttggagggccccatggtggggacacccggtccggaatgaccaggcatcagagccagcacagagccagacccccagaggctttgggaaaacctggggcctcctgacctgagaacagggaaggacagagttgcccaggtaaagctgaggacctgggtcaccctggatgaaagccagaccacacacccttacctgccatctgtcccttgcctgtgcccagggagatcgagttcctgaaaaaggagactgcacagcgtcgggttctggaggagtcggagctggccagaaaggaggagatggacaagctcctggacaaggtgggcctggggcgccctgtgggcagggcccagtggagggagcagcattgaagcccctaccctgtgggtcctggagggaggggatgccatgtcctcaccggggggcggaaggggctgggatcatgcctggtgtccagacctgaccccctaccctcctttgttttccagatctcagaactggaaggaaacttgcaaacactgaggaattccaattctacttaacaggaatcattccatgactggacaataattaacccccctcccattgttcctccctcccctgtcctcaacaccccacccctcccccttccagcctggggacaggtgccccgactccccccacccctccaccccacctcccccagcttcagggaccagagggctcatatcacaggcccccttaagatggcctgggcagacagaggtggctagaagggcagcctctttcttgccccatggggctgaggcacagaggccgagggctgccgagggctggcctggtggtcgacggacacaagcacctgcagatcaaactgccagactttacacactccagcttttgtctctggactggaacggggctggggctctcccagcatctgccaactgggggctgctccctgcccatggggcacctgggtggcccctgggcctcttgacttgagattctaccttctcggcccttccctctccccccatcattgtgccgtctctgttgcattctgaccctcccgcctggggggtgggggcgttgcctcaacacctcccccatccctgttccctgtcctgggagggatagagtccaccccagagcccggaggctgggcctggccctggccctgcactgatttctcatgtgtccttcgggaaaagggggagtgagagtgggaaaaagggagagttcaggacacctggtccccagctccccattgcctggggcagcagccctcaatttctccttgtgcctcccctcttccaggtgccaaatagccataacctcgtcttggaactgttatgtggcctctctggggtccaggtttcctggtcaagcctgggaatgccagggaggaaagggggtctggctacagcgaccctggtcttaggcaaggggaacatttctccctggagagtcaggtcctatcctgtgctgccctgtctgcccagcccagggcgatgcctggaagcctactgacattgcagggagtcagcctcgcccccaccccctactggttttccaatgttttgactggagggcaaaattttactactactcatctttttggagaccagggctgccctgctggcagcctgccttctaagtgaaatcgactctgtttccccactttaaccccaaattggggcttggaccaagggaggtgagaccacctcccccaggtcccctcccctttcaaaatccatctcattttgccacttcatgcccctgccctaactgggtttttgttcattttttaaaaacagaccacccatcccatccgttttggcttcttgtcccctgtaaatagaccatgacttcgatcagtatttcttgtccccaccccttcctatccccagatgtgcccccatcccctgaaggagctggctgtctcagtcctgggctcgcgcacttcaccccggcagatggagggggcggaaccgggtgggcggggccgcttcgggctgcttgggccagcggccacccctgcccagccgtcgggagggccgcatctctgtatataatatatatatgtatgtattgttcccggttttgtacggaccatgccctctgtcaggtcgtccccataaaagcagcccccagagccttgctgcctggtttcttgattcactgaggtggggagtgggcagggatcaaggatgccaggctgccccagtggtcccctcccaccagtgctgcctctaaccctgaggaacttcctacagtgtccccccgtttccggttccagcaaactgcttttctgcccccattccagccatcagcacccatgctttttgtccagtcctcctgggcagggctgagggtttctagagagtttgtttagtctgcattcgtttttcagggcctctaagaagttcaaaggatgggctaaatacagcaaggtgaaccccaagtccctcccccagaaggcctttaaactgtggggacactctcaagaggcacccggtgtgaggcaggtaaaggatcaaaggattgctgggggtgggaggtgactgcctggcagtttagtacccagggtcctagaggatctgtttgccctttggggcgggccaagtggcctgaaatagccccagcccctgtgctgggccagcaggcctgtgtgctgactcaccagctcaaatgctaatgggtctgggagtctaggtgccagagttccagggacaagctttggtgaagtcccagaggggtgagagccagcagggaatggggcaggagcttatggcaggccccagggccagcctttccttgccggggtgctggtgtgcag

SEQ ID NO: 1949 - DNA, 6000 bp, Homo sapiens
ccttctcaggcacccactgcacaagatctggagggcagatgaaacataggaaccatcgaaacacagaaatgtgtattattagcagtgagagcaggcagtagagttttttgaatctgctgatgacaaaatatattgcctaatctttctgattattttttttttctttgacctccctgcatatctctggagctcccacagctacgggctgtctgccttgcaaaatacatatttacaggccctctaagcccagctaaatataggctttcttttaaagcaactgatgatttggagaaatctttcctctgtccaaccccttcccccgccccccaacacacacacacaccctgactcctcctaccaagtctccctccctagtctccaagatgtatctgaactttccaagagccactggagcaagtgtggagagtgatagaaagaaactgggtacagcagagggaaccagcagcaaggcagtctcctagctgtgagaggaccctaagggacccctctccctgcagggacaatgaggggcttgaggcacccacaggcaggagtgaaaaaccctttgggaagtagagaagagaggtcatcccaagaatgacccccaaagatttggagaagctgtaagcaaggggtgtttatatttcagaatttcacatattgaaccttaaagaaaatgagagccccaaagtcctgtgaagacacacagagagatgcaaacaccgagtttcattctcagccacacctgcccacatgtgcatgcaggcacacacccccacatgtgcttggataccctgcaatcagtaacagccaacactctgagcccccttttagtgccttatgcattgaggacccatttattcctcacaaaaactctatgaagttggtatattatcttcatcttatagatgaaggaatttgttgaagccccttagctggggagtgggaggttggagattctaacagagatggcctggcttcaaggcctgtgctgcatgcacaaaagtgagggacacctagggttatctatgctcaggaaacactcagacactcaagctaagctttttgaggaaacaggctttgggaggggacacgactagcccacggtcatccagcaaatgagtgcagctaggactcaattcaggcctcatgaaccctagcctggtctgtttcctttaaaactaggtatgtcacttctcagctttcgtcattctccctgtgaagaggtcagccaagggccactaaaggcccctccaacactgacatcctggatttgaggtgtacacacacctttccagcatacctttccagcatcctataaccagcccaaatccctggcagaggtcaactcttgaaggagagcaactgggtggggaccactggctcaccacaaaaggatccaagtgcagggtctgggccagcctctgcttagatgaccgtggccaaggaaaaaccgcttttagaagctgagtctcaaggccccagggctggaaagagaagccagccttggcacccagcccgggcctgcgcccagggcgctgagggctcgggacttatcgctcgtcaggcctctccctgccttcatcactatctttgcagttacacctggtgtttaaaactagcaagccttggggaagagtcctaacagagcatcttcccaagggccctaagcagatttgggggggtgtgggaaagctgtggcaggggggcggttaccaggaggagagttgggggtgaattatctctgcctatcgcagcctctggcctttttagcacaggctgggaaaggcgtctcctcccccacaccctatcttctgtgtccgagccactctcgtcctttctgggccttctttcatcctcccagggcacagaggaggataagtgacttgtccaaggtcacacagccagtaagcagtgaagccaagatttgaaccctagcagcctggctcctaggtcaaccactctatgccaaggcaaaggtaaggaaggaacttccatccaaagaccactgggcaacttggccatcaaagtctcttccatgaagacaaaggaaagagaaagggtggttaaattatcctggagtgcttcctcactggaggatgtaggtgaagatgacagcccaatgaatgaaaattctatttaaagccttcagtttggatggtaaccctcccaaaccctccttgttcctatcaggtgcgattactgctccagacaggcagagaagggatggagggaatgagaccccattcttcacccatctcacaggccagccggcttggtgcctgacaccagagaacaagtgatggtgaagcacttaccgctccataaaagcgtctttgggaattctggccagggtgttgctctgctaaccaggagcccatgaaataataatcccactgattagcctcagtcccccaagctctggctagctccaccctcttgaagcccaaaccccctagaagggtctgttaaaggggtttgtccggagattcataatcctttggacaagggagacccaagagcacccctgtaattccagtttgctctaagctgctaccggaaatgctgggagtccgagggtctctgggcctggtagctggttctcagctccttctcccaccctcagaaactgggggcttccccacctggccagacgcgtgggcacagaccccttgggctgggaccagttaagatgatctaccaccaagggtgtgggagattctgggcagaacacaggggcctgcgccctcctccaatccacacaagagcttctgagtacattgtacaaacttccaaaccccaactgggtgaggtttctgtcttctccggacttctatattggggttggggggcctgtggggaggggttttcaagacccaatcttgagtttggaaatctaagtcccaaagcttgctcctgacagaggccttctaagaagggttaggagacagacttcttcaccctgcaccatcccaaagtgcaaaactggggaggggtaagtttcctgggcaactgggcaaagatgcaggtggcatttggaaagtgtgaggtctgggttcacttccggctctagctcacaacctagatcttccctcttccttagcaccagcctcaggatcagtcctgcggttcctggcccctcccgatcccaatatccagggttcccaggcggcttccccacaccccatcccccacgctgtactctaagctcttttgcacatggtaacgcgttaatatcccacaaaacccacacacacccctgcagtggagtggtaggagggctccctttgccagcccttccaggccaggggggagagagtgggagattaggaaaaggaggaagaggatggaggggaagagggcgggggaggaggcagaggccgcagaaaggcctgagatgcaggaagcagctgggagtggggggaggctttgtgcctgagttgttctctgggtcctagggcccattgtgttcaccagtttctgggatgtgtggaatgaaccagctcacctggacctgtccagagggcggactctcacacccagggcccaggcagcgccagcaccctagctgtgtatgcggggggtgcagagggcatcaaacagctttctgggttgccaggacaggggatgtgtaagtcactgtcaccctccccacccccccaccccaaccggaacacagtggccaggatcctttaaatcagagacccaagttagagctctcactggcgaaactttggccccaggcctctcgaattcctgctcccaaacccttccttccggtttgagaggcaggagtgccagggtaggggcctgaagacgggtgcacagcagacaggcgacaggacatcctttccagacttcggcagttttggtgatcccctgctacttggatgacggggttcacctcctttcttcaccacccctcccccaccatcgaaaggtcaccagcgctggaccaaggtttcacacctccaagggggccaaagattgcctgtagtgaagtgttaaaatgcagattcctgggttcagcctcggagattctccttcacaaggttcgagagagatcccagaaatctgcatttttaccaagtgcccagcgattctgatgctaaaggcttgaagcacaccgaagagctagctccgaggacactgaagaatgaacctctgcccctccctacaaaccccctcccctcacactgagaccatcgtggatgtactgcctccccccaatatttcatggaggtgcggttctgtgggttgtgaccgcagtcagaagttgtgatggaagcaggttgaagagtgctggccaacgtccgggggcagcggaaggctctccgcgagggctggggaggggaggggatccgttcgggtggaggggaaggggagggctcacaggctccggccccggaaatccgatccctttaggacccagaggtgccagtcccccagcggcggctgcgagaagggcagccgctcggtctccggcagccgccgctcgggcaaagccagagaaagaccgaggctcggggcacgggggggagggagggagggagggaggcgcggcggcggagcggcccgggccggcggagcagccatgggcgttggggtgccgggccccccgagagccgaggcctccggccggactgggggacgcccgggctgccagccccgctgacaccgtctcggacgatgtgagccggcgacaccgcggctgcttcgcgggcagggcgcgcgctcccaccggccccagacgccgctttgctaatttgggtgggggcgaccgtaccaggccgctcgggcttttgaagcggggctggctgtcttcggcagcttgattgggggaggcgacccacacacagggcgcttggagattttttttttttcatttttttttttaaagcgggattaactgtttttggcagcttggttttggggggaccctaaaaaaggccttcggggtttcttttatcggggggagggggcggtggtcccgacttggccagccgcctgttgaagcgggggagcggggagcaggggcatgcgaacccggctccccccaccatgatgaagacggagccacgggggcccgggggtcccctccggagcgcctccccgcaccgcagcgcctacgaggcgggcatccaggcgctgaagccgcccgacgcgcccgggcccgacgaggcacccaagggggcccaccacaagaaatatggctccaacgtccaccgcatcaaaagtatgttcctgcagatgggcacgacggcggggccctcgggcgaggcgggcggcggcgcgggcctggccgaggccccacgggcgtccgagcgcggcgtgcgcctgtcgctgccgcgggccagcagcctgaacgagaacgtggaccacagcgccctgctgaagctgggcaccagcgtgtcggagcgcgtgagccgcttcgactccaagcccgcgccctccgcgcagcctgcgccgccgccgcacccgccgtcccggctgcaggagacgcggaagctgttcgaacggagcgccccagcgcgcaggcggcgacaaggagcgcggcgcggcggctgctgaggcaggagcgcgccggcctgcaggaccggaagctggacgtcgtggtgcgcttcaacggcagcaccgaggcgctggacaagctggacgctgacgccgtgtcccccacggtcagccagctcagcgccgtcttcgagaaggccgactcgaggaccggcctccaccgcgggcccgggctccccagggccgcaggggttccccaggtcaactcgaagctggtcagcaagcggtcccgggtgttccagcccccgccgccgccgccgcccgccccgtcgggggatgccccggccgagaaagagcgatgccccgcagggcagcagcccccgcagcaccgagtggcccctgcccggccgccccccaagccccgggaggtgcgcaagattaagccggtggaggtggaggagagcggggagtcggaggccgagtcggcgc

SEQ ID NO: 1950 - DNA, 6000 bp, Homo sapiens
tggagtgcgatggtgcgatcatggctcactgcagcctcgaaatcctgggctcaactgatcctcacgcttcagcctcctctgagcagcttggcctacaggcatgtgccaccatgcccagctaattaaaaacattttctttctctttttggagtggcagtattgttaccagaaaggggtcctgatccagatcccaagagagggttctttggcctcgtgcaagaaataatttgaggcaggaaaaaaaaaattcaaggtgaatccataaagtggaagcaagtttattaagaaagtaaaggactaggccgggtgccatgcctcatgcctgtaatcccagcactttgggaggctgaggtgggtggatcacgaggtcaggacatcgagaccatcctggctaatatggtgaaaccccatctctactaaaaacacaaaaattagctgggcgtggtggcgggtgcctgtaatgccagctactcgggaggctgaggcagagaactgcttgaacctggaaggtagaggttgcagtgagccgagatcccgccactgcactccagcctggcaacaaagggagactccgtctgaaaaaaaaaaaaaaaaaaaaagtaaaggaataaaagaatgtctactctacaggcagaggggttatttcttgattatatgctaaacaagggtggattgtttgtgagttttctgggaaagggatgggcaatttcccctctcccccagttgagtgctcctcccctttgtagaccatatagggtaacttctggttgtttccatggcatctgtaaactgtcatggtgctgatgggagtgtcttttagcatgtgaatccattatagttagcatataatgagcagtgagggtgaccagaggtcacttttgttgccatcttggttttggtgggatttgaccggcttctttaccactgtttgatcaccaaggtctttgtaatctgtgtctcatgttgatctttttttttttttttgaggcggaggtttgttctgttgctcaggctggagtgcagtggtgcgatctcagctcgctgcaacctctaccttctgggttcaaacaattctgcctcagcctcccaagtacctgggactacaggcgcgcgccaccacgccgggctaatttttgtatttttagtagagacagagtttcaccacgttggccaggctggtctcgaactcctgatctcaggtaatccacccacctcagcctcccaaagtgctgggattacaggcatgagccaccgtgcccagcccttgtgtcgatcttctatctcatcctgtgactaagaatggctagcctcctgggaatgcagcccagtaggtctaagcctctttttacccagcccctatttaagatggagttgctctggttcgaaagcctctgacagtatcttattatactgtgtaggctggtcttgagctcctggcttcaagagatcctcttgcctcagcctcccaaagtggtgggattacaggtgagagccaccatacctggccctttccctcatctctaattcctggcaaccactaaactagtctatcctctatgtctatacttttgttattaatatttcacaaatgttaaatgcaataatacaatagataactttttatgtttggcttttcttcagtcagcataattcccttgaaatctatccaagggaattatgtatattgcatgtattaatagtttgttatttttttctattgttgagtagcattccacagtatggatgtagcatagtttgtttaaccattcacatgatgaaagacatttgggttgtttccagtttttggttattacaaataaagctgcaatgaacatttgcgcacaggtttttgtgtgaacagagcataagttttcattcctgttggataaacgcccaacagtgcaatggctgggtcatatggtaagcacatgtttagttttttaagaaactatcggccgggcgcggtggctcacgcctgtaatcccagcactttgggaggccgagacgggcggatcacgaggtcaggagatcgagaccatcctggctaacacggtgaaaccccgtctctactaaaaatacaaaaattagccgggcatggtagcgcgcccctgtagtcccagctacacgggaggctgaggcaggagaatggcgtgaacccgggaggcggagcttgcagtgagtcgagatcgcgccactgcactccagcctgggcgacagagcgaaactccgtctcaaaaaaaaaaaaaaaaaaaaaaaaagaaactatcaaactttttcagagtggctgtacaattttatattcctaccagtaatgtggatccagtttctatacctccttaatagcgtttggtgtatcactactttcattttagcattctgataggcatgtagtaatatccgattttggttttagtttgaatttccctggtggctaatgatgttgaacatcttttcatgtgctttcttgcctctgtatatcctgttcaatgaaatgtctattcatgtcttttgcccattttctaattggatttttttaacctgttgagcgttcagagttcttcaaatattcaaaccttcaaatgaagagaaggcctttatctgatatgtggtttggaaatatttccttccactctagcttgttttttcgtcctcttcaaaaggtctttcacaggacaaaggttttaaatttcttttctgcagggcacagtggctcacgcctataatcccagcactctgtgaggccaaggtgggcggatcacctgaggtcaggagtttgagaccagcctggccaacatggtgaaaccccgtctctactaaaaatacaaaaattagccgggcgtggtggtgcacgcctgtagtcccagctactcgggaggctgaggcaggagaatcacttgaacgtgggaggcagaggttgcagtgagctgagatccgccaaggcactccagcctgggtgacagagcaagactgcatctcaataaataaataaacaaataaataaataaaggccgagcacggtggctcatgcctgtaatccctgcactttggtaggccgaggcagatggaacacttgaggtcaggagttcgataccagcctggccagcatagtgaaaacccgtctctactaaaaatacaaaaattagggccaggcgcggtggctcatgcctgtaatctcagcactttgggaggctgaggcgggcggatcacgaggtcaagagtttgagaccaacctggccaacatggtgaaaccccgtctctcctaaaaatacaaaaagtagccgggtgtggtggtgggcacctgtaatcccagctgctcgggaggctggggcaggagattcgcttgaacccgggaggcggaggttgcagtgagccgagatcgcaccactgcactccaccctgggcgacctggcaaggctccgtctcaaaaaaaaaaaaaaaaaaagaaaaagaaaataccgggcgtggtggcagacgcctgtagtcccagctacgcgggaagctgagtcacgagaatcgcttgaacccggatggcggagtttgcaatgaaccgacatcgtgcaactgcgctccggcctgggcgccaaagcgatactcggtctcaaaaagaaaaaaaagaaaacaggagaataatgaaattttacttatttattttatttattttttatttttttgagaccgagtctcgctctgtcacccaggctggagtgccctggcgcaatctcggctcactgcaacctctgcctcccgggttcaagcgattctcctgcctcagcctcccgagtagctgggactacaggcgcctgcaaccacgcccggctcatttttgtatgtttagtagagacggggtttcactatgttgcccgggctggtctcgaattcctgagctcaagtgatcctcccgccgctgctttccagcgtgctgggattacaggcgtgagccaccgcgctcggccaaaagttttaaatttcagtaagttccaatttatcaactttttccctgtatagattggtcttttggtgtcgtctaaaaactatttgcctggccctaggtcctgaggattttttttaactttttttttccccataagtgatttattgttttacatttaaatctatgattcattttgagtaaattttgtataaggtgagaggtttaggttgaggttctttgggtctatattcgtccaattgctccagcatcatttgttgaaacggctcctgattccatttttgtacctttcccccgttcatttccccttagagcagtgggaatgtttttttgttagtgatgatgtcatgccttgtgcaaaatctgtattagcatctcacaacataagatttggctctattctaacggcattttccaccactcgatgtccaccgtaatacttggctctcgaagaatcactgggctggctccctcacttcatgcaggtctattctattatcacttactcagagatttctctggccttttcttcacagcacttacaaaatgcgatctattacatattaatttgcttatttgcttcttgttttcctatactcccatccctcccagaagctccaagagagcatactgttttatccctagggcctagaataatgcgtccacgtagtaggtactcaaaattttttgcttgacaggctagaaaaggtgaataaacacaaagcgggagcgaaaagtctacttctaggtcaggcactctttggacttcacgcaacgtgtgagcgccacctctcgggaagccaatttgctcgcgaacgaaggaagtgagtcagagaacccgggggtggagagaagaaagcaagcagctaaccggaaaggtctgaaaaagctagcgccggaagttaaactgcagaaagttgttccctagaatgactgcctactcccaagaggaagcgtgggcgagcggtgttctgcaaaatgggctctccggcagcggatctgcgcagaagcgttccgtgcgtgcaagtgctgcgaaccacgtgggtcccgggcgcgtttcgggtgctggcggctgcagccggagttcaaacctaagcagctggaagggtaagaggtgttcgggatcctgagaggaaaaagaaaggagtgtagtcgcgggagtgggttaggtgaggagttagtgaagagatgagttcagctctaagaggcggcgaggaggatcggatgggaggaggggcagggagcgcctgtggacaagtgcagaccggtcggcgcacgtcccacgccacgtggactcgcctttgtcggtggccgcctttctcgtcaggccgcgacgacagggctgtgccttatttgtgtctgtcgagagcagtgccgggcacggagttggcgctctgtaagtgcttgctgaataaatgacgggtgtgtgtgtcattcattcagcaagcactgagtgcttactgttgtgtcaccgggaccgatgtggagggacatttttagggtgtatttctggcgctttagtcctgttttctcctggacaatttatgcttgccccgcaccccatcgtgcgattctccgcagtctttgggctttgtctctctctctttttttttttttggaagttgcagaatggtgataaatgattttctttgctcctattgactgctaggccctgtggctaggtaccatagagtctctacacaggactaagtcagcctggtgtgcaggggaggcagacacacaaacagaaaattggactacagtgctaagatgctgtaagaagaggttaactaaaggacaggaagatggggccaagagatggtgctactgtctactttagggatcgtctttcaaggcgaggggcctcctatctcaagctgtgatacagggtaggtcatgagcgcagtcttctgtaaaatgagggatctggacggaatagttactctctaggcttcctttcagtatgatgtcccgtatcagatattcctaatgtctgtagttctcccacaccccaccgtttattggctagtcaaaatattctttgcattgta

SEQ ID NO: 1951 - DNA, 6000 bp, Homo sapiens
acttcacacttggcatttctttttttttttttttttgagacggagtcttgctctgttgcccaggctggagtgcagtggtgccatctcgtctcaccgcaagctccacctcccgggttcacgccattctcctgccttagcctcctgagtagctgggactacaggcgcccgccaccacgcccagctaatcttttcgtatttttagtagagacagggtttcaccatgttagccaggatggtctcgatctcctgacctcgtgatccactcccctcagcctcccaaagggctgggattacaggcgtgagccactgcgccctgcccacacttggcattttaaggaggctgctctggttgctgtatggagaatacattgtagaaaggcaagcatgagggcagggagatcaggatcctcagtgctggaataagtggatatactctataaacatttgttcagtgaatgaatataatcttaaggggcctttttatttttccttttttgaattaatagttgccagattttctgctgtgattggttttcttctttgaccatatcttcttctgtccttggaggtctgggaggggctgaatgtggtgaagacgggccgagtcatgctcggggagaccaaccctgcagactccaagcctgggaccatccgtggagacttctgcatacaagttggcaggtgagattttggtatttttcccccttttccaaaatctgatttagttgccacaaggatttgggtttccgaggctggaggtagacatgataccatatgcaggttgattttatcggagtttattgttttcctccctcttaagttggcgtttggctttggttgttaacatcacttagtcgtacctctgttacacgaagtgtagaacctggtacaacacactttgctggccagtctttcctgaaggctctcactgtttgcaccagcgtggccgggagggctggatgtggggagggcatttttcagccttaagtgaatggccattgtaggctttttcttttaacatggtctaatgtccatggagcttcagcttttatgctgctgtggctgtagatttctggcaatgggcgcattttaatccttctggtcttggtcatgtgactatctctttctccacccaggaacattatacatggcagtgattctgtggagagtgcagagaaggagatcggcttgtggtttcaccctgaggaactggtagattacacgagctgtgctcagaactggatctatgaatgacaggagggcagaccacattgcttttcacatccatttcccctccttcccatgggcagaggaccaggctgtaggaaatctagttatttacaggaacttcatcataatttggagggaagctcttggagctgtgagttctccctgtacagtgttaccatccccgaccatctgattaaaatgcttcctcccagcataggattcattgagttggttacttcatattgttgcattgcttttttttccttcttttcatgtacactgaataacctgacctaatagagagtgtaaatactataaaaatgatttattttgaggtctcacatacacacaggcattctttgcctgcccttcttaacccccgcatcccttccactcttggcactgagctattcaacaggcatctatggagcatgtgctacgtggccaagactggactaggtgcagaggattcatcagaaatgaaagaaaacatgagggctgggtgtgctggcttgtgcttgtgataccagctacttgggaggctgagatgggagaccagcctgggtaacatagcaagaccctgtctcactaaaaaaaaaaaaagaaaaattaggctgggtacgatggctcatgcctttaatcccagctattcaggaggctgaggaggagaatcgctagaggccagaagttcaagtccagggtgggcaacatagcaagacgctgtctttacaaaaaaaaaaaaaaaaaattagctctggtgctgtgcacctctagtcctagctattgggaaggcataggcaggaggattgtgcccaggagtccaaggctgcagtgaaccatgatcatgctactgtccttcagcctgggtgacagagtgagacatctcttaaataaaaacatatccatcctgttcttgagaagctcttggggattcagtgaatgggggagtgtgggaagttgtaattcctccaaaaatcagaaaagctaggtagatagtaagcctgagtccctgggatggcctcaaatgaagcaggaggtcttgtaagtagctttgatttgttaggtattgatttggttgctttaatggagacaagatagaaatgtacttctctttcatttgaaagttcaagtgtggtcagttgcagtggctcatgcctataatcccagcactttgggaggccaaggcaagaggattgcttgagcccaggagtttgagaccagcctggggaacagagtgagacctcatctctgccaaacattaaaaattagtcgggtgtggtggcacattcctgtagtcctagctactcaggaggctgaggtaggaggattgcttgagccccggaggttggagcagtgagctgtgatcccgcctctgcacttcagcccgggtgacagagtgagacctgtcttcaaaaaagaaaaagccctagctgctcagtaggggtggtgatagtggtaaggctctgatctttaaggtggtctacacacacctggttccttctaatcagtcctacttggattaccaccccatgtcccttcctgcaagttgggaaggaaagtggaagaagtaacccttttaaagacacaactctgaattacaaccttcacttcctctcacatcccactggctagaacttagtcatatggctgcatctagctgaaagagaaattagaatttttttttttgcttttgagatagggtcttgctctgtcgcctaggatggagtgcagtggtgtgatgacagcagctcactgcagcctcgacctctctgggcccaagtgatctcctatcttagcctcctgagtaactggggctacaggcacgtgccaccacgcccaactaatttttgtattttctgtagagatggggtttcatcatgtttcccaggctggtctccaactgctgggctcaagcgatctgcctgcctgggcctcccaaagtgctgagattataggcgtgagccactgcgcccaccctgagggtttttcttttttctttttccttttttttttgagacaaagtctcgctcttgtcgcccaggctggagtataatggtgcgatctcggctaactgcaacctccgcctcccgggttcaagcgattctcctgtctcagcctcctgagtagctgggattacaggtgtgtgccaccactcccggctattttttgtatttttagtagagacaggttttcaccatgttggccaggctggtctcgaacttctcacctcagatgatccacctgcctcaggctcccaaagtgctgggattacaggtgtgagccactgcgactggccacctgagggtttttcttatctttccttttcatctggcttcggtagaggcaatagaggggaagagacttctcaggatgggggagaagagggtagttggggtgggctgcctttacagacagatgatggcgagatgaatttttttttttaatttagtttttttttttttttttttttttgagacagagtcttgctctgtcacccaggcgggaatgcagtggtgcaatctcggctcactgcaagctctgcctcccgggttcacgccattctcctgcctcagcctcctgagtagctgggactacaggtgcccgccaccatgcccagctaatttttttgtatttttagtagacattgggtttcactgtgttagccaggatggtctcgatctcctgacctcgtgatctgcctgccttggcctcccaaagtgctgggattacaggtgtgagccaccgcacctggccccctttttttttttttttaatttttgagatggaatctcaatctgttgcccaggctggagtgcagtggcacgatctcagctcactgcaacctctgcttccggggttcaagcgattctcctgcctcagcctcctgagtagctgggattacaggcatgcgccactacgcccggctaatttttgtatttttcttggggacggggtttcaccacgttggtcaggcttgtctcgaactcctgacctcgtgatccacccgcctcggcctctcaaagtgctgggattacaggcgtgagctaccgcatccagcctgaatttctattaatacttttacacaaagcgtggcctgtttgttttggggcgtgagatgagcataccaggacttgggggaatgaacatgtgtgtagtgaagctggagggttacagcctccccagttaaggacagtcttcccaggaaggaaagaagaggtgaaagcagaggggtggtcctgactgtaccctgagtagccatcagtgacctgaccaaggggagcagatagctctcccctggacagagaaaagtccgtgcaatttcgagacctgttttcacagttgacatttggtaatccaaatgagagtgtgtttcagatcgaagccaaaaaataacagtgcccccagatgagggcacatgacagtcattgtcaatgtgtggtgggctaatgctctgtaactagaagtttggaaagccgataaggtataacagaggccagattgtcatccatctggccagtgacaggtgatcagcgcagtgctaggggcactcgggtgatggcatgattgctgtggtcagctcagagtcctgaggggaagcaagcgggctctcaccatctcagggcagtaccactgctgtgcggctgtcagtcagtgctgcaggcgccgagaggaggggcttgtgaccgccccagggaagctgggcatcaccaaagggagcttgtttgccagggacactgcaagtaggaagtgtctacaggtcgatgacaggcctaatctctatgacagggtctagactttcctcagggtccaggggcgcacctcagggtgaactggaaaactcgaccgcactttagtgccaggtgggcagggatccccatgtcagggtgggagtggggcggctgattggggctggaaatgtaggtggggaggcggcagccagggagcagggcatcctgcgagaagagcatcccgctaaggagtctgaacgccatcctgtaggcgggggagtcatcaaggcagggcagaggcaggaccagatggccgtttgaggtgctgagcaaagctcccggtttgcgcggagaggtgagatcgaggccccttgggaggccgaggcttaaccagggctcaagcagaggggagggaaggctggatttcagaggtagggaggataaggaccgtgggtgcacgacggggagggagagccaagtcaaggttaatgccggtgctcgggcggatggtgaaagcagcagatggccttgaccggggtagagaactcgagcacaggagcaggttctgtgtgtgtgtgtgtgtgtgtgtgtgtgtaggagcttttggggtcacgggaagtactgagaggtgaggagtgggatttgggacgtgcgtagttgaactcataggacgtccaggtggagaaggaatcacttcctgtctctggatccgtctcgatctctgcctggcgagggcgcgccccggctgggcgtggacactgttctccggccgcgtcgggccgggcgggtggggcgttcctgcgggttgggcggctgggccctccggggtgtggccaccccgcgctccgccctgcgcccctcctccgccgccggctcccgggtgtggtggtcgcaccagctctctgctctcccagcgcagcgccgccgcccggcccctccagcttcccggtaaggcggtgggggcgcatcccctggcgactcctcccgttccctcttccgcttgcgctgccgcaggtgggcccggtctgtgggcgccccccga

SEQ ID NO: 1952 - DNA, 6000 bp, Homo sapiens
ctctttctccacccaggaacattatacatggcagtgattctgtggagagtgcagagaaggagatcggcttgtggtttcaccctgaggaactggtagattacacgagctgtgctcagaactggatctatgaatgacaggagggcagaccacattgcttttcacatccatttcccctccttcccatgggcagaggaccaggctgtaggaaatctagttatttacaggaacttcatcataatttggagggaagctcttggagctgtgagttctccctgtacagtgttaccatccccgaccatctgattaaaatgcttcctcccagcataggattcattgagttggttacttcatattgttgcattgcttttttttccttcttttcatgtacactgaataacctgacctaatagagagtgtaaatactataaaaatgatttattttgaggtctcacatacacacaggcattctttgcctgcccttcttaacccccgcatcccttccactcttggcactgagctattcaacaggcatctatggagcatgtgctacgtggccaagactggactaggtgcagaggattcatcagaaatgaaagaaaacatgagggctgggtgtgctggcttgtgcttgtgataccagctacttgggaggctgagatgggagaccagcctgggtaacatagcaagaccctgtctcactaaaaaaaaaaaaagaaaaattaggctgggtacgatggctcatgcctttaatcccagctattcaggaggctgaggaggagaatcgctagaggccagaagttcaagtccagggtgggcaacatagcaagacgctgtctttacaaaaaaaaaaaaaaaaaattagctctggtgctgtgcacctctagtcctagctattgggaaggcataggcaggaggattgtgcccaggagtccaaggctgcagtgaaccatgatcatgctactgtccttcagcctgggtgacagagtgagacatctcttaaataaaaacatatccatcctgttcttgagaagctcttggggattcagtgaatgggggagtgtgggaagttgtaattcctccaaaaatcagaaaagctaggtagatagtaagcctgagtccctgggatggcctcaaatgaagcaggaggtcttgtaagtagctttgatttgttaggtattgatttggttgctttaatggagacaagatagaaatgtacttctctttcatttgaaagttcaagtgtggtcagttgcagtggctcatgcctataatcccagcactttgggaggccaaggcaagaggattgcttgagcccaggagtttgagaccagcctggggaacagagtgagacctcatctctgccaaacattaaaaattagtcgggtgtggtggcacattcctgtagtcctagctactcaggaggctgaggtaggaggattgcttgagccccggaggttggagcagtgagctgtgatcccgcctctgcacttcagcccgggtgacagagtgagacctgtcttcaaaaaagaaaaagccctagctgctcagtaggggtggtgatagtggtaaggctctgatctttaaggtggtctacacacacctggttccttctaatcagtcctacttggattaccaccccatgtcccttcctgcaagttgggaaggaaagtggaagaagtaacccttttaaagacacaactctgaattacaaccttcacttcctctcacatcccactggctagaacttagtcatatggctgcatctagctgaaagagaaattagaatttttttttttgcttttgagatagggtcttgctctgtcgcctaggatggagtgcagtggtgtgatgacagcagctcactgcagcctcgacctctctgggcccaagtgatctcctatcttagcctcctgagtaactggggctacaggcacgtgccaccacgcccaactaatttttgtattttctgtagagatggggtttcatcatgtttcccaggctggtctccaactgctgggctcaagcgatctgcctgcctgggcctcccaaagtgctgagattataggcgtgagccactgcgcccaccctgagggtttttcttttttctttttccttttttttttgagacaaagtctcgctcttgtcgcccaggctggagtataatggtgcgatctcggctaactgcaacctccgcctcccgggttcaagcgattctcctgtctcagcctcctgagtagctgggattacaggtgtgtgccaccactcccggctattttttgtatttttagtagagacaggttttcaccatgttggccaggctggtctcgaacttctcacctcagatgatccacctgcctcaggctcccaaagtgctgggattacaggtgtgagccactgcgactggccacctgagggtttttcttatctttccttttcatctggcttcggtagaggcaatagaggggaagagacttctcaggatgggggagaagagggtagttggggtgggctgcctttacagacagatgatggcgagatgaatttttttttttaatttagtttttttttttttttttttttttgagacagagtcttgctctgtcacccaggcgggaatgcagtggtgcaatctcggctcactgcaagctctgcctcccgggttcacgccattctcctgcctcagcctcctgagtagctgggactacaggtgcccgccaccatgcccagctaatttttttgtatttttagtagacattgggtttcactgtgttagccaggatggtctcgatctcctgacctcgtgatctgcctgccttggcctcccaaagtgctgggattacaggtgtgagccaccgcacctggccccctttttttttttttttaatttttgagatggaatctcaatctgttgcccaggctggagtgcagtggcacgatctcagctcactgcaacctctgcttccggggttcaagcgattctcctgcctcagcctcctgagtagctgggattacaggcatgcgccactacgcccggctaatttttgtatttttcttggggacggggtttcaccacgttggtcaggcttgtctcgaactcctgacctcgtgatccacccgcctcggcctctcaaagtgctgggattacaggcgtgagctaccgcatccagcctgaatttctattaatacttttacacaaagcgtggcctgtttgttttggggcgtgagatgagcataccaggacttgggggaatgaacatgtgtgtagtgaagctggagggttacagcctccccagttaaggacagtcttcccaggaaggaaagaagaggtgaaagcagaggggtggtcctgactgtaccctgagtagccatcagtgacctgaccaaggggagcagatagctctcccctggacagagaaaagtccgtgcaatttcgagacctgttttcacagttgacatttggtaatccaaatgagagtgtgtttcagatcgaagccaaaaaataacagtgcccccagatgagggcacatgacagtcattgtcaatgtgtggtgggctaatgctctgtaactagaagtttggaaagccgataaggtataacagaggccagattgtcatccatctggccagtgacaggtgatcagcgcagtgctaggggcactcgggtgatggcatgattgctgtggtcagctcagagtcctgaggggaagcaagcgggctctcaccatctcagggcagtaccactgctgtgcggctgtcagtcagtgctgcaggcgccgagaggaggggcttgtgaccgccccagggaagctgggcatcaccaaagggagcttgtttgccagggacactgcaagtaggaagtgtctacaggtcgatgacaggcctaatctctatgacagggtctagactttcctcagggtccaggggcgcacctcagggtgaactggaaaactcgaccgcactttagtgccaggtgggcagggatccccatgtcagggtgggagtggggcggctgattggggctggaaatgtaggtggggaggcggcagccagggagcagggcatcctgcgagaagagcatcccgctaaggagtctgaacgccatcctgtaggcgggggagtcatcaaggcagggcagaggcaggaccagatggccgtttgaggtgctgagcaaagctcccggtttgcgcggagaggtgagatcgaggccccttgggaggccgaggcttaaccagggctcaagcagaggggagggaaggctggatttcagaggtagggaggataaggaccgtgggtgcacgacggggagggagagccaagtcaaggttaatgccggtgctcgggcggatggtgaaagcagcagatggccttgaccggggtagagaactcgagcacaggagcaggttctgtgtgtgtgtgtgtgtgtgtgtgtgtgtaggagcttttggggtcacgggaagtactgagaggtgaggagtgggatttgggacgtgcgtagttgaactcataggacgtccaggtggagaaggaatcacttcctgtctctggatccgtctcgatctctgcctggcgagggcgcgccccggctgggcgtggacactgttctccggccgcgtcgggccgggcgggtggggcgttcctgcgggttgggcggctgggccctccggggtgtggccaccccgcgctccgccctgcgcccctcctccgccgccggctcccgggtgtggtggtcgcaccagctctctgctctcccagcgcagcgccgccgcccggcccctccagcttcccggtaaggcggtgggggcgcatcccctggcgactcctcccgttccctcttccgcttgcgctgccgcaggtgggcccggtctgtgggcgccccccgatttcccgcaggtcccgcgcggcgtcggagcgggagattcccttgcagcttgcgccccgcgggccttcgggctccgcagagggacgccggccctgcgcggggcggaagcggccgggaagccacgtgtccccgcggccgcgcgtggtgggggaggagggaccggcggcgcccacgtggcctccgcgggccccgccagagcctgcgcccgggccctgaccgcacctctcgccccgcaggaccatggccaacctggagcgcaccttcatcgccatcaagccggacggcgtgcagcgcggcctggtgggcgagatcatcaagcgcttcgagcagaagggattccgcctcgtggccatgaagttcctccgggtaactcgcccccgtctccccttccccgctgcagccggctcgcgggtgtttttccctcccggcggcggtttgtccgcgtctgctttccgagttcatttcgctgccgcgaaatccctttgccctctgcccccgcccacggcggcttgggcccgccgaccctttcccggggtggtggggacagacgcccttgggaaggtgaagcgctggtagcgtgactcgccctccgggtttgggttccttcccgcgggccgctacctgcccacccgccgcaggggggcagcagggagcggaaaaaccccgggccccagaccccctgcgcctgcccactcgggtccacctaggcacagaatggaggcttggaatctcctttgctttagtctgaaactccgagttccagtgcggtgctcctcctttagcatagggtagtgagtgtattttccacattaaatttggggcacagatctgaatccctacacttacgggtaagaatctaagtactgaaattcaaccaggctcatcggtgaagagaatgttctcagttattatctgaaatatttaaaagggcattgtgagtagcccaggggagtttaacatgacctctgccaggcagatgacctgacatatgtacttcagttgcagccaaaatttaattccctaaatctagatcctcaaaccacctactttttaggcttacaaaacccctaatgtcattgacggtatgagggtgtctttacgattagaacagtcttggccag

SEQ ID NO: 1953 - DNA, 6000 bp, Homo sapiens
acttgaagcaacagaccaatttatacccccaaagcatttccttttaaaagcagctatacaactgtaaaagtgcttgatttaaaacattccttgtttcaactgtattatgcttccaagtctggcctccccatcaaaagagtgcttgtaccccaagattgccgaagacataaaacactcctccgcaaattttggaaaatacagtgatactcaaacccactgcagatcaacatcccaactagatatgatgtgttcattatcataggccagctctgctgcattttcttataacactgatttgcaaagcccaaccatgacataacactgcttattaataaaaatccctttatcccacttcaacctcacaactttgtaaaggttttgaacagactgtgtacaggtgagggaatcaaaaggttaagtgacacacccatggacaaagtactcatggatgtggctagaatgcttcccttctccacacctagcattttttgctgtactacacaggaattaccacttatggctcccttgttgtcttgcttaaaattaagtaacctagggaagaagctatgtgtgaaagcttttttttttttttttttgagacggagttttgttcttgttgcccaggctggagtgcagtggcgtgatcttagctcaatgcagcctccacctcccaggttcaagcgattcttctgtctcagcctcctgagtagctaggattacaggcatgcaccaccatgccctaattttttacttttagtagagacggggttcatgttggccaggctccaggctggtctcaaactcctgacttcaggtgatccacccatctcggcctcccaaagtgctgggattacaggcgtaaacccctggcctgaaagcttttatacaatgatatacccagcctgaaagtttttatacaatgataatcaccaactaaaagttcaggccaagtgcggtggctcatgtctgtaatcccagcaccttggggggccgaggcaggcggatcacctgaggtcaggagtttgaaactagcctggccaacgtggtgaaaccatctctactaaaaatacaaaaattagccgggcgtggcagtgtgcacctgtaatcccagctatttgggaggctgcggcaggaggatcgcttgaacccgggaggtgaaggttacagtgagcagagatggcaccactgcactccagctaggcagaaggagactccgtctcaagaaaaaaaaaaaaaaaaaagggcacagattcttctgaaagtaggatacgccatgacgtctgctttaaatggtgttgcataaaagtcatccaccctcctgtccccggacttacctgccaacctgaatgcagaagtccccacgaatggtgcctggctttgaatctgctggattggtctccccaagcatcactcggcctgtcttcaccacgttcagcccctcccagacctcgaaagtgtgaaaatggatttataatcagacctgccactcaggacaggtagggtctaacatttactcctacctgacacgacacatcaatgagaccgatcagtgacatgattatcagctaaccccagcagagagtaggggcctatataaaaactgcattccaaacgtattgctaggattcaaagaaaagtctgtccaacttggggacttcccagtttagctgagacagagataaacaatgttgcagaatccttatgcagccatcaacacagaagaactggtgaagaaaggagaaagtggccagtctggaataggatcagtgggaagggcatcccagaagactgctagaagagggaaaagaaagactaacatgctagggtaaggattccagggaacagcagaaggaagaaaaaggtgaacaggaaatagatctactttctcaacaatttcactgcctccctattttactctctccaattttttttttttttttttttgagacagagtcttgttctgttgcccaggctggagtgcagtggctcagctcactgcaacctcctcctcctcccagtttcaagcaattctcccacctcagcgtcccgagtagctgggattacaggcacacgccaccatgcccagctaatttttgtatttttttagtagagatggggtttcaccatgttggccaggctggtcttgaactcctgaccttgtaatgcacccacctcggcctcccaaagtgctgggattacaggtgtgagccacctcgcccagccactctctcctcatattctctccactcccaaatggacattagcaccatccagaagaaactgcttctagtataggattgagaacttcttacatccttacctttgaatttttcatgagaaaataggataaagttttttaatctaggaaacattaaggtctaaaacacttgtcaaacagaagaaattgagtattatttttttttgagatggagtcttgctgtcgcccaggctggagtgcagtggcatgatctcggctcactgcaacctccgcctcccaagttcaagcgattctcgtgcttcagccccctgagtaactgggattaactcctggcctcaggtgatccacccgcctcagccttccaaagcgctgggattacaggcatgagccaccaagcctggcccgaaaatttaccactcttgcaggcagtgagattctatttaaccatagagacatgtacctgaaaaagtccttcccatatcttttttctttgtcgagacagagtctcgctctgttgcccaggctggagtgcagtggcacgatctcggctcactgcaacctccgcctcccaggttcaagcaattctcctacctcagcctcccaagtagctgagattacagccgtgcaccaccacacccagctaacatccttcccatttctaaggtctgatttgctttctcctcccaagctcctagttgctcagttaagtaacttcagcaggttccattcataaaataaaatttagattagctgagggagatgtctaacaaagaacactgagcactttttcctcattttctctcattccccacgagcactcaccatggccacaaccggccctgagttcatgtacttcaccagcccagggaagaatggtcggtctttcaggtcaatgtagtgctgcttcaggtgttcttcagaggcctggcattggagaggaggcaccagttaggagctaagctggaaagactccaacccatcctctgaacctcccattagcaagtccggttttatattctagcccacgttcctaagtggtgtgtggaaatatatatatatatacacacatatacacacacataaatattttttaaatcccatccaaaccatgaaactaatgccattttaacagaaagactgttctttttttggtgtgttgttttggtttgttttaggagacagggtctcactatcatcacccaggctggaatgcagtggcacaatgatggctcactgcagcctcaacttccagggctcaagtgattttcctacctcagcctcccaagtagctggaactacagatgcactcaaccatgcccaattaatttttatttatttatttatttatttgtagagacaggggcttgctatgtggctcaggctgatctccaactcctgggctccacccacctcggcctcccaaattgctgggattataggcgtgagccccgcgcctggccaagactgttctaatcgtaaagacaccctcataccgtcaatgacattaggggttttgtaagcctaaaaagtaggtggtttgaggatctagatttagggaattaaattttggctgcaactgaagtacatatgtcaggtcatctgcctggcagaggtcatgttaaactcccctgggctactcacaatgcccttttaaatatttcagataataactgagaacattctcttcaccgatgagcctggttgaatttcagtacttagattcttacccgtaagtgtagggattcagatctgtgccccaaatttaatgtggaaaatacactcactaccctatgctaaaggaggagcaccgcactggaactcggagtttcagactaaagcaaaggagattccaagcctccattctgtgcctaggtggacccgagtgggcaggcgcagggggtctggggcccggggtttttccgctccctgctgcccccctgcggcgggtgggcaggtagcggcccgcgggaaggaacccaaacccggagggcgagtcacgctaccagcgcttcaccttcccaagggcgtctgtccccaccaccccgggaaagggtcggcgggcccaagccgccgtgggcgggggcagagggcaaagggatttcgcggcagcgaaatgaactcggaaagcagacgcggacaaaccgccgccgggagggaaaaacacccgcgagccggctgcagcggggaaggggagacgggggcgagttacccggaggaacttcatggccacgaggcggaatcccttctgctcgaagcgcttgatgatctcgcccaccaggccgcgctgcacgccgtccggcttgatggcgatgaaggtgcgctccaggttggccatggtcctgcggggcgagaggtgcggtcagggcccgggcgcaggctctggcggggcccgcggaggccacgtgggcgccgccggtccctcctcccccaccacgcgcggccgcggggacacgtggcttcccggccgcttccgccccgcgcagggccggcgtccctctgcggagcccgaaggcccgcggggcgcaagctgcaagggaatctcccgctccgacgccgcgcgggacctgcgggaaatcggggggcgcccacagaccgggcccacctgcggcagcgcaagcggaagagggaacgggaggagtcgccaggggatgcgcccccaccgccttaccgggaagctggaggggccgggcggcggcgctgcgctgggagagcagagagctggtgcgaccaccacacccgggagccggcggcggaggaggggcgcagggcggagcgcggggtggccacaccccggagggcccagccgcccaacccgcaggaacgccccacccgcccggcccgacgcggccggagaacagtgtccacgcccagccggggcgcgccctcgccaggcagagatcgagacggatccagagacaggaagtgattccttctccacctggacgtcctatgagttcaactacgcacgtcccaaatcccactcctcacctctcagtacttcccgtgaccccaaaagctcctacacacacacacacacacacacacacacagaacctgctcctgtgctcgagttctctaccccggtcaaggccatctgctgctttcaccatccgcccgagcaccggcattaaccttgacttggctctccctccccgtcgtgcacccacggtccttatcctccctacctctgaaatccagccttccctcccctctgcttgagccctggttaagcctcggcctcccaaggggcctcgatctcacctctccgcgcaaaccgggagctttgctcagcacctcaaacggccatctggtcctgcctctgccctgccttgatgactcccccgcctacaggatggcgttcagactccttagcgggatgctcttctcgcaggatgccctgctccctggctgccgcctccccacctacatttccagccccaatcagccgccccactcccaccctgacatggggatccctgcccacctggcactaaagtgcggtcgagttttccagttcaccctgaggtgcgcccctggaccctgaggaaagtctagaccctgtcatagagattaggcctgtcatcgacctgtagacacttcctacttgcagtgtccctggcaaacaagctccctttggtgatgcccagcttccctggggcggtcacaagcccctcctctcggcgcctgcagcactgactgacagccgcacagcagtggtactgccctgagatggtgagagcccgcttgcttcccctcaggactctgagctgaccacagcaatc

SEQ ID NO: 1954 - DNA, 6000 bp, Homo sapiens
cttccacaggagcctgaccagctcagaccctacttagctcagggaatccctcaccaacaccccactcaccaagcatctgccttcccctagctgctgctctgacctttctgagcctctaatgcctctaaagcttctggggcatctgtcccctcggcatctcacctgcttgtcagaggaagagtggcccagctgggcctgggtcacgcctgggttggcctctcctgaggccctccccactgtcctcagccacaggcaaggctacaccgccctgttaaagccactcagcctctcccttctatccttccagcagatgatccctggataatttgtgcagcaaatcctctttaatctgtaatctggggtactgcatgaagggaacctgcctctaacctgccccttcacagctcgggtggaggtggagaatatctgacattcccctttaggaggtgtagtgatcagtaacttgggcatcagccggattcactttgtgaaaaccttgttgaatccctgcggtaactaatggtttctctccaactcatgcagcaactccccctcccttccaaaggcgtctccttctggggatgtcaggtgggccgttcctttttctttgggaactggctcaagcccccgcggtgcttctggagctgagtaaaaaagagccaggtgtccagtgcagcccggggacgaggagctgaggctccccgctctgtcctgggtgactctgcatactctgcgcatccgggggtcgcgggctgcgaggccggcccccagctgggcaccccgacccacttcgcgccggcaccgctagcagctgaggtacaggccccgccccggggccgactcgctccgcccccgccgccgggcccctcccgcagcggtccgcactcggggaggcgggagggtgacggcggtgctgcgaggtcggcgcgcagctccgccgcgggtcgctcgggcgctgtccaggcggagccggccccgcccgggctgcagccatggtaaggcaggcaggcaggcgggcgggcgcggggcagggctggggtgcgcagggccggtcgctcccgggcggctgcaaggggacccgcggcaccgcagccgcggctgtgcagggtgggaggcgccgtcgccggccccgggcacaggctggcactgctgccgggcggcggtgcgtcgctgctcccaagtttttccctctgagcagccacggagtgggcgccaacccctgggtgatgcctgcgctctaggacgaaggggtgggtccgtgctgagggaggtgcccgctggtggagacgcgcttgttgggctggggaaggcgcatcagtaataagcggaggtgagggtccccatcctcgcctgggtcagcttttacctgagtaacccctcctcacccacctaccctgggcacaggggccagtaccaacttcatttggaaaacgcagaggaggcccacaaacactgcctgcctcaccaggagggatggtaagacgcttggcccctccttccctcagcctgacaaggggcagtccctggccctttcccaaagggaccccagagagggggaggcccagcccaccatcctgcccggtgggattagctatatccttctgcccctgggacaggaaccatgggaaagcttcctcctgctgcatctacccgctccctccccaccagccaggtccctctgcagtgtgtgggggtgggggcacccatccctgccacctgcctgtagtgggaagagaaacagtaaccccagccagcctccctggaggtgcccaggtaggaagtttttgatgcttggctctgaagatgtaatctcttctcctgacattgttgccagagcctgccacaaataacgtaagggtgtcaggacctctaggccacacaccgtcctctcctctcagtctggaagccccacagcctttgccctctgcattgggggacacaaactgtttacagcagggggggatcactgaccagcctgtggggcgggatgttggctgtgggcagcctccagaagggagctccctgggccccctgggatcagaagctttcaggtttggtagggccaaccttttgggctcttgtctctcaagctgtgtccaggcagaggcccaagccttggccaggaagtcttggtgaccctgtgaccttcccccaacgggggttcctgagagaggcctgtccttattcctttcccccacttctccccacatggtggatggatggactgattgttctagggatggaagcctagggaagcactgattgtccccagtgccaagcccagcaggggctagaggggctttttctgccacacactaacttcagttcagctgaggtcttggtgctttcggcttgtccgaggccacactgttcttctctaattaaagacacacccccctccaccccaaccaccatcaccaaagtccccatcctcaggcccctgccctcaagccagccaagttcttaggctgactggttcagatcagactcctctatgagggtctctttgtcaaaggaggtcagtgtcctagctgctttgggaatcagtgggggagacccccccaacccagctatgccagggggtttaaatttacatgtgaaaagaatgacaggccaacattaatgaccatcctgtgacttgggatgcaccttctcttctcaggttcaaagcagcttaaggtatctatcatctgggagtgctttctctccccagcctcgctgggaggcaaggaagggccattcacaactgaacattaaggtcctcaaattaagacactatccagactcacaaaagatgtttccacccaaccagaaacagtggacccctgacccctagttgagtgcacacttccaaccaggccccttaatttatctcccacctaaatggcagctctgaagcttctgggctgccagcctcccattgccttgaacccgtgctcctcagagaccaagtgctaacagctcccctgttgacactatggaagccatggagtgatctaattgatacaggttgctataagtcagaggtcaggtgtcctagggtaaggggagtccctggagcaaagtcttctctgtggctgatgctccctgcagggaaatttaggagcagatttctgaaacagtgacgttcctcacaggaaaaaaaaaaaaaaacaaatgaacacttgggaagaagtgtgggaccattcccacaaaaacctatatgggggagtataggacatctcacctactccagcactgcttaaagttaaggtgaaagagagactgggggattgaaatcctttgggaatgggtatcctaggtggctgtcctcatgtgctgatgggccaggtcacttggggatagctcatagtcctcatacaggccacagtgtccttgggggttaacaggagaggtcaaatggatcaaaagcctggctgcaaacagacattgggaggttggtgctgtgcccaccagggtaggcagcaggcaggcgtcatgggacagccaatcagaggaggaggggactgcagaggaaccaagtgatcctgctgcagctgagctgtccttggagggtgggagccaagggaaggggaggagaagaggggtggggaaggacattccacaggcttttttggcccctgccagagacagaagggggtcaaagagaaagggaaaggagcaagccaggaagccagacaacaacagcatcaaaacaaggctgtttctgtgtgtgaggaactttgcctgggagataaaattagacctagagctttctgacagggagtctgaagcgtgggacatggaccgttcactgggatggcaagggaattctgtccctgaggacaggactgaagctggggtaaggtgctgctctgggagatgggtggacgtgacctgtcttccccctgccttggctgggattggggctcaaagtcagaaaatgatttggtcactggcagagctgggagtggggatggacaggcaggaggtgaggaccctggtgtcctgactccttgtctagagcccctgtggccccctccatgcggatgagcagccagggctggcagagatgaggatggtgctgggttcccggaggctctgctggaagatcatgggggctagggatcttcattagggccttcctttctcccttccctgcccctccactcagtgctcctgggaaaccaggtgaagcacagctttctctctcccacccttgtcctgacccccagaccaacggctgggtcattgtggatttgtgcagagaggcaggatttcctggaattccccagacttattagctgccagacaacacgtcgtgctgcccccagtcccaccccttctctgttgccatgtaattaattgtctaagctgggacacttttgagagtgaaagggcacaattaatcatgatgccaggacagcaggcatagactgggatgtatggtcaccactggacctcacaaatgtcataggtgagaaaagccttgggttaggcttgcctcaggatagcctcttctggtcacccagcctccatctgctggttctagttttgggctaaggggcctcttttcctcccctctgtccaggcgagcactggagactatggctataagcaggtgtgaagacttcagaggcaacagcctggcagtagctcctagcagacttttccctctaacctccctatctcaacctcttccctctggcatacacctggcagtatgcatatctgcctccctcaattcttccctttgcaggaagactgtggctatcttatcttcctcactctagctgggactccacagtggtctggggtagtccccactggcttggctaaccctcagagagtgagtcagcctctgcagccggcccttgtccattgtctgggggtggcacgtgggtattgtgaggcagagctgagcccagcactgccaggcaccccacgaaggaggctgacccccaaaggagaggagaatctttagggtctagagctgacaatgagagttgggggaaacagttcctcttctgagctgaggatggggtagaacaggcttctacagaggagtcagtccattctctgccttccactccctgtgggtcatggttcaggccaggccctctcgtgcactgccggctctgggcagagggggtaaggagacaactcagggtgcttccccttatatgtccctcacagttgggggctgtcagaagctctggaggcccagcctttcccaggctcttccatcctccctcacctggtctctcccagctgcctcccacccacagtcagcatccactggcgggtttactcttctctcccagggcccagggtcagatttgggtgtggctcagtgtctggagtaaggggtaggatcaactatactgagcgctgggcagtgaaccctgggaattgagcaccagcagtagaatctgtaccccagtcccccagctcaccagtagtgacaggaggtacagaaccccctgctggttgacctgcctgatgcagtcagctttcttctcccctgcctacttccctcatgtccctgccccattctgatgcactgtactctccttttgggtttaatgcctctgtctgctctatcttaatcagtctggccttacttcctggcctgagacagtccctggctaggccagaaccccaggaaaggcagcctcaaaaaacatgctgctgagaaggagaccagaactggagttccttagttcccaagagcagttgccagggctctgggggtgcccagggctcttcctggaccctgggacccttcctggcatattggattggggaggcttgtgagcaggtgagggagggatggtgagcacttcctctgtcttggctgcagtttctttttcttctaaccacaagtgctttccctttccctcttgccttctcctgtcttctgtctccttcctcattcttcccttccggctcccttcccggcaccacccatctattctacccaccccgcttcccccagatcaagcgtttcctggaggacac

SEQ ID NO: 1955 - DNA, 6000 bp, Homo sapiens
tttatttcacccagcatgcctcatgttaggcctgtggtacagtgattagaaagagattagaccccaatattcttggcttagagctaagttccgtggtcccaggacttgcttggggcctcactttcctcaaggcaagctggtaccaacctgctgcctgggcagcaggtgccagagaagagctgggattccagccacagctgaggatgagctggttgggctgccttttgaaatgtgtctgtgtccacacttggaattcagctgaggccacggggaggggcatgttataatagaggaaaacaagggtttctgctggggcctgtcttccctgatgtaggctttctccttaccctaggccacaggactctggaagcacgcaagaggtattcttagagtgcatacatgagtattggaggcccagggctttgaacagtggggctttgtatagtccaagcttgacatttggggctgatggtagcagcagctgctgcttctgcagacttccaactgccattggtttctctctttatgtctttgttttcctgagtacagcttccgatcccctgatctaccccaggtcttttccgggagcctctctgtacctttagaggttccctttcagggaacccaagctgctgcccccatcctacacgtcctcccccttcactcagatcctgggccctctcctgaatcactgcatgtccaacctttctccagcacctcctgctgctgccttgttctcttatcttcctccaaggcctatagtagcatacagcatatcctccttcccccactgcatccacttttagaaggccagagctgtaaggaagcttagaaatcatctagtttaatcccctcattttcaggtatggaaattgagaccctgacaggtgaagtaagttgctcaaggccacccagctaggaaggtttctcctcaaccggctggctcatgaacaccctgccatcttccagtccaccagtgccaaacagccaataacatctccagtagcagccccattgtttttctcagcctgatcttacctgctgccccaggccctcttccctcccctggctgagttctgactggtcccaaccagtgctactggttcacaggtcagactgaaatacagcaggcaggcctctggcacttctaccaacagagagggccgtgcctgtgggtctcagttttgtccagagtgtattcaggcagaagccagtcagcctgccattgagagaggggtcttgcgggtcaggaagggacatgcttctggaaacttccacaggagcctgaccagctcagaccctacttagctcagggaatccctcaccaacaccccactcaccaagcatctgccttcccctagctgctgctctgacctttctgagcctctaatgcctctaaagcttctggggcatctgtcccctcggcatctcacctgcttgtcagaggaagagtggcccagctgggcctgggtcacgcctgggttggcctctcctgaggccctccccactgtcctcagccacaggcaaggctacaccgccctgttaaagccactcagcctctcccttctatccttccagcagatgatccctggataatttgtgcagcaaatcctctttaatctgtaatctggggtactgcatgaagggaacctgcctctaacctgccccttcacagctcgggtggaggtggagaatatctgacattcccctttaggaggtgtagtgatcagtaacttgggcatcagccggattcactttgtgaaaaccttgttgaatccctgcggtaactaatggtttctctccaactcatgcagcaactccccctcccttccaaaggcgtctccttctggggatgtcaggtgggccgttcctttttctttgggaactggctcaagcccccgcggtgcttctggagctgagtaaaaaagagccaggtgtccagtgcagcccggggacgaggagctgaggctccccgctctgtcctgggtgactctgcatactctgcgcatccgggggtcgcgggctgcgaggccggcccccagctgggcaccccgacccacttcgcgccggcaccgctagcagctgaggtacaggccccgccccggggccgactcgctccgcccccgccgccgggcccctcccgcagcggtccgcactcggggaggcgggagggtgacggcggtgctgcgaggtcggcgcgcagctccgccgcgggtcgctcgggcgctgtccaggcggagccggccccgcccgggctgcagccatggtaaggcaggcaggcaggcgggcgggcgcggggcagggctggggtgcgcagggccggtcgctcccgggcggctgcaaggggacccgcggcaccgcagccgcggctgtgcagggtgggaggcgccgtcgccggccccgggcacaggctggcactgctgccgggcggcggtgcgtcgctgctcccaagtttttccctctgagcagccacggagtgggcgccaacccctgggtgatgcctgcgctctaggacgaaggggtgggtccgtgctgagggaggtgcccgctggtggagacgcgcttgttgggctggggaaggcgcatcagtaataagcggaggtgagggtccccatcctcgcctgggtcagcttttacctgagtaacccctcctcacccacctaccctgggcacaggggccagtaccaacttcatttggaaaacgcagaggaggcccacaaacactgcctgcctcaccaggagggatggtaagacgcttggcccctccttccctcagcctgacaaggggcagtccctggccctttcccaaagggaccccagagagggggaggcccagcccaccatcctgcccggtgggattagctatatccttctgcccctgggacaggaaccatgggaaagcttcctcctgctgcatctacccgctccctccccaccagccaggtccctctgcagtgtgtgggggtgggggcacccatccctgccacctgcctgtagtgggaagagaaacagtaaccccagccagcctccctggaggtgcccaggtaggaagtttttgatgcttggctctgaagatgtaatctcttctcctgacattgttgccagagcctgccacaaataacgtaagggtgtcaggacctctaggccacacaccgtcctctcctctcagtctggaagccccacagcctttgccctctgcattgggggacacaaactgtttacagcagggggggatcactgaccagcctgtggggcgggatgttggctgtgggcagcctccagaagggagctccctgggccccctgggatcagaagctttcaggtttggtagggccaaccttttgggctcttgtctctcaagctgtgtccaggcagaggcccaagccttggccaggaagtcttggtgaccctgtgaccttcccccaacgggggttcctgagagaggcctgtccttattcctttcccccacttctccccacatggtggatggatggactgattgttctagggatggaagcctagggaagcactgattgtccccagtgccaagcccagcaggggctagaggggctttttctgccacacactaacttcagttcagctgaggtcttggtgctttcggcttgtccgaggccacactgttcttctctaattaaagacacacccccctccaccccaaccaccatcaccaaagtccccatcctcaggcccctgccctcaagccagccaagttcttaggctgactggttcagatcagactcctctatgagggtctctttgtcaaaggaggtcagtgtcctagctgctttgggaatcagtgggggagacccccccaacccagctatgccagggggtttaaatttacatgtgaaaagaatgacaggccaacattaatgaccatcctgtgacttgggatgcaccttctcttctcaggttcaaagcagcttaaggtatctatcatctgggagtgctttctctccccagcctcgctgggaggcaaggaagggccattcacaactgaacattaaggtcctcaaattaagacactatccagactcacaaaagatgtttccacccaaccagaaacagtggacccctgacccctagttgagtgcacacttccaaccaggccccttaatttatctcccacctaaatggcagctctgaagcttctgggctgccagcctcccattgccttgaacccgtgctcctcagagaccaagtgctaacagctcccctgttgacactatggaagccatggagtgatctaattgatacaggttgctataagtcagaggtcaggtgtcctagggtaaggggagtccctggagcaaagtcttctctgtggctgatgctccctgcagggaaatttaggagcagatttctgaaacagtgacgttcctcacaggaaaaaaaaaaaaaaacaaatgaacacttgggaagaagtgtgggaccattcccacaaaaacctatatgggggagtataggacatctcacctactccagcactgcttaaagttaaggtgaaagagagactgggggattgaaatcctttgggaatgggtatcctaggtggctgtcctcatgtgctgatgggccaggtcacttggggatagctcatagtcctcatacaggccacagtgtccttgggggttaacaggagaggtcaaatggatcaaaagcctggctgcaaacagacattgggaggttggtgctgtgcccaccagggtaggcagcaggcaggcgtcatgggacagccaatcagaggaggaggggactgcagaggaaccaagtgatcctgctgcagctgagctgtccttggagggtgggagccaagggaaggggaggagaagaggggtggggaaggacattccacaggcttttttggcccctgccagagacagaagggggtcaaagagaaagggaaaggagcaagccaggaagccagacaacaacagcatcaaaacaaggctgtttctgtgtgtgaggaactttgcctgggagataaaattagacctagagctttctgacagggagtctgaagcgtgggacatggaccgttcactgggatggcaagggaattctgtccctgaggacaggactgaagctggggtaaggtgctgctctgggagatgggtggacgtgacctgtcttccccctgccttggctgggattggggctcaaagtcagaaaatgatttggtcactggcagagctgggagtggggatggacaggcaggaggtgaggaccctggtgtcctgactccttgtctagagcccctgtggccccctccatgcggatgagcagccagggctggcagagatgaggatggtgctgggttcccggaggctctgctggaagatcatgggggctagggatcttcattagggccttcctttctcccttccctgcccctccactcagtgctcctgggaaaccaggtgaagcacagctttctctctcccacccttgtcctgacccccagaccaacggctgggtcattgtggatttgtgcagagaggcaggatttcctggaattccccagacttattagctgccagacaacacgtcgtgctgcccccagtcccaccccttctctgttgccatgtaattaattgtctaagctgggacacttttgagagtgaaagggcacaattaatcatgatgccaggacagcaggcatagactgggatgtatggtcaccactggacctcacaaatgtcataggtgagaaaagccttgggttaggcttgcctcaggatagcctcttctggtcacccagcctccatctgctggttctagttttgggctaaggggcctcttttcctcccctctgtccaggcgagcactggagactatggctataagcaggtgtgaagacttcagaggcaacagcctggcagtagctcctagcagacttttccctctaacctccctatctcaacctcttccctctggcatacacctggcagtatgcatatctgcctccctcaattcttc

SEQ ID NO: 1956 - DNA, 6000 bp, Homo sapiens
catctccaacatcacatctttctgcagagtagtttggtgctgtttgaaatggtggattttccaagtaacagaaacagtgggcctgggtagattagggagcttggcttcagaggccagggtgcatacttgggtgaggaagtaaatctgtaacccaggagccaccctgacaggtgctcagccagaggaaggctgtcctgagaggcagaaatggccatgtcccctcaccctcctctgctcagctgcctttggctcagctgctgttaggggagcagcaggagacagctgcaccttgggggctgaatgaagcctggaggagggggacagaatgtgaggcagttcctgagggaagctcaggctgacactgtgggtgtcgcttccttggcacacccactgccggcaaagtcatctagttccagaggtctccacagtggctgtttctgggaatttgggtcggtaggtctgagaccaagcaccagctttctagagatggtgtctagctggagaagctgactccacaggtggtggcggcttggtcattccaatgtcaatttaatctaaggcattactctggtattctctgtcctcccatctctctacacctattacacatgcacactccaaatcctttggagggaaggcatttgaaatagtcacagttgacagttactggtttgatgttgataattttcttattaatggagataatagctaccattcatttagtgatcatgttaagtgcattagtgggttttcatagtaacctatgagtggatttattctccctatttcacagatgaagaaattgaggctcagagtttgttcatcaaagctggaagcattttaaggagcagtctgtcccagggagtcaactatatggtatagaaacccttcttctatagccacgtctccctggaaaatacttctcaatatttcagcagcacctttagatatcaagaattgtgaagggaaaggttttagtgagagtaacatctgtgtctttgtatgtgaaccacggggctgggaggtgggtgtgagcttgtgagcagccaggatgaagggcaagtgaagggtcaatgaagcgcagagcctcaaggcttgtctgggctctaaaatcagaatggaaaactaatcaatgagtccttttagtcaatccatattgatcagccatctcctgggggcagaggcctggacacccagaaaaacatcacatcacatgtttgctgatttgaagtgagcagaggttaaaagaaaagacatagtccctgcccttgaggagcttgtggtgaatttggtagagaaaagtatacagatgggtcacttgaaagggtgtggacatcaaaggacaaagcaaagtccaatgaaatgagtcagcaaagcttccagcatggaggcatatggagggtaaaagccagggaaagacagattttggctcagtatagtgaagactttggtaacttggcagcccaaaggttgaagggcagttgttagaatcagtgaatttttggccatcggaggtatgtattcgagcagaggctgggaaggcaggggagccttcagacatctggtgagtagtcacattaggaggtttgtaagtcctttccaaccctgagctcctatggccctgccctgttcacggagggtgttggaaggactgtctgccctatcagagtggctggcttctagcaccctgccagctctggaactgcccctctttgcagccattcagcaggtgccaggaaacacagtgttccccagccttgccacccacaccttatgcctgcccccaggatcatgggacacatggcagcagctgggggaagatttgggcttaatgtattttggtttattgcctttgtccaccacagaccttgttggacagacttgctgaggtttccttgaaagacacaacccagtgatagcctttggtccaaggactctctgactgtatcgtcagtgactcatctatctcactggggaagggatgtacaattagttcttgcgccactttagggaaacttagctactgaaaggcagaagtggccattgctagtcatgcagatctgaaatcctgatttcctgtggtaattgctctttattatcggctttgaacctgggccctgggatggcccacatgcagcctccttgcttaggtcctgtgccatacaacctgcacctatgggtgggcaggaaagacctagtggagggggccaggacatatcatgttggcctgacctaagcaacggagcccaagacagcaggctagagctatggtggctgagctgagtttcccagctagacactcccctagacacttggctcagataccatgccctagcagtgcctggggagttgtactgtagtcaaggccatcaatgcctggtgggatgttgaattttgagggagaactagcgctccaagagttaagccatgctgaagcagagttggccaggccacctgctggctggagatgaggaagagcactcggtaaatccccagtgactgacgcaagggctgctgtatcttggccctgcaggtattagaccctgcctccatcacacagaatgtaagagctagacttgggagaagtccagtcttctctttcagtgggggaaacagaggcccagagagggcaagggactttcaggcagtgagataatagccaagttggcatgggacttgtgcccaggccaagttctctcagagctctccgaatgctgcagtaggttagcatgcagggcttgtgcaggtgggatggctcaaagtcagtcttcagcttttatttcacccagcatgcctcatgttaggcctgtggtacagtgattagaaagagattagaccccaatattcttggcttagagctaagttccgtggtcccaggacttgcttggggcctcactttcctcaaggcaagctggtaccaacctgctgcctgggcagcaggtgccagagaagagctgggattccagccacagctgaggatgagctggttgggctgccttttgaaatgtgtctgtgtccacacttggaattcagctgaggccacggggaggggcatgttataatagaggaaaacaagggtttctgctggggcctgtcttccctgatgtaggctttctccttaccctaggccacaggactctggaagcacgcaagaggtattcttagagtgcatacatgagtattggaggcccagggctttgaacagtggggctttgtatagtccaagcttgacatttggggctgatggtagcagcagctgctgcttctgcagacttccaactgccattggtttctctctttatgtctttgttttcctgagtacagcttccgatcccctgatctaccccaggtcttttccgggagcctctctgtacctttagaggttccctttcagggaacccaagctgctgcccccatcctacacgtcctcccccttcactcagatcctgggccctctcctgaatcactgcatgtccaacctttctccagcacctcctgctgctgccttgttctcttatcttcctccaaggcctatagtagcatacagcatatcctccttcccccactgcatccacttttagaaggccagagctgtaaggaagcttagaaatcatctagtttaatcccctcattttcaggtatggaaattgagaccctgacaggtgaagtaagttgctcaaggccacccagctaggaaggtttctcctcaaccggctggctcatgaacaccctgccatcttccagtccaccagtgccaaacagccaataacatctccagtagcagccccattgtttttctcagcctgatcttacctgctgccccaggccctcttccctcccctggctgagttctgactggtcccaaccagtgctactggttcacaggtcagactgaaatacagcaggcaggcctctggcacttctaccaacagagagggccgtgcctgtgggtctcagttttgtccagagtgtattcaggcagaagccagtcagcctgccattgagagaggggtcttgcgggtcaggaagggacatgcttctggaaacttccacaggagcctgaccagctcagaccctacttagctcagggaatccctcaccaacaccccactcaccaagcatctgccttcccctagctgctgctctgacctttctgagcctctaatgcctctaaagcttctggggcatctgtcccctcggcatctcacctgcttgtcagaggaagagtggcccagctgggcctgggtcacgcctgggttggcctctcctgaggccctccccactgtcctcagccacaggcaaggctacaccgccctgttaaagccactcagcctctcccttctatccttccagcagatgatccctggataatttgtgcagcaaatcctctttaatctgtaatctggggtactgcatgaagggaacctgcctctaacctgccccttcacagctcgggtggaggtggagaatatctgacattcccctttaggaggtgtagtgatcagtaacttgggcatcagccggattcactttgtgaaaaccttgttgaatccctgcggtaactaatggtttctctccaactcatgcagcaactccccctcccttccaaaggcgtctccttctggggatgtcaggtgggccgttcctttttctttgggaactggctcaagcccccgcggtgcttctggagctgagtaaaaaagagccaggtgtccagtgcagcccggggacgaggagctgaggctccccgctctgtcctgggtgactctgcatactctgcgcatccgggggtcgcgggctgcgaggccggcccccagctgggcaccccgacccacttcgcgccggcaccgctagcagctgaggtacaggccccgccccggggccgactcgctccgcccccgccgccgggcccctcccgcagcggtccgcactcggggaggcgggagggtgacggcggtgctgcgaggtcggcgcgcagctccgccgcgggtcgctcgggcgctgtccaggcggagccggccccgcccgggctgcagccatggtaaggcaggcaggcaggcgggcgggcgcggggcagggctggggtgcgcagggccggtcgctcccgggcggctgcaaggggacccgcggcaccgcagccgcggctgtgcagggtgggaggcgccgtcgccggccccgggcacaggctggcactgctgccgggcggcggtgcgtcgctgctcccaagtttttccctctgagcagccacggagtgggcgccaacccctgggtgatgcctgcgctctaggacgaaggggtgggtccgtgctgagggaggtgcccgctggtggagacgcgcttgttgggctggggaaggcgcatcagtaataagcggaggtgagggtccccatcctcgcctgggtcagcttttacctgagtaacccctcctcacccacctaccctgggcacaggggccagtaccaacttcatttggaaaacgcagaggaggcccacaaacactgcctgcctcaccaggagggatggtaagacgcttggcccctccttccctcagcctgacaaggggcagtccctggccctttcccaaagggaccccagagagggggaggcccagcccaccatcctgcccggtgggattagctatatccttctgcccctgggacaggaaccatgggaaagcttcctcctgctgcatctacccgctccctccccaccagccaggtccctctgcagtgtgtgggggtgggggcacccatccctgccacctgcctgtagtgggaagagaaacagtaaccccagccagcctccctggaggtgcccaggtaggaagtttttgatgcttggctctgaagatgtaatctcttctcctgacattgttgccagagcctgccacaaataacgtaagggtgtcaggacctctaggccacacaccgtcctctcctctcagtctggaagccccacagcctttgccctctgcattgggggacacaaactgtttacagc

SEQ ID NO: 1957 - DNA, 6000 bp, Homo sapiens
tgagacagggttttgccatgttggccaggctggtcttgaactctgagctcaagcgatccacccacctcggcctcccaaagtgctaagattataggcgtgagccactgtgcctggcctaaaattaattctcagagtgtatgtttgaagattttgaactctatgattaaagacatgactcctaaaatgaacaaatcagtggatgacaataggtaaccctgaaatagatccaagcatatataaaaacttactaataaaggaagtatcagtaaccaattggaaacacacttttttgaaagaaattcaaactcactttatgccaaaataattccagataaatttgaatgtaaaaacacattttagccagaaaaatactagaagaaaacataaaattttagtcatatttaagtaatctcagaagtaataagaacgttttattttctgggtttttgttgttgttgttttttaagatatgaggtcctcgttttgctatgttacctttgctagtctggaactcctggcctcaagcaacccttccactttggcctcccaaagtgctggaattacaggcatgagccacaatacctggcttaaaaggacactgaggacattttaagcataaaaccactggaaatataacaaaggaaacttaaaaagatgttttaggatatttttatcccatgttttcttttagtatttaaaaaaaaacatatggccaggcgcggtggctcacgcctgtaatcccagcactttgggaggcagaggcgggcggatcacgaggtcaggagatcgagatcatcctggctaacatggtgaaaccccgtctctactaaaaatacaaaaactagcctggcatagtggtgtgtgcctgtaatcccagctactcggcaggctgaggcattagaactgcttgaacccgggaggcagagcttgcagtgagctgaaatcacaccactgcactccagcctgggcgacagagtgacagtctgtctcaaaaaaaaaaaaataataataataaataaataaaaattaaaacataaaaaatattctaatatctgtaggacaactaatcaccttctttttcaacatcttggctattcttatccattttctcttccagataaatgttggaatcaacttgtcaagtaaaaaaaaaagaatccagttggaattttgattaaagttatatttgtagattaatttgagaccaattgagttgttttctcatctagaaacatggtatgtttttacatttatttaggacttattttttctttagcaacgtttcctggttttcctcatattaattttatacatttcgtgctgagtaaattaattaatcaactcactcaacaactctttgtccgaggctcagagtgtacagcaatgaacaaggcaagttccctgttctcatggagcctatattctaattgggacaaataaacaaaaaagatcagctagtgagtagtcctctgcagataattaaaatagggttatgtgatagagagatattgggtggctacgttagattgggtggttaagaaagtcccttaatatttcaactgagatctgagtagcaagaagaatccagctttgtaaagctgctgggagtggggatggcatttcaaggagagggaaccgctaatgaaaaaaaaaaatcactaagtctcctaatagtttgatattttctgttcaaggaacagaaaaaaggccagtgaagctagcggtgagtggtgaaggggaaagtgttatgaaaagatgttagacaaacatttaggggccaaacagatgattcaggccttcataaggagtttgcatattattttatttttttgagacaaagtctctgttgcccaggcttcaaggtagtggtgtgatctgagctcactgcagcctctgcctcccaggttcaggtgattctcctgcctcagcctctccccctagtagctggaactacaagtgcacgccaccatgactggctaatttttgtatttttagaagtgacagtgttttgccatgttggccaggctggtctccactcctggccttaagtgatctgcccgcgttggcctcccaaagtgctggaataacaggtgtgagccactgtgcctggcctacattatattaaatgtgatggaagccatgtattgagtaaaagaatgacttgatctgattcatggtttttgaaagatcgctatagtacctagcggaaaaaggatagcagagggccaagagtgaaagaaagatttgtgaggaggcgagtgtagtggtccaggtaagaggtaatagtggccagatatggtggctcacacctgtagtcccagctactagggaggccgaggcacgagaattccttgatcccaggaggcagaggttgctagtgagccgagatcacgtcactgcactccagcctgggtgatggagggagactctgtctcaaaaaaaagaaaaaaaacagaacatatttatacacaaatggaaatgacccagaagaggagaaattagtctgggtgtggtgacatgtgccttaatctcagctacttgggggctaaagttggaggatcacttgaggtcaggagtttgaggctgcagtgagctataattgcgcctgtgaataatcactgcaccccagcctgggcatcatagaccccgtctttaacatttagaaagacagagagaaaggagagattgatgaggcaggagcaaggaggataattgttggagcagtaaaactcttgaaaaggagacagtatggaagatatggatagtatcttgaaaaataaagtggatgagaagtgacacgaatagtggaagaaacaaagacggtgggctatgaaaaatgatggggagataccagggatcagtagctgacagcatctcagagtagcagcagtctgcataaattttaaaagcacttgagtttctgagggaggaaggaagagaagtggtttggaggtaatatgaggaataggccacagataagaatacctatgagaggaaaaataacctcctgtacttgaaaagttgcaagggaggtagttttgctaagtgataaaccgggtttcagttggaatgggaagttgatgggaacatttacagaagaggctaagaataaaggggaagtggttgatggcagatgttgaaatcaaaagtgtgaagtgaaatggttaggatatttggtgaagagtgggatatggaatcagagtaattgaagcagagagtagcatggagatactagagcaataaacggatgacgcagatcctactggttgtgattgaggtggaaaggattataaagcatgatggaattatcttttggtaatctcttgggtcaaacgtggtgaacggtaagatgaataatatagagctacacaaaccgttcttgtgatatggaggctgctccctaattacaatgctaatatttcatttaggatttttgtattcatcgttacaaaacagggtctgtaggtttccttttagtgttcataatgcttaggttttactaacagggttatgattacctctccaaacaagctgggattttttttttcaagcgtttccatgccctggaaccatctggtctagtgctttttggggtaatgaatatcttcaattgtatttatttttacttagttgatctattcagattttctacattttcttgagctgattttgcttatttatatttttattgatataaagattttttctatttttatttcttgtgccaactgtatgtacattccccccattcccgtttccatactgtttttaggccatttgaaaatctcaaaggttttacaggaaagtacagattgatgaagaaatggccaaaaacgggaaaagtgaactttaaagtgattcaactacaaaacgtatgctactgagcaaatactagtgtattcctcgctctgcggcttaactccatgaaaatccgtgcaaaggttttagcgttgggattgtgaccgactcggtgaagagaggggacgatcaccaaaccgttagagcactggggctcttggcagtgtttgtcagttattttcaagtgataacttgaagtgataccgcaggaataaaatgctgtatccagagctggtcggaacgagcactacctttaacaaaagctgaaaagatctgcctaggaattcgttagaatacagccctcttacgtctctgacatacctagttatgtgaaccgagactgtgcagctgacggtggaaatttcctaagtgctttttaaacaacagaactggactccctccctcctccattcccagtcgaatacgtcccacccagatccagctcaagggtgcagcacttgttccggccagctcacaatcgccctttggaagggaggtttcccgccatttcgcttaggaggagggtgaactcttctcccttcattctccactcgctgggggcccgagcccacaccaccttcctagcaaagcaagcagcgggacgccaaggccagcaggccgcattaagaacgctggactgagccaaaagcctacacagaccaagccgctcgggaaaggatcaacaactgccgacaacccggagggcgaaaacgcccgcggcgtaggggaagcaaactaggagatgcgcgggcccagcgccagcggcgggaggaggcagcgcggccgtcgcaggcgggagcgaaggcggggacggagggcgggctcgctccactcgactccggattggtcgagcttagagagccgagtgacgtcagcgggggagaacgcctgatttgtgtggtgggcgcgggcggtggggggaagcgcagtgcgcaggcgcaactgcctggctctgctcgctccggcgctccggcccagctctcgcggacaagtccagacatcgcgcgcccccccttctccgggtccgccccctcccccttctcggcgtcgtcgaagataaacaatagttggccggcgagcgcctagtgtgtctcccgccgccggattcggcgggctgcgtgggaccggcgggatcccggccagccggccatggcggggctgtactcgctgggagtgagcgtcttctccgaccagggcgggaggaagtacatggaggacgttactcaaatcgttgtggagcccgaaccgacggctgaagaaaagccctcgccgcggcggtcgctgtctcagccgttgcctccgcggccgtcgccggccgcccttcccggcggcgaagtctcggggaaaggcccagcggtggcagcccgagaggctcgcgaccctctcccggacgccggggcctcgccggcacctagccgctgctgccgccgccgttcctccgtggcctttttcgccgtgtgcgacgggcacggcgggcgggaggcggcacagtttgcccgggagcacttgtggggtttcatcaagaagcagaagggtttcacctcgtccgagccggctaaggtttgcgctgccatccgcaaaggctttctcgcttgtcaccttgccatgtggaagaaactgggtaagttccctggcttgtttggcgcccgcccctttttcaggcagttcagggcttttatggcaccagccccgcgtgggcccccggcacccagagcgcaaccaaagtatacactgatggaagtgactaaaagctgtaatagcgctttgctgggtggaggtccgggcaaaccaagcggccttggggaagataggattgccgtctccctgcagcctattcttgctttatttccatcctccaaggatcaatgggaagcagtccactcccttccctgcttcactttggtggcaaccagaggaaacgtgtttgaaacctggcgccagattttggccaaaagataaatcgatgttgcacctgggccaggcgaaggaaaaactgtagtgtttccttagagaatctgtcataattctgctcctgaaagtcttatccctctcggttgcctcctaccggtggtgtcagttctccagattgacccgggattgctggggttggttgctggagtaaagcgtaagctaatttagaag

SEQ ID NO: 1958 - DNA, 6000 bp, Homo sapiens
ggtagaacctgggagtggggtggtgagtgataggtagcggggcagaggccttgtctcttaaaattaaataacatccactacatcaggcaaaggtcatggtcttagagtaaagataagacaagatgataccataaagcatgtagttgcacatttccaaacagcaaacagccaataaaaaagataataagaaataatcactttttactccttatggtataatgtgaaaaaaaagaaataatcacttttgcaacctaagaaagtgtgtagtgagtgggattctgtggtaaagggaagttcttaaacaagtgtcacaatcttttcaaatccagtcatcctagaacaggaaaagccaaagtcctatttacctaaaaaccaaagtgttcacagtgagaacaacttttaaaatgtcccttaaacgtgacgggaggacggagatgagaatttagcttgctatcagagactcttgcttcattgttttttgtgtttgtttgtttgtttgttttgagacagggtctcgctctgctgcccaggctggagtgcagtggtgctatgacagctcactgcagcctccacctctcaggctcaagcaatcctctcacctcagcttccagagtagctgggactacaggtgtgcaccatggcacctggctaattattttatttttttgtagggacaaagtgtcactatgttgcccagactggtttcaaactcttaggctgaagatacccgccacctcagcctcccaaagtgcgggattacaggtgtaagtcacagcgccttgcccctttatggttgtattaatatttatcccataactacttccacacactctgtaggttcagttcaagaagcagcagcagcgatatcactaaaaacaacaacaacaaaaaaactgacttgatttattctgataaagatactattcctttgaaatgttactggagttttcaaccatgacctttctttctggttttactagatttttctttcaagtctccgccttcaaaggtatctatcctgtcactagctatctgcaaatcaacctcacaagcatttttaaatgagattttgaagggttttaaacacaaatgagacaggcacaagctccttttttgggtcataatttattacactagagggcgatatttgctaaactaaaagggattcatggttgcagggatgaaggctggacatcatgattgagctggagccctggatcttgactgccttcagtgtacggtggaaactgcaaaacgcacaggtctctgggctctgcccctggacattgtgaatcagtcagggaaaggggtacaagaagttattggaaatatgtttttaatttctttttttttgtttgttttttgagatggagtctcactctgtcgcccagactggagtgcagtggcgcagtcttggctcactgcaacctctgcctcccgggttcaagagatttttctccctcagcctcccaagtagctgggactacaggcgcacaccaccacgcccggctaatttttgtttttttagtagagacagggtttcaccatgttgctcaggctggttggtcttgaactcctgacctcgtgatccacctgcctcgtcctcccaaagtgctgggattacaggtgtgagccaccatgcccagctttttatttctatttttttgagacagggtcttgctctgtcgtccaggctggagtgccatggcacgatcaaagctcactgcagccttgacctcctgggctcaagccatcctcccacctcagcttcccaagtcactggaactacaggtgtgaaccactatgcctgactaattttttggttttttgtttttttttttttacagaaacagggtctcaccatgttccctaggctggtcttgatctcaagcaatcctcctgcttcggcctcccaaagtgctgggattacaggcgtgagccaccatgcctggcctggaaatctgttttttgttgttgttgttttgttttgtttttttagctctccaagtttgggaaccagtggtttaaagggaagtgaaaataagattttctcccacctccccatagtcagatcctgctgtacttctttgttgaatctgatgtatatatgtttcttacactggtggaaaagaggccttatctttacactaagaccatgacctttgctttattcagtggatgttatttaatgtgacttgcagaaaggtcatttactgcccatttgcaggtcttttatatggtcaggtccacttcaaaggcaccctacaaaatattccatttctgtttgtgtttatcagtgctatcagcttttactttatcataagcaaaaagctgcctaaagaagtacttgactgtagagcaagattatgggcaatgccaccataaataaaaccagtgcttatctgtctggattgccaatcaagtgaagaagtgcatgaagcatgtggacgatgcataagaaattcagagaatggggccgggcacagtggctcacgcctgtaatcccagcactttaggaggcggaggtgggcagatcacgaggtcaggagttcgagaccagcctggccaacatggtgaaaccccgtctctataaaaatacaaaaattagccaggcgtggtggcaggcacctgtaatcccagctactcgggagtctcaggcaggagaatcgcttgaaaccgaaaaggcagaggttgcagtgagccacgatcgtgccactgcactctagcctgggcaaaagagtgaaactctgtctcaaaaaaaaaaaaaaaagaaagaaattcagagaacatgtaacagtgcaattaagccctggggatttggtccaactgagtgtaagataaataatacctaactgtccaggcttcttggaacagattttttttctttctacgatctttaaaactgatttatgagtgaaattgaggtcagcattcccctttgtgtttcatctgctgatgttacagggtcacagtgacattttgaattgtaaaagggctgccagagttccagtacagcaaattttcccctcctagacttactctgtttgagaaaaagcaccagagggggggatgtgaaagtgacatttttcagtcaagcttctcttttaagtcaagtatacagggtctaacagatgctgttgtcagctggcaaactggacaggtaatcactaaagaggtcctcccaagccaggtgtcgtggggcacacctgaagtcccagctactggggaggatctcttgagcccaggagtttgagagcagcctgggcaacaccgtgagacctcatctctaaaaagaaaagataaaaggtcaagaaataaagagctcctcccagtttcagggctgtaggcctccctggaagcccggctatactgctcaggagtgctgggcctctcagtacatctctctgccaatcccaaacctctgtttgcatttagacattcaggtaacacttttcaaaatgtctctactgttttcacagttgccaagattcttcccactcttacagagatgtgttggagtctccagcatgcggtaggacttagtcccttcactgtaatccaggcctagggggttaggaatggggagctctatttgcaggatttgggcttactgtcattttggtctgttttagttggataagattgaccacaatgcacacagactggacatttggccagtcccccactactactttgttgttttgtctaggagtgcttattcttttccttcaaacctgaaaaatcttaggctctcatataagcaagtcaggaaaaattagagaatttcatagccgttttctttttctcctaggataagttagatacctttccctgggctccaaatctcagtttactgtctttccttgcaaaagacgtgtcctccctacccatgtccctctcagtggaggccagtgccagtgaccaaacagctgccgagctctttaactctaattagtactccacaccctcacatagaccttgcaggaggcctcaacccacccactccctccaacgagttgtgacgcagaccatctcaaacttcacatccacacgtgtcacatcaacgcacgtgacacaagtggccgaaatggtttcctccttataatttttggtgagtgacttggccgtggttcattccaagcggaagtgatggctggtggatatgacttgaggggaattcctgagggcaaggaaaaggaagaaaggggccccagagaagacgaggcacagctggagaaccctagggctgtgaacactgcgactgccgcgcggggcagctgcgccgtgtttgctggaagcctccggtagctgctgaaaccttcgctccggaggtcgcctcggtaaaccttgcggatgattccaccacggcggaaagacgaaaaggaggcttctaggcacccgggaccgcccgtgtcccgcccttttccccgatgaagtctgacgcggcaggtccctcggcagggttaatgggacggcctggtggggcattgccggtctttcccagccacagacaagcttcgcgcctcgatcccccagcgcccccagacgctggatgccgaggcctggtcctttacagccgccgacgcctcatgagcgaagccagccagatgccagcaccgccttcggccccgccccgagccagcccctcccacatccccgcccggggcacgccctcggcccgcccccatctccgccccgaacacgcccctagattggccccgccccgtccccgcccgcaactccgccccgaccggaagaagccgcggcacccagcgcttatagggccgggaatgggggtgccgccgctgcctagtcagttctgcgtccgctgaggctcggtcaccgcctcgctgtcgtcgcggcgcccccgccccgtcctctgtccgtaccgcccccggagccagggccgagtcctcgccatgccggcccggcggctgctgctgctgctgacgctgctgctgcccggcctcggggtgagtgaccggggagcgtggggtggaggacagctcgcgacggccgggtcggggccggggcagcgtcgcggcgccggggctggagtccgagctgggagcgcgacggcggcggccagatgccccgtgagcccagccgtgggaggctcgggccgggcgtaggaggcggcaccgggccgggagagcttccctgacgggagtcgcggccccaccgaggcgtcggccgcccgaagagcctcccaagccagcgcggctgtcacgggcagcggctccccggaccccgcgggctcgggcgcaacttcgtggcgtcctgcacggcacttgggggtcccagaaggccccggcctgaggaggccgcccacctgcgggaccctcctcctcgcgggcgggcgccggcgctgcctggcgggggccgcggaggagccgaaagggcgttgggatccaggggaagggtctgtcctgcgcttcgaatccttgtttgaactttttaaaaattcgaaaactttggggaacgaatgcaacagggagtaaggactctcacccgagagctggcttctgccacttgccctgccggtttcttggtactgggaggctgcaggcttccttctgtgcaccgagacttccttgagcaagtggagctgtgggaattgcactcttggaagatcccgcatgggttcgaggtgaggccgcttcagaacctcaaatgaaagactgtctcctcgtgggagagcacctggggccatcagaaatgtcttttcatctttttctggaggagacgaatgatagggcctggtttacattcatttaactctttatgaccttcactcagctgtggatttgggggcactttgtgggagacttggcttttttttttcttctggttggaagaacctaaattagcgaatgtttttcacaaaatgtattgttcaggatgtgagcgtggcaaatttgtccgtgttctgtttaatgacctctttaaaggtactgtgtactctttaatagggatatcatgtaccaggtgtcccagtag

SEQ ID NO: 1959 - DNA, 6000 bp, Homo sapiens
tcatttattatttatttagatatgaggtctcattctgtcacctaggctggagtgcagaggtacaatcttggctcctgtagcctcaatctcctaggctcaaggaattctcctgcctcagccctcctgagtagctgagactacaggcacatgctaccatgcctggctaattttttatgtattttttgtagacacggatctcattatattgtccagcctagtctcaaactcctgggctcaaatgatcctctcaccttggcctcccaaaatgctgggattataggcatgagccactgcatccagcccagatattttaaatgtatatttatatataatctttttaaaaacccatacatgctaacattctatgcacatttctgcattttgcattttcactcatacatctggaagatatttctatatcagtacatataattaaaaaaaaaaaaaatctcattttttaaacagctgcaaataattctagcaaatgaatgcataattgatctaactaatctcctgtggatagacatttaataattgtttgctactggagtcagtgctgcctttatacatatgccttcatgtacacgtgcgtttatatatgcaagatacatttatagaagtggaagtgctaggattacatttataaaatgtatcaaccttttaaaagtacatgcatcaaaatgtttgatacatttttaaatgacaattattgccaaattgctctgtatcatgtctgtgtgcgacaatttacaatcccgctaatgatgtatgaaaccatttgattctgtacacccttaatgaaacagtgtgttccttacactttttatgtgtgcccaactcttaggtcacagtggggtttcaatatgatcttaatttacatttatctttttatgagacatgttgagaattttatcataggaactatttgtatttccttttctgagaactatctgttcacgacatttgccattattttttcttgggcttgttattctttttgttcttgattaatatctggtgggatatttattcctactttttttttcatttggactgttgaattagcttgtttacttctaaaaaaattctactttcattgggctaagttacatttatggtttaattaagaaaaactgacatttcaatgtctcttcctgtatgagaacagggcatatctttccatttattcaagacataaagtgggtttaaacaggtacatttttaaaagatggctacttgtggagtccaaattgagaagggcaagaacgaaagcaggaagaccaattaagtggtcctgcagtggcccaggaaagagatgatagtgcttaggctagggttgggggtggatagatttgagatctgtcctggaggaagcaccaattaaactttctcatggattggatatgggagtaagaccaagggaagaataaggatgatgcctaggttttcaacttgagccattgagggactagtgatgctgtgagatacaggagacagaaagagatcctagaagaaggcttgcttagaagcaaagtccccaagcctcaaactccagggaggctgcccacagaagctctttcagtggagacacaaccaactggaatcaatcaactgtaatcacaaccaaccagggccttcattaacccatgtggtaccttggtgtgaatttaaaaatggtggcttttctgggaagacagaggcccaaaggtacacttggcaaggagtatgcgagttgagttttagcccctacttagtctcttgactgggagctcctgtgctatgagcaacctgcaggaccagacctggaagccttggaactaacctctgactggggcatctgactcatccactcctatacagtactaccctgctccttaaacttaccccaaaatggcccctgactctagtgttctgctactcaggtagatcctcacctctacctgtttagagatctgccagttacagtgaatctgactgctgcctgcttacgcatttcggcagttgccttgcctctcctaaaccttgaatatggtgcatagaataaaatataagccttaagtcatcttggttaccataaatctcagaatgatgctttttcgatacttatgcaattcctattgcccaatttgaaaatgtcctggttcatttgaaaacagtccagttagctgcatagagcagcaagctgtaaattgtatctgaaagaccgctggcttcaaaccattgggattctgagtcatctgtttggtggtctgactttgatcccagcctccagcctctgggtccccctggtctaggtgacacctctccaaacagtgttgagcttactcctcaaaggcagaggacagaagcggattctgaaaaactctgcgttcagtctgacattccctgttcttttcccgcaccttccccatgaaatagcagactcgaaaataaaatttactcatgccctcatgactgactgactacccccaacccagggggttctcccgtccttaatctcctccattttagttataccatggggacttcaggtaggctgcaggagtagatgctggcccacatttccatcagtccttgctagggacagtgttacactgcttggtaattgataaatccccactctgggtgcacagtcccctctccccaactgagctaagatgtgggctattgatgctttcatgcccagcccaaccatgaatcagttgacttccagtcaatcattcctcctcgtacccaccaggaacaacactaacaactgaggcaagaatgcaaagccacaacctaaaagaaaacagacacattgttccatctgatctactgacagctaagacagtcactccatggagtacacaggagattcgcaggctgctgccagggctcattctgttcttgtctttcctatgactttactcaggattccattatcagcaacttcaccctccagctctctccatcctcctatgaaagcctcagggacatagaaataagcttgtctttgtaaaatgtgccaggatctccgtcttagataaaagacgactatgagaaaagaaattatttcattccactatgttccatttgatttctgctttcaagcaataaaccaccatggcttgagatgcttctagtgtttcatggagaattgggactatttccccaacatgccctgctcttcattcctctttgcttcttccctttttgactccttggacccgaggggcgaccatgagtggcgaaatttctgaccagctagaataccaggcaggtgcaggctcttgaagcaccaagactggctcaagagattgtaaatggatcagtcaagtgcatgcaccactgacggccagtcaggagagcttccatttgttaaaaatataaaggacattcctatcatcaagcatcacaattaggcaatctcaaagaaaacaatattagctctacttggcctatgttacatgctctaagaaagtattttagaaaagttttttttttcaacataaatttattgaaggatcaaacgtgttctctttcttggtctctttagctcgtaaagtcgttttggggatttcgtgaatctggcaaataaaacaaaacaccaatgaaacgctgagaaatgattatttcccttatgtattttagcggcctccaggcagacctgataaatattcagcgagtgattagctggtgcatccccacctgcgtcctttgcatagccatgcccgctactctttcacaggcagttttacttggtaagttacaaacgtactggctgcactctgcacctgacagtattgcagtaattagcttgggatgcaaaatgatttctaaattaaggtcctggacttgtaaaatcaagaaagcctgataatcaacatcgtcgctctggtggccattgaataacgggataaatacctaagacaagtcctttaaccatcccacgtggtgataaatgcccgacgtacaaattaaaagtctctaccacacgcaggtgaaataaggtataggtcaagaagagaaggtaggggaaagggtcaatgcttaattatttaaaaatcgctctcttcctcctgtaggaaggtctaggggctaggtcttttagtgcacacgtgatgaaagtgacattttggccaggtgaaacctcaagctggtacaggcagctaaaacacgggcgtcgtgccctggagacaccgggggtcctgaggatggggaaggggctccctgctgcgggtgctgaggggttaggaggtgagcaccgggcgggaggctccggggcaggggctgcgcgtggagcccactcccggacgcgggctcctctcggcccggcacgggtggcgcaggactccgagcccgtcgacaagagagagagcgggagtgggagaaggaagaccgggagaggaggaggccgggcggcaagagcggaagaagaggaggagaactgaggcggaggagggcgagagggaggagagccgggcgcaggaaggggaggaaagaaaaaggcggcggaggagcgcggacccgccactcccggcctcctcccccgcatccccactcgggccggccctcccccggccgccgccgccgccgccgccgccgccgccgccgccgccgccgcctccccttgcccagtgttcccagcaccgcaaggcactcgctgcctcctccgcactcggtccggtccgctcagcgccgccgccgccgcaccctcgccgcacccccgcgcgcgcccggcccgcgcgcccccgccgctcgtcctcgcggcctcgcgctcggggcatgcgcggtgggcggtgccgctccgggccgcctctgccgccgcgagtaggaagcgcgagcgccgggcaccgggctgtcagtgagcctggggccagcgggcgagccagcggctccggctcccgctcccgctccgcgcagcaccagcccgactctccccggcccccgccgcgccccctcgccgcgacctcggccaccggcccgcgccccgcgcccggggtcgccccgagcccgcacctctcccccgccgcccccgcccacccggccctccgcggccgcagctccccggcggaggcaagaggtggttgggggggaccatggctgacgttttcccgggcaacgactccacggcgtctcaggacgtggccaaccgcttcgcccgcaaaggggcgctgaggcagaagaacgtgcacgaggtgaaggaccacaaattcatcgcgcgcttcttcaagcagcccaccttctgcagccactgcaccgacttcatctggtaggtgccgggccgggcactcctgccccgctcctccccgcctccgggtcccggcacccggcgctccggcgcgtccgccccggggctggctcactccgataacttggaaccggcgggagtccgaactcttcgcccggagtgacacgcgcgcccggccctgacaccggcgggcaggactcccgggacgtcgccgtcccgccacacacaccccctggcgcgagagggaggctggccccgtacggtggcgaaggggatccctctccgggccgggcccctcacctccccgggcgcgcccacccgcacgcacccagcggagcggccgcttgccggggtgtgagcccaggggacaggggaggaggagaggccctaagggggcaaaggttcccggagaaacgcgccccggagtaacgggggagcggcggcgattgcactgcgcgcggtccaagttgctggcgagccaggctgggcgcgttcggggtgggggggttgtgtttgtgcttcccatcgggctggactgcgctggcatcttgggcccctgcctactgtaggctgcatctactgggcacggagagactgacttttctgagtgagcagagagagagagagcaaactgttgaaagcttgcagtgggggagggggagttctagcaggcaaatggcacaagggcagagggactcatttaaaatagaccctgtcggccaggcgcggtggctcacgcctgtaatcccagcactttgggaggccga

SEQ ID NO: 1960 - DNA, 6000 bp, Homo sapiens
ttacgattttcatctgaccatgctgagtttccctataaaaagcataaaatactttggagatggtgcagaagcaggaaaatgtacctgtcagtttggatgtagatctggtttcgcagtgtattgtatttctggatactctgtccaagaggagatctcctgaatgatccatttagggttgttccgttcacttcacaaacacaccgattttgtgtctactcgtgccccagcctgcgctaggcagtggggagacagagaagccaagttgtttaaaacactgtgcttgtccccaagggctttggtgaccatagctccagaagtaatagctttggtggaaaccgtggtatgtgcaaatttcaccccataaatagaggaaacataggtattcattatattaaaacatgatgcgggccaggtgtggtggttcacgcctgtaatcccagcactttgggaggccaaggctggtgcatcacctgaggtcaggagttcgagaccagcctggccaacatggtgaaaccccatctctactaaaaatacaaaaatacccacatcgtggtggatgcctgtaatcccagttactcaggaggctgaggcaggacaatcgtttgaacccaggaggcggaggttgcagtgagctgagatcgcgccactgcactccagcctgggcgacgagcaagactctgtctcaaaaaacaacagtaaatatctaaaatatttagtggcgaagtcaccaccacccattgtgtgactccagagaatgatgcacagtctggtgttatcgaaccttgacttggggctggggagtggtggggcctgagcttggcttaatctaaaaacgtggtcctttcatgactaaaatgagcattgtgcttcttctcctcccaggaccccaggagcaagcacaagttcaaaatccacacttacggaagccccaccttctgcgatcactgtgggtcactgctctatggacttatccatcaagggatgaaatgtgacagtaagtaagttttcttttccagttcatagcgaggctctgtagctcatgctcagggtttgctgagcaaggaaggctcagtaacttttcaacaccaactcttcagtagagggaattagttcagatatctaccagactgacaaagtgtagattcttccactgtcaaagttccaggttattgaactacttgattgcctcattatgaacccccaaaaagcactcgatttataaatgaggttggtgggtgctgtcactttttttttttttttagtggcagaagtcttcaatcactgtaaaatatagcctagtcaaaccccaaagaagacttccaccgccaggtccacatttggttatagcttcaaaataagccaagaaaccctactcattatcttcctgtgtctctaattagtgggtggactgtggaaaaatccagtaggctcttcttaaaactgaaaccaaaatgaacataaaaaccagaatagcatcttattgaagttcactgacccagcatgtttatggacggatcaaatgtgtattagcctggctcaaaacgctgaggaccactgacaagcaagacaccagcccttttctgttattttttgttacgtgtgtatctccatcaactaccaggaggaaagaaaagcaactatgaagactctttgctttgatcattttttttttttggagacggagtctcactctgtcacccaggctagagtgcagtggcgcgatgtcggctcactgcaagctccacctcccgagttcacaccattctcttgcctcagcctcccgagtagctgggactacaggcccccaccaccacacccagctaattttttgtatttttagtagagatggggtttcactgtgttagccaggatagtctcgatctcctgacctcgtgatccgcccgcctcggcctcccaaaatgctgggattataggggtgagtcaccgcgcccaacctgctttgatcgttcttaaagtatgagattcctcaggctatgtttgtttaaatacaagctgatacctttaggacatgaaaagttaattgccgagcctgtttttctaatagatcgggaaccactgtggaaatatcagcctattgccatttgctaatgactattttcatttgctatgatggccagaagctgatatttgtatcttacatggagcaaactgtagaaaaagaaacataaacgagcatcatagagtagatggagtttctcaggacacagggattcttcaccttacagagttgtacggcatcacaaccaaatgcaatgtttgtttacttcaagaaacgctgggatttccaccatttaatcccagcactttgggaggccgaggcgggaggatcacctgaggttaggagttcaagaccagcctgaccaacatagcgaaaccccgtctctactaaaaatgcaaaattagtctggtggtggtggtctcctgtaatcccagctactcaggaggctgaggcaggagaattgcttgaacccaggaggcggcggttgctgtgagccaagattgtgccattgcactccagcctgggcaaacaagagtgaaactcggtctcaaaaaactagaaaaataaaaaaaagaaaccctaggattccaaagacatggttttcaggggttctgcaagggcttacaacttaagtgcatatgtaaatatattttaactactttaaaactgggaacaaaataaatatttgaatgtgttacatactcaaccttcactccttgggcagaacttgcaatcaggtttctcctacagcatcctcttcactgaagagtcagctgggatggggaagcatgccgttagacacggttcctgtttgtactcagttttctgcatgaatgaggatttttggatgctgtactactttaacataatgcaaaaataaatgagatgtggaggctggtctgagacatcaactggtttcaaagttgtgtttgtatcagagggctttattggtgatccttgaatgtctttataataaataagtggtataaatttgtgtttgttagctgagtttatgctaataaaataacactcatatggtttacatcattagattctgctttagactttgtttgcaaaatggtttccttactaaaaatttttgaaaaccgctgacctggaccaatgcttttttgtttggttttgttttaaactctttttcttgggaatcataaggcttctgtggctgccgcctgtgctcctttctggagacaggaggagagcaagccgatgagcaccaggactgcaacccctactgaccttaacttctgcagagaagaagcctcttcctgtgcccttccacctggtgcaattgcaatcctagatagagttccacttgggatggggcaggacgtcagggggcagttagcaacaacaacttgagtgggccaacctctcactttgtagagttggaaatgaaattagagcaaatcagcttcccaagatatacagcagagactgcaacacggcccagtgcactttcacctcccgtcccctccccgttgcctctgtgctttccagaggctctggcatttactgccttcacattgcaaattttgcccggacacttaaagacatgatgtggttaacacaagcaatatacataacacagcttttcaagagcctttatattggctaaattcgaggtgtagaattttgaacagttagccttggaaatagaagcctaatagcatccacatttgtgaattagctaattgttctttcctcagtatgtccatcattctgctgtcagtgtttaatcggagcagtatacattattcatgatgctttttccaatttactttgtcatgttaaaattaaacactcaaaatgaaacggaaaggaagactccaccttgatgattacagaataaccttattagcatcctggcaaggatttgcaaggattccagtggccttccctccttctggaagcctaaaggtacaagggtgatcgagctggaacacccacacacagtcttctgtttgtttccggcacacaggattcttttcagggtttctttggttcattgcaataatactgatctttttttatcctccccctgtctcacccacataatgtcagctgtaaggaatggctgatcatgctaggcgggtatttgttttacttggaatggtatttaaatatttgaagataggtttaaaatatcaaatacaggttctttggggagaaaaacacaggcaatgtacttaaaccttgttgaaaatacaaggttagctgaggaaaggaaaatttaatgaattttctatactcaatccacagattttcactctttctcagtggtaagcccagaatgacataaagaattcattagcaaaaagtcttatgttcaagctgggtgcagtggttcacatccatagtcccagtactttaggaggcctaggtgggaggaccacttgagcccaggagttcaaggctgcagtgagctaggattatgccactgcactctagcctgagagacaaaaggagaccctgtctgaagaaaaaaaaaaaaatcctctgtttaacattttcatattattttgcctctgtgtacataaaatatgaattaggctgagctttgtacatatttacctgtgtgaattttgtatactgttaaatacttgaaacaatcacagaagcccaagctgggatattttgcttcagtgaagactgagcaaatatggtatgagtattttaaggatattgtcactcacatgaagcctgtgctgtacaggacatctgctaacagttctttatgtcaccaaaaacattatagcaaagtatcgagttgggggtaactcattttcacttgtgctcatgcaccaaaacactgaggagcggtggttggagtccatatgcccagctcaccctctcctttcttgattcacagcctgcgatatgaacgttcacaagcaatgcgtcatcaatgtccccagcctctgcggaatggatcacactgagaagagggggcggatttacctaaaggctgaggttgctgatgaaaagctccatgtcacaggtaaggcttgctcatcccggagcagcatcgtgggcaggcatttggatgaaggttacactgatattaaggcagggtgggggctgggctggatgccctgaggcctctggagaggcagtcgccctggtggagccatcactgtctcagagccctccagccctctgagccctcgggttaatacacctcccaggagatgggtctgtacacccaaattcccaaatactcaatgtcacacaaagtcacaagcactgtgtggattgggctattctgacagcatggcccgtgtactctcctcccggtgacagggggtcaggggagccaattaatcaaaatgctgttggagggaatggaactagaacaaggggaggcgaatggatggatgacccaggtgttttgtggcattggcctgtgatggcccaataaatccacctcagcgatagcaacagccgttgagtgcttttgcttcctctgtgttaggtatggtgctaggaacttcacatagattagttatttagacctgacacctagctggttattagcctcgttttccagaaaaggaaactgaggcacagagagatcaataacttgcagtgttacagttagtgaggagctgggataggaatggaggcatttgactccagatactgtgcttataattaccacacctcctacaaacagcctggctatgggaccggaattccctatccaggggcctggttactccctcctcggggctgtttctgggtgggctctgccacaacatggctttttcctgtggttttcccaccaaatccactttcggttcatcggcacactcagtcaagttatcctggagtcttattggcctaggacccatcccgtgtcctcaagatggcttgagttctcggtaccatgacccactccatgttggtgtatggttcagctctcaggcatcagcctatttccttgcacttggggtccctga

SEQ ID NO: 1961 - DNA, 6000 bp, Homo sapiens
gtcctgtgaaatggggagagaacattttactttgctttgctcatccttttagggactcagtccttttattagattttttccagaaattccttcttgctcatctttgcatggttagtgagtatcaagagaagcacagatgatctctcattaaaggagcacacatcccagcctctgggagccctgactgttgattcacttgaattcttccaggcaataagcattgatgaatcaggttccaaaaggatgttcccaatgccgactctactgagctgtcacacttgctccaaatgcttttgccttgtgacttctgccgcttctccattctccgctctcacatacggctgctcctgcctgattccctagtttggcttcatgtctgccctcactctgatcttaggacctactcagcctcacacagtagtcttgttatatccctgagtttctcagcagcaggtactgttgacatcttgagccagtcattctttggggcgggggcagtgtcctgggccttgcaggatgttccacaccatccctggcctctgcccccagatgccaggcttgtcccacccaagtcatgatgaccaaaaatgggttccctgggggaagaatcatccctggttgagaaccactggtataaccagaggagggctatttctttggctgttgtcatctgaatgtggaattccaaggaaagttggtttctgtttgtttaactgatgaattaagtacagactcccgattaatttctaggaagaaacagcatgcccttatttatttttcaaagagcctttctccgtgtttgcaaatggcctgtgcacatagggtgatgtgaattgcagattctgcctctgctgaccttggctttgaggtactttgtgctcttccaaggaaatacaccatggaaacgtggggtgtgagagtggaagctttgccagcccacatgtgggaggcaggacggatgtgacagtaagcctcatgtctgtatggctccacagagtaacttgaaagcccacaggcagcccctgcctctcatcccctctgccccaccacacacatcacccacatactcaccattcattgtggtgtgaaatctccttgggtgaagagtagatggttgcttattaaaatggaaataagcccagaggctggacgcggtggctcacacctgtaatcccagtactttgggaggccaaggccagcagattgcttgagcccaggagttcgagaccagcctgagcaacatggtgaaaccctgtcaatacaaaaaatgcaaaaaatagtcaggtgtggtggtgcgcacccgcagtcccagctactcaggaggctgaggtgggaggaacggttgagctcaggtgttgaggctgcagtgagtcgtgctcccaccactgcacaccagcctgggtgacagagtgagaccctgtctcaaaaaagaaaaaaaaattaataagcccagaaaggaaagctgtttgtcataaagaccttactttgaatttatgacatgctttccacctcaacaggtacttaggagcaggttttatttgatgaaaagtaggtgggaaaagggtaatgaaagtagcttcgtcgctgggcgtggtggctcatgcctgtaatcccagctactcgggaggctgaggcaggagaatcacttgaacccaggaggcagaggttacagtgagccgaggtcacgccactgcactctagtctgggcgacagagcaagactccatctcaaaaaaaaaaacgaaagtaggttctcaagcacacctcctagaagataaagtgtgaaaaaagagctgagaaagcacagcccgtgagactcaactgccttataaaaacactagcagcacgtgctggcctctcgcctcggctgggttctgtgcaaaaccccatacatttcaccttcctgacagccttgggcaggaggtgtgattgttctcccagtgttacagatgagcaaacttggtggaccccacttcacagttaatccagagctattctctgttagagacccaaggatgcctggttagtttgaaatgtgtgctagctcagagttaattcatattggccctgtggtgctagcagcaggtccaagggcagtaattggcagcatcttgaaaatcattcttaggatccttagtgaaactcccagctcttcctgcttcagagtcaccctgggctcccggggacttcaacacgccactacccttgtgggtggctgacaaggtgaagagaacactccttccccacttttggggtcaggctaccaagccgtgctgcctaagcggctgtgtgtctcagcgaccccagtgcaacagttctgcctggagtggaccctggaggagaggaacagccgagacagcaggcctctccctgcctccccagggcgccatgcaaacatcctccagcctgagaccaccctgcaaataagctccagtcagtcacccagcctgcccgctggccagctctgtctaggtgtgctaaatcctagctgggccaggtgcaaatctcccagccttgccgccacacctacctcatatcgcttgaagcttaatttaggggctggggttgctggagcagcccagtaggaaggcaaggataacacagtttttacttcactacaaatattgcggcaaaaaaacagatgtggggcagtaactcaccccgtcgcttggtccaggggtaactgcctgcagccccagccgacatcctggcctttcaacacggagctgtgactgacggccctgcgtgcgtggcttccgtgctctcagctccgcttgctcggtgaggtggacgtgaggggacaggggctgtccccttgttgctgcctcattgccagccgtgcaattcccacccagggcttctgttcggggtgtttcagggtttacagttgggtaactcgttgttgtctgctgtgcctggcttttcaatccaataggcctgcaagtcctccgagattcctcctcctaaccagcccggagttccccagggccgtgcccctccccagagagggccctcggagagctgctcccgcattgtcatgttgactgacctttccttctttttgtcttttctccacagtgtggcaaaggagcagagaactttgacaagttcttcacacgaggacagcccgtcttaacaccacctgatcagctggttattgctaacatagaccagtctgattttgaagggttctcgtatgtcaacccccagtttgtgcaccccatcttacagagtgcagtatgaaactcaccagcgagaacaaacacctccccagcccccagccctccccgcagtgggaagtgaatccttaaccctaaaattttaaggccacggccttgtgtctgattccatatggaggcctgaaaattgtagggttattagtccaaatgtgatcaactgttcagggtctctctcttacaaccaagaacattatcttagtggaagatggtacgtcatgctcagtgtccagtttaattctgtagaagttacgtctggctctaggttaacccttcctagaaagcaagcagactgttgccccattttgggtacaatttgatatactttccataccctccatctgtggatttttcagcattggaatcccccaaccagagatgttaaagtgagcctgtcccaggaaacatctccacccaagacgtctttggaatccaagaacaggaagccaagagagtgagcagggagggattgggggtgggggaggcctcaaaataccgactgcgtccattctctgcctccatggaaacagcccctagaatctgaaaggccgggataaacctaatcactgttcccaaacattgacaaatcctaacccaaccatggtccagcagttaccagtttaaacaaaaaaacctcagatgagtgttgggtgaatctgtcatctggtaccctccttggttgataactgtcttgatacttttcattctttgtaagaggccaaatcgtctaaggacgttgctgaacaagcgtgtgaaatcatttcagatcaaggataagccagtgtgtacatatgttcattttaatctctgggagattatttttccatccagggtgccatcagtaatcatgccactactcaccagtgttgttcaccaacacccacccccacacacaccaacattttgctgcctaccttgttatccttctcaagaagctgaagtgtacgccctctccccttttgtgcttatttatttaataggctgcagtgtcgcttatgaaagtacgatgtacagtaacttaatggaagtgctgactctagcatcagcctctaccgattgattttcctcccttctctagccctggatgtccacttagggataaaaagaatatggttttggttcccatttctagttcacgttgaatgacaggcctggagctgtagaatcaggaaacccggatgcctaacagctcaaagatgttttgttaatagaaggattttaatacgttttgcaaatgcatcatgcaatgaattttgcatgtttataataaaccttaataacaagtgaatctatattattgatataatcgtatcaagtataaagagagtattataataattttataagacacaattgtgctctatttgtgcaggttcttgtttctaatcctcttttctaattaagttttagctgaatcccttgcttctgtgctttccctccctgcacatgggcactgtatcagatagattactttttaaatgtagataaaatttcaaaaatgaatggctagtttacgtgatagattaggctcttactacatatgtgtgtgtatatatatgtatttgattctacctgcaaacaaatttttattggtgaggactatttttgagctgacactccctcttagtttcttcatgtcacctttcgtcctggttcctccgccactcttcctcttggggacaacaggaagtgtctgattccagtctgcctagtacgttggtacacacgtggcattgccgcagcacctgggctgacctttgtgtgtgcgtgtgtgtgtgtttccttcttcccttcagcctgtgactgttgctgactccaggggtgggagggatggggagactcccctcttgctgtgtgtactggacacgcaggaagcatgctgtcttgctgcctctgcaacgacctgtcgtttgctccagcatgcacaaacttcgtgagaccaacacagccgtgccctgcaggcaccagcacgtgcttttcagaggctgcggactttcttccagccattgtggcattggcctttccagtcttgggaggagcgcgctgctttggtgagacacccccatgcaaggtcctcagagtagccgggttctaccacaaacagaaacagaatgaaagtagctgtcagtccttgtagagagccgctctgtttcctcccagaagcatctcccagctaagctcgcattatttttctcctctggctgtttgcctgaagttcacagaacacacaaccatgaaaggctttttgaggtgagaggcccaggtggtcctggcaaccctgagtagaaggagagacggggtagggaacgggcccggccagaaaagaaccatttcttctgccatcttttatgcaccatagacatcgagactccagggggtcctggctcccctgtccctgcagccctgcaggtcagtgcatgatctgggttcgtgtcctgaccaggtgctcctcctttgatccgaggggaaagggactggtttatagaaagagcctaggagacaaaagggccagtccccctgcccagaatggagcagcagcaggacagacccccacgaggccccccagagaggaggaagatcccacggaggaacacatgaggttagggacccttgttcagcaccccaaacagcctgcctgtttaaagcaggcagcaggcttaggccttccctgcaaccccaacacccacaagtttgtttctctaggaaacacattcactgtctcagctggctgttactctctcagaccatatggcaaagttttccaa

SEQ ID NO: 1962 - DNA, 6000 bp, Homo sapiens
tcgcttggtccaggggtaactgcctgcagccccagccgacatcctggcctttcaacacggagctgtgactgacggccctgcgtgcgtggcttccgtgctctcagctccgcttgctcggtgaggtggacgtgaggggacaggggctgtccccttgttgctgcctcattgccagccgtgcaattcccacccagggcttctgttcggggtgtttcagggtttacagttgggtaactcgttgttgtctgctgtgcctggcttttcaatccaataggcctgcaagtcctccgagattcctcctcctaaccagcccggagttccccagggccgtgcccctccccagagagggccctcggagagctgctcccgcattgtcatgttgactgacctttccttctttttgtcttttctccacagtgtggcaaaggagcagagaactttgacaagttcttcacacgaggacagcccgtcttaacaccacctgatcagctggttattgctaacatagaccagtctgattttgaagggttctcgtatgtcaacccccagtttgtgcaccccatcttacagagtgcagtatgaaactcaccagcgagaacaaacacctccccagcccccagccctccccgcagtgggaagtgaatccttaaccctaaaattttaaggccacggccttgtgtctgattccatatggaggcctgaaaattgtagggttattagtccaaatgtgatcaactgttcagggtctctctcttacaaccaagaacattatcttagtggaagatggtacgtcatgctcagtgtccagtttaattctgtagaagttacgtctggctctaggttaacccttcctagaaagcaagcagactgttgccccattttgggtacaatttgatatactttccataccctccatctgtggatttttcagcattggaatcccccaaccagagatgttaaagtgagcctgtcccaggaaacatctccacccaagacgtctttggaatccaagaacaggaagccaagagagtgagcagggagggattgggggtgggggaggcctcaaaataccgactgcgtccattctctgcctccatggaaacagcccctagaatctgaaaggccgggataaacctaatcactgttcccaaacattgacaaatcctaacccaaccatggtccagcagttaccagtttaaacaaaaaaacctcagatgagtgttgggtgaatctgtcatctggtaccctccttggttgataactgtcttgatacttttcattctttgtaagaggccaaatcgtctaaggacgttgctgaacaagcgtgtgaaatcatttcagatcaaggataagccagtgtgtacatatgttcattttaatctctgggagattatttttccatccagggtgccatcagtaatcatgccactactcaccagtgttgttcaccaacacccacccccacacacaccaacattttgctgcctaccttgttatccttctcaagaagctgaagtgtacgccctctccccttttgtgcttatttatttaataggctgcagtgtcgcttatgaaagtacgatgtacagtaacttaatggaagtgctgactctagcatcagcctctaccgattgattttcctcccttctctagccctggatgtccacttagggataaaaagaatatggttttggttcccatttctagttcacgttgaatgacaggcctggagctgtagaatcaggaaacccggatgcctaacagctcaaagatgttttgttaatagaaggattttaatacgttttgcaaatgcatcatgcaatgaattttgcatgtttataataaaccttaataacaagtgaatctatattattgatataatcgtatcaagtataaagagagtattataataattttataagacacaattgtgctctatttgtgcaggttcttgtttctaatcctcttttctaattaagttttagctgaatcccttgcttctgtgctttccctccctgcacatgggcactgtatcagatagattactttttaaatgtagataaaatttcaaaaatgaatggctagtttacgtgatagattaggctcttactacatatgtgtgtgtatatatatgtatttgattctacctgcaaacaaatttttattggtgaggactatttttgagctgacactccctcttagtttcttcatgtcacctttcgtcctggttcctccgccactcttcctcttggggacaacaggaagtgtctgattccagtctgcctagtacgttggtacacacgtggcattgccgcagcacctgggctgacctttgtgtgtgcgtgtgtgtgtgtttccttcttcccttcagcctgtgactgttgctgactccaggggtgggagggatggggagactcccctcttgctgtgtgtactggacacgcaggaagcatgctgtcttgctgcctctgcaacgacctgtcgtttgctccagcatgcacaaacttcgtgagaccaacacagccgtgccctgcaggcaccagcacgtgcttttcagaggctgcggactttcttccagccattgtggcattggcctttccagtcttgggaggagcgcgctgctttggtgagacacccccatgcaaggtcctcagagtagccgggttctaccacaaacagaaacagaatgaaagtagctgtcagtccttgtagagagccgctctgtttcctcccagaagcatctcccagctaagctcgcattatttttctcctctggctgtttgcctgaagttcacagaacacacaaccatgaaaggctttttgaggtgagaggcccaggtggtcctggcaaccctgagtagaaggagagacggggtagggaacgggcccggccagaaaagaaccatttcttctgccatcttttatgcaccatagacatcgagactccagggggtcctggctcccctgtccctgcagccctgcaggtcagtgcatgatctgggttcgtgtcctgaccaggtgctcctcctttgatccgaggggaaagggactggtttatagaaagagcctaggagacaaaagggccagtccccctgcccagaatggagcagcagcaggacagacccccacgaggccccccagagaggaggaagatcccacggaggaacacatgaggttagggacccttgttcagcaccccaaacagcctgcctgtttaaagcaggcagcaggcttaggccttccctgcaaccccaacacccacaagtttgtttctctaggaaacacattcactgtctcagctggctgttactctctcagaccatatggcaaagttttccaagaaaatgccccgacaggggtgcccagcacactgcctgagggacaacagacatcagaacaaacccccagagagaaacagtcaaaatcagggcccggtgcagtgttgtcatgtggaacctgctttatccattgctgagtgttgaatgtgggtaatggttagggctttccagatctcagcagccaaagacagttattgttggaagactgtcatgtagataaccatgagcaatggctcgcctcagaatcagttcataaaattctatggtactggccccttcgtgggtattgtgtgaaatgagatggtggcgaggggtgcgctgtggaactgccgcagccacgcaggaggtccctgggggatgctttgggaagtccttgcccctgagcactgcctgattgccagggcctgtggaggtctaggccgcctggcagaatctagcaccgtccgaatccccgcaggacccatggagctatgaccacaccaggccattcaaatggctctgcattatcttcccttggaaggtggccactcctcggtggcagggcctttccctgaggctgcaggccgtgggctggcagcccgtctcttggcatttcaattgaaggtcaccaggtgctgggtttgaaaggaagtcactggagtgctgccaggggccgccctccaaggttaatgagaggcccacatccaggcaagaactaattcaaaaggcagatcagaaaccacaggagtcaaaattattgctccggcagtgcttcccttcctttcatccactggcctcgtgtggtccatgcagggccactgtctgccctttctgatgccacgtattaggctttcttactcagaattttgatagaaaaccatggggccaagagctctggaagcctggccggaaagaccaaggttcatgcagcccaacaaatgattgttgagcacctctcggagccaaagtccttaggcgagtgtggtgacttcctggaaggaggatgcagacttccagagagcccccccaacggacgtgctgagaagggagagggaggcgggggctgtagtcaggaaggagccagagaagaacagggtttgggtgcatccagaaatatgcctgcagtaggagggagaggaaggggtgccaccgtcaacggcttcccatcggaggtggttggtgcagatggaagtttctgtctgctggccctcaagagagtgttttgccagggacacagtctgttcctcctcagaaaacaccccccaaatgctaacaacatccccaccagctgctagaagcccctttcccctccccaccttgaagtagctcatagttctctgggcagagccagaccatccagtgtaccccagaggccagtaggttcctgcccattttcctctctggcttcctgccaagaattatggcagctgaggatgaatggagaagtaaaaacaactaacaccgcacaactaacaactaacaccgcagttcccacctgggttccacttagcaggagacatttcggagggttttttttgtttttgttcctgttttttttttttttgctggaatttgttttctcagtactgaaaagagaaaaagtgacaatcttgtatttttaaaagcctcggaaaggtgataccatctgacagtcattttctcacgttggtcttctaaagtcacctatttcttgtgtgtgcacatcacaccatttcctgtttctttataacccgacaagggtaggagtgcctgtttcccctgctgggcacaccagacaatcgtaatcacaaaacagacactgagccaggggcccaaagggtgtgatcatgagagttaccgggacagcagtaggcatgacagtcaccaggaaggacaagggtgctctgttgttagtggccacacaccaatttgacaaggagtgttgcgaaatttttatttatttatttatttattttgagatggagtttcactcttgttgcccaggctggagtgcggtggtacaatctcggctcactgcaacctccacctcccaggttcaagcgattctcctgcctcagcctcccaagtacctgggactacaggtgcgtgccaccacacccagctaaattttgtgtttttagtagagatggggtttcaccatgttggccaggatggtcttgaacccctgacctcatgatctgcctgcctcggcctcccaaagtgctgggattacaggcatgagccaccacgcccagccaaaatatttttttaaagtcattttccttaagctgcttgggctacatgtgaaatacactggacggtcaacattcctgtctcctcccatttgggctgatgcagcagatccagggaatgttacctgtttctgctgctagaagatccaggaaattgggaaggttacctgacgcacacatggatgaaggccatcatctagaaatggggtcaaccacaattgtgttaattccgtagtgtcagggattcttcgggaaggtcaacagtatgaaggattctgacccctgtgcctcccatttatgtgatcaggtgacagttaataaccgtggaggtcacactcagccatccaacagccttacagtgaccctacacaaaagcccccaaattccaaagactttttcttaacctaaaggaagaaattatttgttaattccagtagagcaactgaatatactgg

SEQ ID NO: 1963 - DNA, 6000 bp, Homo sapiens
ctgacacagggacccaggttccttccatgttgcagctctaccaccttcctcatagggctcccagtgtggccaggcttgtctgcttcaagccagggaaaggagagagagagagagacaccattttgtaagcgctaacccattagacaaatacattactttcacttgaactagacttatggcctcacctggatccaaggaaactgaaaagtagagtcactggctaggcacccatccacccatctaccagcaacaagtagaccaaatggaaggtgaaacatgagttttggtggagaattagggattgctgccacactcaaatcagaaagggctgtatttggctgagcacggtggctcacacctgtaatctcagcactttgggaggctggggtgggcagatctcttgagcccaggagttctagaccagcttgggcaacatggcaaaatcccatctctacaaaaaaaaacaaaaattagctgggcgtggtagcatatgcttgtagtctcagctacttgggaggccgatgtacgagaatcacttcagcccaggaggttgaggctgcagggagctctgatcgtgccactgcactccagcctggatgacagagcaagaccctgtctcaaaaagaagaaaaaattgagaaagtggtgtgtttgagggatgttgtatagttcacagaactgaaacatgagtttacaagacggcctagaaagacagtaactaaagggcctcagcctcagtagctggtggtcctatgtctttcagccagctcagctccaggcccctttctttctttctttgcatgttttaactcaacattcatattttgaaggaagataatctgaatggatttttttttttttttttttttgagacagcatctcactctgccacctaggctggaatgcagtggtacaatctcggctcaatgcagcctccacctcccaggctcaagccatcctcccacctcagcctcccaagtagcggggactacaggcatataccaacatgcttggctaattttttatttttatttatttatttttttagacagagtgtcactctgttgctcaagctggagtgcagtggcacaatctcagctcactgcaacctctgcccctgcgttcgagcgattcttgtgcctcagcctcccgagtagctgggactacaggcacgagccaccgcgcttggctaatttttgtattttcagtagagacagggttttaccatgttggctgggctggtcttgaactcctgacctcaagtgacccacctgcctcggcctcccaaagtgttgggattacaggcgttagccactgctcccagcctctgctaattttttttttttttttaatttttgtagagatggtggtttggaggagggcatctcgctatgttgcccaggctggtgaatggatattaagaactgaatgtttgcatccccctcaaaaattcatatgttgaaaacctaactcccagtatgatagtatttggaaatggggcctctgggaggttgagatgaattcatgagggtggggccctcatgatgagattagtgtccttataaaaagagccatcaggccgggcgcagtggctcatgcctgtaatccaagcactttgggaggctgaggtgggtggatcatgaggtcaggagttcaagaccagcctggccaacatggtgaaaccccatctctactaaaaatacaaaaatgagccaggtgtggtggcatgcacttgtaatcccagttacttgggaggctgaggcaggaaaatcacttgaaaccaggaagcagaggttgcagtgagctgagatcgcgccattgcactccagcctgggtgacagggcgagactccatctaaaaaaaaaaaaaaaagaagagacaccagagagctttcactctcccttctctgtgctaaaatgaagagatcatgctagcacacaattaggcgatggtcatctggacgccaaagaggggggcccttcctggaaactgaccactctggcacccttatttcagatttcgtgatccagaaatgtgagaaaaataaatgtttgttatctaagcctcccagcctgtagtactttgttatggtaacctaagcggactatgctagtggactaacacatcagctaaaacttggtcataaatgataggacttttttttttttttttgagacggcgtcttgcattgtcgcctgggctgtagtgcagtggcaccatctcagcttactgcaacctctacctcccaggtgtaagtgatgcttgtatcttagcctcctgagtagctgggaccacaggtgtgtgttaccacacctgcctaattttttatattttttagtagagacagggttttgccatgttggacaggctagtctttttttttgaaatggagtttcgctcttgttgtccaggctggagtgcaatggtgtgatctcggctcactgcaacctctgcctcccagattcaagcaattctcctgcctcagcctcccaagtagctggggttacaggtgcttgccaccacgcccagctaattttttgtatgttttagtagagacagggtttccctttgttggccaggctggtcttgaactcctgacctcaggtggtctgcccacctcagcctcccaaagtgctaggattacaggtgtgagccactgtgcccgacgatatcgtatctttcaaaggcaattttgggcattatacttctgtttcaggttgtttttaggtgcaagtacagaatagtggttcagaacacagatcctggaaccagactgcttatggctgaatcctgtctttgccatttactggctgtgtgaccctggaacaagttacataaacacttgtgattcagtgctctcttttgtgaaatagagcaaataacagtactacctcacagttgtgaagatcaagtgtattaatatatggtaaacactcagaacacttctgggcacatagtagtcagtattttcaagcaaaagaaactcaacttggcttggtatggtggtcaggcctataattccagcactttgggaggctgaggtgggtggattgcttgagctcaggacttcgagaccagcttgggcaaaatagtgaaaccctgtctttacaaaaaatgcaaaaattagctggacgtggtggtgtgtacctatagtcccagctatttgggaggctgaggtgggaggatggcttcagcccaggaggcagaggtcgcagtgagctgagatcgtgccactccactccagcctgggcgacagagctagaccctgtctcaaagaaaagaaaaaaaagaaaaaaaaaaagagaagaaactcaacttgacaatacaaaagaaatgtgtatcggatctcctacctgcaaaccttcagagatagagcaggtcagacctctcaaggtttccctacagttttcttattcagatttctaggactcacatcccttagttcagaagaacagaggctgctttcctacctccaaccagtaaacaaaaggcagaggctgtccaactggatgaatttaggtcatgtgcctgcccctgaaccattctcagtagctgagagaatgccacacagtgattggtttaggggtgaattccttccacattcttgcatttagggggatgggattatgctgattaagagtaggtccaaccctttatgaactctggctttacgatgaatgaggctggcattaatgcctgcaaaaatggacaaacttgctgtttgaatttatttatagtaagaaataaaccatgaaaacttttctaaaatgtaatcttttagaacacaaaaaaattgcagaaacaaaaatggcccagaatcctgatgctctgttgaccatctttgttttgtttgttcgtttgagcatatggcaaaaaatgcaaaattcagaaatgtgtaatgagcatagaatgttactataacaattgaaaaaacttgaacacacactacatactaaacaacagcatgaaatttcagtttttctgaatttgatgactgcagtgtggttatataagagaatgtcttttcttaggagagacaccgtgaaacagaggaaaaaggacatgattctgaaactttctcttaaagtaacatattaaaatcacacatatgtacacgcgtgcatatgtatacatatatatgtatagagaaagcaatagcaaatgtggcaaaatgttaagatttggcaaatctggataaagatttgcaattctgctgcatttgaaattatttaaaaataaaaaacttgagtttttggagaaacaggcataagaaaccttttgtttccatatttgcggcttctatacagtcttttatgatgcaattaaaaaaaaactaaactaaaaaatataacacaaatcttccctcccatagtagccagaaacccccgccgagtactttgggtgtcataataggaaaaaaatgcaaagcaatatgtttttctataaagattacttatttactaattagaatttttttattttcatgaagatcaacaacaaagtttttaaaataatgacttagagaatcattttgtggtatttgtttaaggctgtcgcccaggaaaacgcccaaggaccatgcacgcttcaaccctatggaaacacgaacggcccagggaaccgccccttcgcgctgcttgacgggatctggagtcctcccgctccgccccgccaggcgctcagggaccgcccggccgctccctcaccgcccggccgctccctcaccgcccggccgctccctcaccgcccggccgctccctcaccgcccggccgctccctcatctcgcgatgccatcctctttttttttttttctttcccccctcccactcgcccccaagccctatgactccctcccctcccaacgtgtttttcaaatccaccaatgggcacacagcttaggctcgaaccagccaatcggaatgcggagtcaccgggaaatttaaatcgcgccggccggctgcacgagccacacggtctttgagctgagtcgaggtggaccctttgaacgcagtcgccctacagccgctgattccccccgcatcgcctcccgtggaagcccaggcccgcttcgcaggtacagactcaggcggcggcccggcccgagcgctaacggcttgcccgtgggcggcgttcgccttttgggttgggggagggaggccccgggtccacgccgagcctggctctgcctcccgcgttgactaggcctcgggggcgacgttcattgaccaggcggctgagtttcgcggggtctgcgggtttagggcgccgacgctctgcaaacggcagcggaggccttaacgcgtcgcggccgggagaatcggagcgagccaggcttgagggcgaatgtcccgggaggacttgtggcggccctggtttcgcctcctcctttctcgttgcatcttccccggcgtgggggcaggggctgggggtggcagttgggagcaccgtctctgacacctaggccccgggggtggctctgccaccaagtcgtaggcgagcgtaatgaaagcaaagatagcaaattgtaaggagggctttgacttttgtcatcttctgaatgacgcacagctgatgtcatcctaattaagcgcattcactcctagtctctggaaatgcaaatcaaatatgcgagatgcggcactgcatttttaatgttgaccataatgtaatgatgaagcaaatttttatttaattttcgagtctgcacctattttggccaagtaaagacagtaaaatagggagagcctcctgaggatctgaatttattgccctggcacataatttttagctgtaagttgacttggttcccctactttgtcttgaattaactattagggactctggagtatcgaactaggctgtcagaaacggtggatacatgtggctagtccaaattgaaatacgctgtaagcttaaagtacacaaaagatttcaaagatggagtatggaaaaagaatgtagaagatgtcagttattttatatattgataacacgttgaa

SEQ ID NO: 1964 - DNA, 6000 bp, Homo sapiens
acaaaaaaaaacaaaaattagctgggcgtggtagcatatgcttgtagtctcagctacttgggaggccgatgtacgagaatcacttcagcccaggaggttgaggctgcagggagctctgatcgtgccactgcactccagcctggatgacagagcaagaccctgtctcaaaaagaagaaaaaattgagaaagtggtgtgtttgagggatgttgtatagttcacagaactgaaacatgagtttacaagacggcctagaaagacagtaactaaagggcctcagcctcagtagctggtggtcctatgtctttcagccagctcagctccaggcccctttctttctttctttgcatgttttaactcaacattcatattttgaaggaagataatctgaatggatttttttttttttttttttttgagacagcatctcactctgccacctaggctggaatgcagtggtacaatctcggctcaatgcagcctccacctcccaggctcaagccatcctcccacctcagcctcccaagtagcggggactacaggcatataccaacatgcttggctaattttttatttttatttatttatttttttagacagagtgtcactctgttgctcaagctggagtgcagtggcacaatctcagctcactgcaacctctgcccctgcgttcgagcgattcttgtgcctcagcctcccgagtagctgggactacaggcacgagccaccgcgcttggctaatttttgtattttcagtagagacagggttttaccatgttggctgggctggtcttgaactcctgacctcaagtgacccacctgcctcggcctcccaaagtgttgggattacaggcgttagccactgctcccagcctctgctaattttttttttttttttaatttttgtagagatggtggtttggaggagggcatctcgctatgttgcccaggctggtgaatggatattaagaactgaatgtttgcatccccctcaaaaattcatatgttgaaaacctaactcccagtatgatagtatttggaaatggggcctctgggaggttgagatgaattcatgagggtggggccctcatgatgagattagtgtccttataaaaagagccatcaggccgggcgcagtggctcatgcctgtaatccaagcactttgggaggctgaggtgggtggatcatgaggtcaggagttcaagaccagcctggccaacatggtgaaaccccatctctactaaaaatacaaaaatgagccaggtgtggtggcatgcacttgtaatcccagttacttgggaggctgaggcaggaaaatcacttgaaaccaggaagcagaggttgcagtgagctgagatcgcgccattgcactccagcctgggtgacagggcgagactccatctaaaaaaaaaaaaaaaagaagagacaccagagagctttcactctcccttctctgtgctaaaatgaagagatcatgctagcacacaattaggcgatggtcatctggacgccaaagaggggggcccttcctggaaactgaccactctggcacccttatttcagatttcgtgatccagaaatgtgagaaaaataaatgtttgttatctaagcctcccagcctgtagtactttgttatggtaacctaagcggactatgctagtggactaacacatcagctaaaacttggtcataaatgataggacttttttttttttttttgagacggcgtcttgcattgtcgcctgggctgtagtgcagtggcaccatctcagcttactgcaacctctacctcccaggtgtaagtgatgcttgtatcttagcctcctgagtagctgggaccacaggtgtgtgttaccacacctgcctaattttttatattttttagtagagacagggttttgccatgttggacaggctagtctttttttttgaaatggagtttcgctcttgttgtccaggctggagtgcaatggtgtgatctcggctcactgcaacctctgcctcccagattcaagcaattctcctgcctcagcctcccaagtagctggggttacaggtgcttgccaccacgcccagctaattttttgtatgttttagtagagacagggtttccctttgttggccaggctggtcttgaactcctgacctcaggtggtctgcccacctcagcctcccaaagtgctaggattacaggtgtgagccactgtgcccgacgatatcgtatctttcaaaggcaattttgggcattatacttctgtttcaggttgtttttaggtgcaagtacagaatagtggttcagaacacagatcctggaaccagactgcttatggctgaatcctgtctttgccatttactggctgtgtgaccctggaacaagttacataaacacttgtgattcagtgctctcttttgtgaaatagagcaaataacagtactacctcacagttgtgaagatcaagtgtattaatatatggtaaacactcagaacacttctgggcacatagtagtcagtattttcaagcaaaagaaactcaacttggcttggtatggtggtcaggcctataattccagcactttgggaggctgaggtgggtggattgcttgagctcaggacttcgagaccagcttgggcaaaatagtgaaaccctgtctttacaaaaaatgcaaaaattagctggacgtggtggtgtgtacctatagtcccagctatttgggaggctgaggtgggaggatggcttcagcccaggaggcagaggtcgcagtgagctgagatcgtgccactccactccagcctgggcgacagagctagaccctgtctcaaagaaaagaaaaaaaagaaaaaaaaaaagagaagaaactcaacttgacaatacaaaagaaatgtgtatcggatctcctacctgcaaaccttcagagatagagcaggtcagacctctcaaggtttccctacagttttcttattcagatttctaggactcacatcccttagttcagaagaacagaggctgctttcctacctccaaccagtaaacaaaaggcagaggctgtccaactggatgaatttaggtcatgtgcctgcccctgaaccattctcagtagctgagagaatgccacacagtgattggtttaggggtgaattccttccacattcttgcatttagggggatgggattatgctgattaagagtaggtccaaccctttatgaactctggctttacgatgaatgaggctggcattaatgcctgcaaaaatggacaaacttgctgtttgaatttatttatagtaagaaataaaccatgaaaacttttctaaaatgtaatcttttagaacacaaaaaaattgcagaaacaaaaatggcccagaatcctgatgctctgttgaccatctttgttttgtttgttcgtttgagcatatggcaaaaaatgcaaaattcagaaatgtgtaatgagcatagaatgttactataacaattgaaaaaacttgaacacacactacatactaaacaacagcatgaaatttcagtttttctgaatttgatgactgcagtgtggttatataagagaatgtcttttcttaggagagacaccgtgaaacagaggaaaaaggacatgattctgaaactttctcttaaagtaacatattaaaatcacacatatgtacacgcgtgcatatgtatacatatatatgtatagagaaagcaatagcaaatgtggcaaaatgttaagatttggcaaatctggataaagatttgcaattctgctgcatttgaaattatttaaaaataaaaaacttgagtttttggagaaacaggcataagaaaccttttgtttccatatttgcggcttctatacagtcttttatgatgcaattaaaaaaaaactaaactaaaaaatataacacaaatcttccctcccatagtagccagaaacccccgccgagtactttgggtgtcataataggaaaaaaatgcaaagcaatatgtttttctataaagattacttatttactaattagaatttttttattttcatgaagatcaacaacaaagtttttaaaataatgacttagagaatcattttgtggtatttgtttaaggctgtcgcccaggaaaacgcccaaggaccatgcacgcttcaaccctatggaaacacgaacggcccagggaaccgccccttcgcgctgcttgacgggatctggagtcctcccgctccgccccgccaggcgctcagggaccgcccggccgctccctcaccgcccggccgctccctcaccgcccggccgctccctcaccgcccggccgctccctcaccgcccggccgctccctcatctcgcgatgccatcctctttttttttttttctttcccccctcccactcgcccccaagccctatgactccctcccctcccaacgtgtttttcaaatccaccaatgggcacacagcttaggctcgaaccagccaatcggaatgcggagtcaccgggaaatttaaatcgcgccggccggctgcacgagccacacggtctttgagctgagtcgaggtggaccctttgaacgcagtcgccctacagccgctgattccccccgcatcgcctcccgtggaagcccaggcccgcttcgcaggtacagactcaggcggcggcccggcccgagcgctaacggcttgcccgtgggcggcgttcgccttttgggttgggggagggaggccccgggtccacgccgagcctggctctgcctcccgcgttgactaggcctcgggggcgacgttcattgaccaggcggctgagtttcgcggggtctgcgggtttagggcgccgacgctctgcaaacggcagcggaggccttaacgcgtcgcggccgggagaatcggagcgagccaggcttgagggcgaatgtcccgggaggacttgtggcggccctggtttcgcctcctcctttctcgttgcatcttccccggcgtgggggcaggggctgggggtggcagttgggagcaccgtctctgacacctaggccccgggggtggctctgccaccaagtcgtaggcgagcgtaatgaaagcaaagatagcaaattgtaaggagggctttgacttttgtcatcttctgaatgacgcacagctgatgtcatcctaattaagcgcattcactcctagtctctggaaatgcaaatcaaatatgcgagatgcggcactgcatttttaatgttgaccataatgtaatgatgaagcaaatttttatttaattttcgagtctgcacctattttggccaagtaaagacagtaaaatagggagagcctcctgaggatctgaatttattgccctggcacataatttttagctgtaagttgacttggttcccctactttgtcttgaattaactattagggactctggagtatcgaactaggctgtcagaaacggtggatacatgtggctagtccaaattgaaatacgctgtaagcttaaagtacacaaaagatttcaaagatggagtatggaaaaagaatgtagaagatgtcagttattttatatattgataacacgttgaaatactatttggatatgttgggttaagtaaaatacattattaaaattagtttcacttgtttcttttctcctttttaaaaatatggctactaggaagtttcaatttatatagcttgcattctatttctgatggagagccctctccaggaagtctcagccctttagagggaagggggacacttcccctttgggtaaagctatttcatagtgccgaaaacatgatgatcccccctctagtatacaggtgtggattcagtagatgcttgataattcagttcttatttggtactattattgacaaaggaaaatgataaaggaaatatttttctcttcccccatcttttagctttctccctttgtctcataaccatgtccaccaacgagaatgctaatacaccagctgcccgtcttcacagattcaagaacaagggaaaagacagtacagtgagtacctt

SEQ ID NO: 1965 - DNA, 6000 bp, Homo sapiens
tccctaaaacgcagccacctttgtaaagctaatgagaaaccaccaggctaggagcacagagaagcccgaactctgctaagattgccagccattattccaggggtcacaagctaggcaacttccccagttactcctgcagataacatcactattgcagaacctaagattggcctttggagatatcttttcaggttttttgcatgtctgacaccaacaactccacatggaccccacccaccactcctgcggcccccctcagaggtgactcagcctgcaggaggaccatttgccacacccctaaggttgcacccccaaccaatcagcagcaagcacccattgcctagctgccaccaccccttccccgaaactacatttaaataatgtctaatctctgagccttccagaagattgactaataataccaactcccacgtggtgtggccagccttgtgtcaattagtctttcttgactgtaatgccatgctctccatgaaatgatttcgtttgtgctgtgggaacccatcaggtggttatagaggtggcataggctatgaaaacactggttgtctaaaacagggggagataacaattatgaagggctagtgtacacgagtgtgtgctcactaacatgaggggactaaaggagtgtccccactagatgttcctgtttttctggtggatctggggaaaaagaggtggggaggatgctggggttgctatgcaattctcaccgagggaggaatttgctggtataatgattatacatttttctttctttctttctttcttttttgagatggagtctcgctctgtctgccaggctggagtgcagtggcgggatctcggctcactgtaaccactgcctcccgggttcaagcgattttcctgcctcagcctcctgagtagctgggaatacaggcgtgtgccaccatgcccggctaatttttgtatttttagtagagacggggtttcaccatgttggccaggctggtcatgaacttctgacctcaggtgatccacccacctcggcctcccagagtgttgggactacaggcgtgagacacctcaccgggcctcttccttttttctttcttttttttttttttgagccaaggcgggcagatcacttgaggtcaggagttcgagactagcctggccaatgtggtgacaccccgtctctactaaaaatacaaaaattagccaggcatgatggcgggtgcctgtaatcccagctacagggaaggctaaggcagcagaattgcttgaacccgggaggcggaggctgcagtgagccgagatcatgccactgcactccagcctgggcgacagagtgagactctgcctgaaaaaataataaataaataaataaataaaactatgatcaatgcttgagcctaagagtttgaggctgcagtgaactatggttgcgccactgcattctagtctgggtgacagagcaaggccttgtctcaaacaaaacaaaacaaagcaaaactatgatcaaatacatgtgtatgccttttctcctattaatcacttgtgtggtattcctgccaaaaatgcatcatctgaatctaatcatgaagaaatatcagacaaatctgaattaagggacattctactgtaggtgccaaggggccctctgaagtttcgctgcaaaaaatcaacttacaaaaggcagagtaatagtcaaaaatgtgtacaaatttatgtaacatgtacatatgggagccttcagaaggaagacccaaagatacaggggaaattgtacatttttatgcaaatgattgaacataaaaggtatgatctaatgctgatagactgagtggggaggcccagcaaggcctgtctgtctagattcttcttggcctcttggaacaggcattccttccttctgggtgtgggggaggaccctctctggaatggagtcttatggcctacagtcaaacaagctaggtcagataatttctttttggccagtttttacaccaaaagaaggagggaaagttaagagtaatatatttagggttttttttgtttgttttttgagacagagtctcactctgtcgcccaggctggaatgcagtggtgcaatctcggctcactgcaacctctgcctccccggttcaagcgattctcctgcctcagactcccgagtagccgggactacaggcacatggcacctcgctcggctttttttgtatttttagtagagacggggtttcaccgtgttagccaggatggtctcgatctcctgacctcgctatccacctgccttggcctcccaaagtgccaggattataggcgtgagccaccgcacccagcttatatttagggttttatggctggctttgggggtaaatgactctgttttctatgacctgccttggggaagaggattctaacttctctggctaggctcgggggagaatgcacctgagggagaggaggacagaaggtaaaaaaaaaaaaaaaaacaacttgctttgtgggttgcttctgaggccttcattttggggtattgttttctgagacccaacactacaaaacaatgggcttatacacttcaaaagtgttaatgtcagccagccaggcgcagtggctcacgcctgtaatctcagcactttggaaggctgaggcgagcggatcacatgaggccaggagttggagaccagcctggtcaacatagtgaaaccctgcctctaataaagacacaaaaattagccaagtgtggtagtacattcctgtagtcccagctactctggaggctgaggcatgagaatcatttgaacccaggaggcggaggttgcagtgagctgaaatcatgcaactgcactccagcctgggtgacagaggaagacatcatctcaaaagaaaaaaaaaaagcgttaaagtcacagaagaaaagttctttgttctattcttgtaattctcgtgtaaatttgaaattatttcaaaataaaaactcagcaaatttagctcttcatctaagtcttttctattcaatgctaagtacaccccttatcattgttacattaagagcaattggtttcctagaatattagaactagaaggtcagctgtcaagcagccatttgttcactccacaaagatttcctgagcacctttagcggggcaggcactgtgccaggtacagagaataaactagacaccctctctgctgttgaaggggcctgagatcagcagcttaataagacaaatgaggatcctgaggtcctaggggttaagagtgtgtattatagttctattattcaaattatgaatgttatgcatctctcgtagttttacttctgagaaaaccaaagtcatagtattacacagactacagacaggctaggcgcagcggctcacgcctgtaatcccggcgctttgggaggccgaggcaggtggatcaacaggtcaggaattcgagaccagcctggccaacatggcaaaatcctgtctctactaaaaatacaattagctgggtgtggtggcgagcccctataatcccagctactcgggaggctgagataggagaatcgcttgaacccagggggtggaggttgcaatgagctgagatcataccaccacactgcagcctgggcgacagagcgagactccgtctcaagaaaaaaaaaaaaaatgactagagatgattcaacaaatccctgaatctcccttgtctacaatcccactgggcagaactgtttttgttttttgttttttttctgtagagacagggtctcactatgttgcccaggatggagtgcaatgtcacaatcttggctcaccgcaacctccacctccggggctcaagccaccatcccatctcagccttcagagtagctgggactacaggcgcatgccactacacccagctaattttttggtattttttgtagggatggggttttgccatgttgcccaggctggtcttgaactcctgggctcaagtgatacgcccgcctcgtcctcccaaagtgctgggattccaggcgtgagccaccgcgcccggccctacactaggttttaacagtaagtgtgcatttcccactttgatgacggtgatggcgaaagcaaagaagtctggattccaagacctctagtaactgccaggttgcgggggaaaatgtctggtttcccagacagaaggcttagagcagcaccgcccgcttggtctcattctaagtccccgtccaccccttgaacagcgctcacaatcccacacccagggccccggaacccacgcctctgccagtaaagacgccattatcttaacaaaaggtaactggagcctctccccaaagagactggttcccgtcccattcttctccaatccgggtggatttggcaaaagcccaagtgaccctccctagcaattccgcaaagccccatctcccgccccagactccagagtctcccgaccactctcatttcggagaggcctaggggcacggacccggaagcgtgacagaggccgcggggtaagaggggggcaagtgcaggcgcaatccctcctcagcctcgttgtcccgcccccttcccaaggccccagccaacctgttctaggcgtcgccggtcctcggatttcttctttccgcctcgcgtggtcacgtgacgggggaggggcgggatacaaaaagtgctttattttcccactccccggacgcccagcagggcagtttcttgaccttcggagcccctttcccgaggatccgctcgggagcctcccctggccaggagcaggggattagtctgccccgcgaccggccccagccacgacgcggacatcgccccctctgtctgggccgctgtcactcacgcgccaaagggccacggagaaagaaggggcgggccggggcgggccgggcgagcggaggcggggacttgcgccgtcctgaggctgcctcctagggtccggccggcgctggagctgcggatttagattgtcactgccacctcggtcggtgcttacttcgctgccagctggtcgtcgccatgaacccggacctgcgcagggagcgggattccgccagcttcaacccggagctgcttacacacatcctggacggcagccccgagaaaacccggcgccgccgagagatcggtgagggcggcgggcgagacctccctcctttcccgagaaaagctggagactccctcgatgcggagtcaggggcgctgtggggcctaggccctctggcccagcgttaggggagccgggacccccacttcgaggaacagcctgtgtccctggtggggggatatcgccattccccaggtgtgtccgcgactctgaagcctattgtgattcagggagggtggaacggaggcccgagtgtctgtctgccttttaatgccctttaaccccctttcagagaacatgatcctgaacgacccagacttccagcatgaggacttgaacttcctcactcgcagccagcgttatgaggtggctgtcaggaaaagtgccatcatggtgaagaagatgagggagtttggcatcgctgaccctgatgaaattatgtggtttaaaaagtaggtatgccttagaacagagcaagtgttgttaagcctaaactttacagctgcggtctatggtggcctttcatcaccgtgcttggtgtttgaagatgcaaactggcatattttcatgcaactttataaagttatatgtgtggccgggcgcggtggctcacgcctgtaatcccagcactttgggaggccgaggcgggcggatcaccaagtcaggagatcgagaccattctggctaacacggtgaaaccccatctctactgaaaatacaaaaattagccgggcgtggtggcgggcgcctgtagttccagctactcgggaggctgaggcaggagaatagcgtgaactagggaggcggagcttgcagtgagccgagatcgcgccactgcactccagcctgggcaagagtgcgagactccatctcaaaaaataaataaataaataaataaataaagttatatgt

SEQ ID NO: 1966 - DNA, 6000 bp, Homo sapiens
acaataagtaatgtgggcatgtaaaaatttatccccaatggtcaatgaacattactacggattaactctacatcacattgaaatttagtcctcaactctcttcttacaaaacagaatccacagtagttggccttggctgtgctgtgtcatagattttatagggatcaattttgtactttgacaaagctcgtatctaaaaagtttaaagtacaaaatacatctcatctaactgatcttcacgacttctcaacacatgattaggaagcaatgttactaccagtttatcctaacctgtgcaatgagcagagcatgaactaaaggacagaagggataggctgccattgcagtgctgggggaccctgaaaccaaactaccaccttaaaagaaataatagtagccgggcgcggtggctcacgcctgtaatcccagcacgttgggaggccaaggcgggtggatcacgaggtcaggagatcgagaccatcagatcgagaccatcctggctaacatggtgaaaccccgtctctacgaaaaatacaaaaaaaaaattagccgggtgtggtggtgggctcctgtagtcccagctactcaggaggctgaggcgggagaatggcgtgaacccgggaggcggagcttgtagtgagccgagatcgcaccactgcactccagcctgggcgacagagcgagactctgtctccaaaaaaaaaaaaaaaaaaaaaaagaaagaaagaaagaaataatagtaaacacaatatacccttatttttctatttcctaaataagtactacacggttatccccgccatttctttttttttcttttttggagacagtctccctctgttgcccaggctggagtacagtggtgtgatcccagctcacggcaacctctgcctcctaggttcaagtgattctcatgcctcagcctcccaagtagctgggattataggcgtgtgccaccaagcccggttaattttgtattttagtagagaaggcgttttgccatgttggccaggctggtcatgaagtggcctggcctcaagtgatctgcccacctcagccacccaaagtgctgggattacaggcgtgagccaccatgccccagtcccattgtcttttctatcttacataaatcataatccacttagaaacaaaaaactctcaacatggatgctcttagatacgaatatttctaattaatcaaaatgaattaatgtaatcattatagattccaccagagggaacgacttctgcgtcctaatcatgtgtttagaagctgctcattaacatcagttaaaaatgttttctcagccaggcgcagtggcttatgcctgtaatcccagcattttgggaggaaggggcgggtggatcacaaggccaggagttcgagaccagcctggccaacatggtgaaaccccatttctactaaaaatacaaaagttagctgggtgaggtggcagatgcctcttcacctgctgataatggaaataaatggaaatgcagagagagagagagagagagaaagaaagagagagaaagaaaaagaaagaggaagagaaagagaaagaaaaagaaaggaaaagaaagaaaagaaaagaaagaaagaaagaaaagaaaagaaagaaaggtgatgtatttcacaattaatagcatgtcacggttaactggcagcattctttctttcttagtggtacacaaaacactggtgtgagttataatcgatgagattatataaccgaggctttaactcgatagcatgcgataatttccaggactcatttacaaaccccttctcttacttaaaaactgatctccttgtcatatcctaaggacattggaagtgtgtcaaagggtgtgttaaagtttgtactttaatacttcacatgaaaaatgatacacaaaacaacttcccggtgtccatgaatctttaacccgcataaaagactttgttctatttcattgtgacctcactcgagtctggttcacattatcaacaggtcacaggttatgaaatcatctctatcagctttgaaatgcactgcaccacccattcaaacacacacacacacactcaacccacttttttcctgacgtttcaagaaggaataaaatcttactaattttttcaaatttacaaacacaacacaggtatcagtaacataatcttctaggaggagttactctatctcaatatccccacagccatgagttacaaacttcaaaaacaaaacagaccatttggaagtatgctgatttgaactaccaaaaataaataaacaaaattttttcgtttaaaactgagtggagctctgaggaaagtccaaagtgccagagtaaaccatttcatcttcacaaaaataacccaagtcaagctgaaaatcgataccaaaggcactagaggcagtgaccattattaccataaaggcagaacgtgcaacatgttctatttagcttggttctagtctatacaccactcatacgatttagtctttaccgatgaaaatactggagttcctttaaaatggagaaacctaaaagagaaaatgcccaggaataaatgagaaaaaaatgctataggccaaaataatcttgtactaggatcatgtaatagtgtttgtttaggttaaggcaaaaaagtcttttttttttttttttttttttttgagacagagtctctctttgttgcccagtctggagtgcagtggcgtgatctcggctcagtgcagcctttgcctcccaggttcaagggattctcctgcctcagcctcctgaatagctgggaccccagaagcgcaccaccaggcccggctaatttttgtatttttagtagagagagtttcaccattttggccaggctggtctcgagctcctggcctcaagtgatccacctgccttggcttcccaaagtgctgagattacaggcatgagccactgtgcccggcccgaagtccttatttttatttatttttaccgttccttgtggagcagggtggatcacgaggtgaggagtttgagaccagcctggcaacatggcgaaaccccatctctactaaaaatacaaaaattagccgggtgtggtggcgggcgcctgtaatcccagctactcaggaggctgaagcaggagaatcgcttgaatccgggaggtggaggctggagtgagccgagatcgtgccactgcactgcagcctgggcgacagagcgagactccgtctcaaaaaacaaaaacaaaaacaaaaaacacaacaaaacacatggtctgaaaaaaggatatactctcttccacactagaaccaaggcaggtttttatgacgtctctctcatatgcacaagacaaccattcaagcactgtcatggattcagaactactgggttcttagactttctattcattcagaggcgtcacagatcattcttcatccaggtccacactaccatataatataatctgctattgctccaaaatatttaaatggtcgtgcaactaaaaaaaaaaatgctcccagattcagaattttagcagtcctccttacaaagagcaaaatgattctgcatttaaatcagtcaaatttgagttgcttgggcagaacaatgcttttacaacatccttgaaactgtactcttgagaacaaaaactcctgcatttccatttattatcagcattctacaaacacgtcatcccacgaaaaggcttggatacaaaagtgatcacattatttttcacacatataactttatttatttatttatttatttattttttgagatggagtctcgcactcttgcccaggctggagtgcagtggcgcgatctcggctcactgcaagctccgcctccctagttcacgctattctcctgcctcagcctcccgagtagctggaactacaggcgcccgccaccacgcccggctaatttttgtattttcagtagagatggggtttcaccgtgttagccagaatggtctcgatctcctgacttggtgatccgcccgcctcggcctcccaaagtgctgggattacaggcgtgagccaccgcgcccggccacacatataactttataaagttgcatgaaaatatgccagtttgcatcttcaaacaccaagcacggtgatgaaaggccaccatagaccgcagctgtaaagtttaggcttaacaacacttgctctgttctaaggcatacctactttttaaaccacataatttcatcagggtcagcgatgccaaactccctcatcttcttcaccatgatggcacttttcctgacagccacctcataacgctggctgcgagtgaggaagttcaagtcctcatgctggaagtctgggtcgttcaggatcatgttctctgaaagggggttaaagggcattaaaaggcagacagacactcgggcctccgttccaccctccctgaatcacaataggcttcagagtcgcggacacacctggggaatggcgatatccccccaccagggacacaggctgttcctcgaagtgggggtcccggctcccctaacgctgggccagagggcctaggccccacagcgcccctgactccgcatcgagggagtctccagcttttctcgggaaaggagggaggtctcgcccgccgccctcaccgatctctcggcggcgccgggttttctcggggctgccgtccaggatgtgtgtaagcagctccgggttgaagctggcggaatcccgctccctgcgcaggtccgggttcatggcgacgaccagctggcagcgaagtaagcaccgaccgaggtggcagtgacaatctaaatccgcagctccagcgccggccggaccctaggaggcagcctcaggacggcgcaagtccccgcctccgctcgcccggcccgccccggcccgccccttctttctccgtggccctttggcgcgtgagtgacagcggcccagacagagggggcgatgtccgcgtcgtggctggggccggtcgcggggcagactaatcccctgctcctggccaggggaggctcccgagcggatcctcgggaaaggggctccgaaggtcaagaaactgccctgctgggcgtccggggagtgggaaaataaagcactttttgtatcccgcccctcccccgtcacgtgaccacgcgaggcggaaagaagaaatccgaggaccggcgacgcctagaacaggttggctggggccttgggaagggggcgggacaacgaggctgaggagggattgcgcctgcacttgcccccctcttaccccgcggcctctgtcacgcttccgggtccgtgcccctaggcctctccgaaatgagagtggtcgggagactctggagtctggggcgggagatggggctttgcggaattgctagggagggtcacttgggcttttgccaaatccacccggattggagaagaatgggacgggaaccagtctctttggggagaggctccagttaccttttgttaagataatggcgtctttactggcagaggcgtgggttccggggccctgggtgtgggattgtgagcgctgttcaaggggtggacggggacttagaatgagaccaagcgggcggtgctgctctaagccttctgtctgggaaaccagacattttcccccgcaacctggcagttactagaggtcttggaatccagacttctttgctttcgccatcaccgtcatcaaagtgggaaatgcacacttactgttaaaacctagtgtagggccgggcgcggtggctcacgcctggaatcccagcactttgggaggacgaggcgggcgtatcacttgagcccaggagttcaagaccagcctgggcaacatggcaaaaccccatccctacaaaaaataccaaaaaattagctgggtgtagtggcatgcgcctgtagtcccagctactctgaaggctgagatgggatggtggcttgagccccggaggtggaggttgcggtgagccaagattgtgacattgcactccatcctgggcaacatagtgagaccctgtctctacagaaaaaaaacaaa

SEQ ID NO: 1967 - DNA, 6000 bp, Homo sapiens
agctgagatcacaccattgcactccagcctgggtgacaagagcaaaactccatctcaaaaaaaaataataataataaccagcctgggtaacatggtgaaaccccgtctctacaaaaaatgcaaaaattagcagggtgcgttgttgcacacatgcctgtagtcccagctactggggaggctgaggtgggaggatcacttgagccagggaggcagagattgcagtgagctgagactgtaccactgtactgcagcctgggtgacagagtgagaccctgtcaaaaaaaaaaaaaaaaagagagagagaaagaaagaaaaagaaagaaaagaaaagaaagagaaaagagaagagaaagggagggagggaaaccttcctgtgtgtcccctgtgcacctccctcttcgagcatccttacagctctgggacttgcccaaacctttctccccaaaccacacacccacagagtctggagcagggccggagtttccccggctcctcgggtgtgtcagcatcacacatccctccctgtctccctgctgccaaccagttccaccactgtgcacctctgccccaattccacctcccacgcctgctgctgcaccttggacttgttttcctgaaattgcatgccatccactctcccttctacttctgctgcgtccctcttgccctatcaggacctgtggactcaggactcccgggctttctcccccatctctcttccccgttgggcctcactaccatttcagccactttcctggcagcttcactcctgccccaagaccccagcctccaccctcctggttctgccaactgttgagtgcagaaagatcacagaactccaaggatttggagctcaatgatttcaggggctcactggcattcccctgctctgcctagaaatccttcctgtgtcctggccacacccccctccccggcgccaccacagctagtccagaaattcccctgcctcacaagaacccacttcctctcctcccctgtccctcccggcttattgctttatgagccagctagaatcgaggccacaggcagccgttcttcctcctaccatcagacactgaaacggccaccgaccatcagacactgaaacggccaccgttagctccttcctctagtctaagaggaagcggggtccctcctacctaaggggttaccacagttcttccctgtccacatataaggtgttcaagcctcctctatatggaaataatagtctcaatgacaagaagtcatcttctacactagagtctgacctacctgcccatgaccttccctccctttgcagacaaacctcctaaaagaacatctgtgctccgtataaccccttcctcttcccaggcctcaccccactgcattctgactgctttttataacccaggcccttcttctttgctccaggttcttaatctttttttttttttcctgagatggagtctcgctctgtcacccaggctgggagtgcagtggcacgatctctgcttactgcaacctctgcttcctgggttcaagcgattctgcctcagcctccctagtagctgggattacaggtgcccgccaccacacccagctaatttttgtctttttagtagagacagggtttcaccatgttggccaggctggtcttcagctcctgacctcaggtgatccgcctgcgtcagcctcccagagtgctgggattacagatgtgagccactgcgcctggcctttttcctttttttttccttttttttttttttttgagacagagtctcattctgtttcccaggctggagtgcagtggcgcaatcttggctcactgcgacatccacctccccggttcaagtgattctcgtgcctcagcctcccaagtagtcgggcctgggtaacttttgtatttttagtagagacagggttttcgcttgttggccaggctggtcttgagctcctggcctcaagtgatctgcttgtcttgccctcccaaagtgttgggattacagtgttgggagccaccgcgccacgccccgattcctctctgacctgtgtcagcactggggctaacagaagctgagacacacaggcaacctcatgtttcaaatgagttcattgcctaagggtagcctgtatagacagctaggcaggatgacaccctgaattctgccctcaggctgtgctataaatgacctagactagaggaaagggcaggcagagcctttatctcaaacagcgtcaaaagaaaacaatgtaatagcctagaacattgaatctatttatttacttattttgagacagagtctcactctgttgcccaggctggagtgcagtggcttgatctcggctcactgcaacgtctgcctcccaggttcaagcgattctcctgcctcagcctcccgagtagctgggtttacaggtgccagctaccacacctggctaatttttgtatttttagtagagacggggttttgccgtgttggccaagctggtcatgaactcctgacctcaggtgatccacccatctcggaaatctatttattaaagtgctcagagagcagaaagagcatgagtgcaaaaaatttttttaacttttttttttctcttgcaagctatgactggggaaaaaagaaagaaaaaaaaaatgtcagcaatgcacagtggctcacgcctataatccatgcatgttgggaggccgaggcgggcagatcacttgaccccaggagtttgaaaccagcctgggcaacatggcgagaccccatctctacaagaaatacaaaaattagctgggtgtggtggtgcgtccctgtagtcccagctcctcaggaagctgagatgatcacctgagcctgggaggtggaggctacattgagccatgattgagccactgcattccagcccaagtgacagagcaacaccctgtctcaaaaaaaaaatttttttttttaggtggagtcttgctctgttgcccaggctggagtgcagtggcgtgatcttggctcactgcaacctccacctcctgggttcaagcaattctcctgcctcagccttccaagtagctgggattacaggcatgcaccactacacgcggctaatttttgtatttttagtagagatggggtttcatcatgttggccaggctggtcttgaactcctgacctcaagtgttccacatgccttggcctcccaaagtgctgagattacaggtgtgagccagttcacctgtcaaaagaaagaaaatttttaaaaagtctctcggagatgtctttcctgtttggtgccacctgaatagtggcaaacctttccattatgtatcaggtcaccaccgcatctgctagaagcccccctcgtccagggtgggatgacctgctcctataaagccaaacttaccgggagctcagtctcttggatttttaaaatatgggtgtctcttttccccggttcctgatgacattgtgtcccaaggtgccaagggggcctttccctcagtccagaggggttttctgaccacctgctaagttccagacacgggccgactgtgcatgacaggcccacggttctaggcccaaatactcagttgcctttgccccatatgctgttattgtccacatcacttgctgccaaaacccaggactgagctgtggagggaacagctggaatgcaccttggaggacgttgttgacacgccgctcagtcgccgttcgtgccctggtgtttgtcttgcagacagaggctccgtggtgaaggcgcgcgtgctgacctgtgtggaggggatgaacctgcccttgttggaacaagccatccgggagcagagactgtacaagcaggagcggggcggcagccagtaggaaacagcagcctagcaacaccctcacctgcttcagagcccgaaccctctggagctgcaggagcccgggagagcacagacgcctccccagcgacggccttgtctggagctcgaaagccgaggggcgggtgatgaatccagccccttcccctactttgggattggctcagcaatgagaacccagaaagcatgccataaatccgacagccccaccccaggagactgcaggtggccgagcttgggcgccggggccgtgcttggtgtggggccatggagggttccagaaggtcctggtgaataaaggcccagggggcgtgctcttgaagtgtgctcgtggtgcagcgccggcgggggccaggagggggagctgcaacccaggctgtgggctgcagcctctcagggcttctggtgaattctgggcctggggcctcagggtagggcaccaggggcccaggggctggggtggggggcccaggatgcaggggtctgcccctggccaggctctgccttcagaggaggctgagcgtcgtcacacgggccgggctgaggccctgggccctgaccgtgcagcctaagacaggactgtggctttaagaccctcctgacccctgacctctgcccccagtggccctggcccctgggcagcccttcctggccgccatgtgtacccagagcctgggactggctgggctgggcagtgacccaggtgggaaagggtggtcttgccctctaaggcccggcacaagtgagaggcctgggggtccatgttgggctgggctgggcgaggggtggtctctgacttcctgggggttctggctgggatgggcagggggctgggtgggagagtgtgggccctgccctccgaggccgggcatgggcgagaagcctgggggtcctggctgaactgggctgggtgaagggggccccctgacccccttggggtccgggctgggctgggtgaggggcggtttccgacccccagccaggttcccaggcaggatgagctggggttggggtggctaggccgtgggccttgggagctgggcagtctgggctgggctgggctgggcagggcgccacatggaagctggaggagcaacgggagcgctgggcgtggggtgcaaattgcccggtgccttctgtttcccaggcagctctgtggccatggatatgttccagaaggtagagaagatcggagagggcacctatggggtggtgtacaaggccaagaacagggagacagggcagctggtggccctgaagaagatcagactggatttgtgagtgctgggacggcccctgagttacccaccctgggccatcacaacctgggcgctccctgatccgttccctctttcctggagtccacgtttaactcctctgggtgctgcccagcagcccttacctgtcctctccccagttcactgccttctgaccagcctttgccggggccctgactgtggagtttggtggatgacgtgccaaggagcacaggtctccattgccggggccctggtcattctgtggggttaaggagaagccgatccccctggctggaagtgcccttcttggcccaagtctctgcccacggctgtgcccttgtttcttgcagggagatggagggggtcccaagcactgccatcagggagatctcgctgctcaaggaactgaagcaccccaacatcgtccggtgagttggggattgaggtggggaagctgggatggcgaaggtagcatcctgactgccatctccctgtcagactgctggacgtggtgcacaacgagaggaagctctatctggtgtttgagttcctcagccaggacctgaagaagtacatggactccaccccaggctcagagctccccctgcacctcatcaaggtagggaaggaagggcagggaaggagaggtgacaccccatccctgccatccctgtccacgcagcacctccgctcagctggctgcacctcgcgctcgtttctccagagctacctcttccagctgctgcagggggtgagtttctgccactcacatcgggtcatccaccgagacctgaagccccagaacctgctcatcaatgagttgggtgccatcaagctggctgacttcggcctggctcgcgccttcggggtgcccctgcgcacctacacccatgaggtattgtgaga

SEQ ID NO: 1968 - DNA, 6000 bp, Homo sapiens
aaaaaaaaaaaaaaaagaaagaaagaaaatgaaaaattccagagcagtgagtgaagtcatagtcattggcagtggggcacaggctctgcaggtgattcctacgtgctccctagttggaaacctcagtgctaaatgaccccagaagtagatgcggccctcagccattccctaggcaggcacccttgtgtgcatctgttgccttctctccagaaagcagcttttcttaagggatagcccgaggccaaactcaggagtcctcttagtacttaccacatccgagcgtggtggcacgcgcctgtagtcccagctactggggaggctgaggcaggaaaatcacttgaaccagagagacggaggttgcagcgagccaagattcctttttaaatagcggacattttaaataataataataaaaagaaaaataaataatctgtggtgaaattcacataacatcttaaagtgcataatcagtggcattaagtacactcacaacgttgtgaaaccactacgtctatgtagttccaaaacatcttcatcaccccaaaaggaaatcccatgcccagtaagcagttctacctcattctccctctccccagagtctctggcaaccaccaacctgccttctgtctacaaatttgcttattctggacatttcgtagaaattgactcatacaataggtgaccttttgcatctggactctcactctgcgtcatgttttcgaagttcattcacgctgtagcatgtgtcaggacctcattcccttctatggacaaataatattccattgtgtgactaggccacattttctttatccagtcatccatcaacatttgggttgtttccacctcttgactattgtgaataatgcttctatgaacattcctggatgagtttttgtgtggacatgtttttatctctcttaggtacagaccagaactagaagtggaattactaggtcatatagtaaccctatgcttaattttttaaggaatctgagtctctcattctaaaagacatttttctcaagcaccggttggtaaatctggcttagttttccacatctgtgaagaccattttcatgggtgacatgccagccttccttgagcatacgtgacacgcaggctgttggtttagaactagaattaggttcctgctgttctgctcagggtccttgcagatgagaaacccctgccacactgccctcctgcagcagccgtcacccagacagccacccaaccatgcttcttttttttttttttctgagacggagtctcgctctgctgcccaggctggagtgcagtggcacgatctcggctcaccacaaactccaccttccaggttcaagcaattctcctgcctcagcctcccaagaggctgggactacaggcgcgcaccactatgcccagctaatttttgtatttttagtacagatggggtttcaccatgttggccaggctggtctcgaactcctgagctcgtcatctgcccgccttggcctcccaaagtgctgggattacagtcgcgagccaccgcgcccggctccaagcatgcttttaaaaactaaattgatcaggtgtgactcatgcctgtaatcccagcactttgggaggccgaggtgtgcagattgcttgagtccaggagtttgagactagtctgggtaacagagtgagacccagtctctagaaaaaatacaaaataaaaaaaaaagtagctgggggttgtggtgcgtgactgtagtcccagctactcaggaagctgaggtggaaggattgcttgggcccaggaggtggaagttgcagtgagctgggatagcgctactgcactccagcctgggtgacagagtgagaccccatccggaagaaaaaaaaaaaaagatttgaggcggaggttgcagtgagctgagatggcgccactgcactccagcctggggtgacagagcaagaccctgtctcaaaaaaaaaaaaaaaaaaagactcaggcctccgagacaagcacgctcttcagcgtcctgggctttgctgtggctcctggctcccgctcagcctttcccaggcggcatgctcctataccactaaaggctgcaaattgaggtgacagatctgctagtgggactgcacatgcctcttccctcaggaatgacacgcctgccaagagctgaaaggaggcagagccaaccctgagtttatcatcttttgcagttattgagtgttttctttctttagaagctcaaaattctcaatctgagagtcaagtaatggcagatacttgtcacacggcaattggaatcggaactcggtctttttttttttaggcggagtttcgctcttgttgcccaggctggagtgcagtggcgcaacctcagctcactgcaacctccgcttcccgggttcaagcaattctcctgcctcagcctcctgagtagctgggattacaggcatgtgacaccacgcccagctaattttgtatttttagtagagacggggtttcaccatgttggtcaggctggtctcaaactcctgatctcaggtgatccgcccgcctcagcctcccaagatgctgggattataggcgtgtgccactgaacccagtcttaaatggtttgtgcttgtttgcaaatgccgcacgtcctgatgctatagatttttctaggccatgcagagtcacgaagactgatgtgtctttttaactctgcattgggaccatctgtacctcaagggacccatcagcctgctgtgcccagccaggaggaggtggagtgttggacggtgcctttcctggccctccattgctgcaatgcacccggctccctccctggggtgccgtgctgcatctgccagcgattccaatgggagaggtctgcctgcgggcatttcttgaggatttttgtgtgcagaaccttgctgattatagttctagggaagatgcgaaaagagaaaagaaaaggtatgtcctccagccacttgtatgctcctcactgatctgaaaggagcactctctgggccctctcaatttttttttttttttttttttttttttttttgagatggagttttgctcttgttgcccaggctggagtgcaatggcgccatctcggctcaccacaacttccgcctcccgggttcaagcacttttcctgcctcagcctccggagtagctgggattacaggcatgcgccaccacgcccggttaatttttttttatatttagtagagacggggtttctccatgttggtcagcctggtctcgaactcccaaactcaggtgatctgcccgccacggcctcccaaagtgttaggattacaggcgtgagccactgcgcccagcccctcaattttgttttttaaaataatttcagtattagcctgcatgcgttgaggtatcagagacattaaaatatcaaacttgcaggtcccctgaggtcaggagttcaagactagcctgaccaacatggagaaaccctgtatctactaaaaatacaaaaattagctgggagtggtggcagccgcctgtaatctcagctacttgggaggctgaggcaggagaatctcttgaatccaggaggtggaggttgcagtgagccaaaatcgcaccactgcactccagcctgggtgacagagtgaggctctgtctcaaaaaaatatgttaacaaaataaaattaaaaaatcaaactctccagcccttataaaggtaatcacttggttacccattcagtttcaaaatggtgagtttcaggcactgctaggatcatcaaatggtgccttgaaggaaaaatgacatcttaactcattctcaagatgccagtcacgttgccgtgatcaggactttagggcaatgagcaaagagaacaaggaactctgctgtctgaaacagctctcctgtcggatcagcctagcgtcactcctgtagctgcacaaaagctcatgggcaccagcctggaattaggcgtcccttgtcctaagcacccctccccagccccagctgtccagcccatcctgtctaatcattacttaaattaccagggttgtgtctggaaagaattgaagggtttgaccttcagaagacaagcctccaggggaggggaatttctattttttggcatgtggataatgaacacaggggagggcaatccctgctccgggctccatgtctttttccagcttgtcaaaataggacgtccacaccctcctttgcccccaagtccccccactaattggcatcaatcgaggaagtctgagcgactgcatgtttaggtaaaagaggaaaggggtggggtggggcgcagtggctcacgcctgtaatcccagcactttgggaggccgaggcgggcagatcacaaggtcaggagttcgagactggcctgaacaacatggagaaacaccgtctctactaaaaatataaaaattagccgggcatggtggtgcatgcctgtaatcccagctactcaggaggctgaggcaggagaatcgcttgaacccaggagacggaggttgcagtgagccaagattgcgccactgcactccagcctgggtgacagagcaagactccatctcaaaaaaaaaaaaaaaaaaaaaatagaggaaaggagtgaacccctgagtggccagctgggtgcctcaacggggtgtctccaaaggcagcttgtgcttgtttgtgaccagggtgacaaaggacttcactgtcctgtagcacagatgaggttccaccctcaggtgggtggaaacagcccaggccattagtgcaaatcccctgcctggcccagggccacgttcagcccactgtctgtttgctttgggacccacccaaggtcacattttagcttttgagaaatgtgaaagtggaaaacattgcaaaacaaaaagcccctggaaaactgtgcacacacccatcccctcagcctgatgctccagcttggctgctaggagatcaatgcagctctgccttcctgctccctgtgcagaggtgccggctcctgcttcctggttcccagctttccttttgggaactgcctgaggtggtttgacacacagctgttgggcttctcttcccttgaggtctctgaaccagggcacccatgcaggtaaacacaaaagcggagtggggtggaatgggggtgctggctgtagcctcggcagaaggggacccgcctctctcctcacgagtatccaggatgtgggactggatattgaccagaccagaacccactttgggcccacatgggagctaatgtcagcaggggcctgtggactgttcccattgaacggctcttcctgctagctgtggttctcagtgtggctggcctggtccagcctggcacaggacaggacctgggagggccacacatttcccacctccattttgtgcccaggggacctgtgccagcagcaagcccttcctgcaaagcagtgtggggaattctgccaggctgcagatggatgggccggtctgcttccaccccttcctcaggtgcaaagttggggttttgcgatcctgtaattactatgtttagcaaagttgccaatttctccctttagggtaattttcaaaaatggaaaccaattttctttgtaggggcttctgctggataaaccaaccaccacaaagtctacagaaacatgtctccaccccagcctcactccacaaatgcttctttggtggaaggctggttcctggtttgtgttcatttgggtagagctggggagggagtaggagtcagaaatgaaggttctggagcccaaaagccactgttcccagactaagtttgcctaatcatctgtggttggcaaaacccctcaaagatgtccacgtcataatcactggaacttgtgagtgcgtgttaccctatatggcaagagggattttgcagatatgattacggattttgagaaggggagattgtcctgggttctctgggtggggtgaatgtcatcacagggtccttatatgagggaggcaggaaggtcagagtcagaagagttgtgtcaatgggagcagaggtcac

SEQ ID NO: 1969 - DNA, 6000 bp, Homo sapiens
ctcttcctacagggaggtaggccagtcggccgcggtaggtgcgcagggctgccagacgcaggaaggtgcccagagtgaagcgcatctcccccagacgccgatacttctcactctctaggtccacatcagcaatgaagccccaggccaggctgagcacagagaagaggcgcagccccgaagccgtgtgcagagacagcaggttcatgggtgacagcagccggcggcacagcaatagcgtgcagttggtcaggaggtcttcattggtgacctgctcatagctgcagggggaaaaagtcagataaggcaggacaggagcccccatgtatcccccgcttcctcctcccggggagtgggagctggcaaagcgccatgtggtccctggggagttggcaggactggtaggtgacagatggagcaaatggaagcagtcagctggggtcaccaggagagggccccaggactaagggagaaggggaaatggaaatgatctcagcctatgggagcttagacaagaaaacccccgcggtagaggagcactgacgggaaacaggcctactctggccctgggctctcacccagcataatggttcaaggaagctgccagcgcgttgccagagcctgctgggaggctacacaggggcttctggatggcggtctcccagtcaggccgctccatgagcccgttcaccacctgttgaagcacacgtggcctcagcctgggacgcaccgcgccaagccccaggcctagccgcgcagtgcggtcctcacctcgtgcatcagcccgtctccagacatgaccaccagagcgtcccagcggcccagctcctccgaccgcaccagctcccgcgcgtggttccgccgctctgcagggagaccggcagctatcaggactgggggggtcccctgccaggggatgctcccgaaaccccctccgagaggtactcaccagtgagcatcagcgtgaaggagatttcagcctcagccaaaaggggctgcacgtgactccggaagagctgcaaggccttgcccttgccgccgcgcgggttcagcagcaccagcacgcggcagggccgcgggagcacgccccgggggccgcccgctgagaaaacaaaaccaaagaggccacgtccgcaaccgaccactagggggccacgggtaacaatggggcactagtgtgggaacttggtgcccgaaacaccccggtaattgaccctggccagaggagcggcctttgctgggagacctggggtggggacgcggcgcccctgccacccccttccttggctcagattcggccggcttctggcctcgtgagggataatgtttctcccgatcgtccacagcccctttcgtccagctgggcgttccatcattcctggcgaggaacaggaatccccctacagcccttcccagcaggaaccccacaaacctggatccataacctcgacccgcggctcccgctgccagggggtccctggcgctgtgggggcgctgcccgtggcggcggctcctgccttcagctccttatcggtgctgcccaggcgggcgtcgcagggccggctgtggggctcgccttccccgcccggagccgtggctgcaggagcaccggcgtcattccctgcggcggctggacctgagggagagaagacagcgctggcggagtccggggccgcagctgccagaggtggggagcgcccgactaaatcccgggaccacgcgcggggagccaggttcccgggaagtccagagagctgaggtccggtgcctccgagggcgcccccgccgtgtgactaagcctacaatccctgagaagggcgcctgctccggggctttctccctggggcttggggttcggttccggcccgacggatgagtcagagccccgtggctccctccgacggactagctcctcacccctcggggctgccagggggaggggagtccagctgcgtaaaaatcccagaacttgagcggacattgctgggcacgaagttctgggagaggatccctgccccagccatccaggttgccgtgtcccctgcccggagctccagagcggtgggagccgcggcgcgcgcttctcagggccccgctccgttgcgacgcgcgcggcgctcgtgggagccgctcccgggtcgcgccaaagccaagcccgaaccgggccaccagctgccgcctgctctcgcccaagcgacaagtggcccagttcccggggccccgcgagggcgggccgcacaggagccacgagcggcgcgaaggcagggtgggcggccctacccagtcggtccggtttgctggggaggcgccaccgccgttccctacagtggcctggggcggaacgcagctcgtcccaagctcagcccacgtctgagggactggagcgccccgctggagcggactccccggcctcgctccctccggcctcaaacttttcgctcaacttcgcagccggcgccgcggagcggggagggcactgagcctcggcgccggcctggctccgccccgcgctcccgggggtggaacctgagcccggcgcggcctcggcctctgcccgcctccggcctcagcgcgccgcctccggcacggcccgcgcccacggccgggccacgagctggttcccgcccgggtcctaggaagcggcaagcgcgcccccgccgctcgtcctaggcgtctggctagaaggcggcgccgcgacctggccgggtgagctgaggcggcaggccgcgaggcgcggagtcccgggcccggccgcgagcgcagtgtctggggcgcgcgaaagcgaccgcgcagcgcagacggaggcgcgggctccgcgcgaactcgtgtcggagcgagcgccgggcgcgcgcggctccgctctcccgggggacccttggtttcacctcgacgccacgacctcgcccccgcgggtgctgtcggcgccgggatgcagcgccccttttgcgcgctctgccctagcccacccgaaattcgaggcccgcacgccacccggggcgcctctccaggccggggcgtctcgcccgccgcccaccagcttccctctttcttcctcccccgcgctcccacggaggttatttttaacttcccgacgctgcagctgggctaccgagcctgaggccgcctagcgcgctgtcccgggtagagcaggcgacaggccgggggctccgagccggagaggaggcttgacagtgtagatgggcctgggggcccccgtcgggattggaaagccaagcatgtggtacgtgccccccgccccctctggctcagcgtgaagaaggggcgccggaaacgcgctcagaagttgtcacttctttggaggccagtagggacgcgtttgtcagtgtgtttgtgatacacttatcgcggcaagccacagaacgtgtccgcgagcacctcgagttagatccctggggggttacggcggagacggaggaagaagttgccaaggcccattggtgacctgcccaggtagggccagagttaggagaaaccaagcccctgcgggaggctgcggggctcgcgcgcccccgccggccccacccgcccccacacacctctctcatcgcttcttaaagtcgagaagaggcaggtccaggaggagcacgcagccaattagccgggcggcgccctgaactccggcacgcctccgcggtgtcttctcttccggaggacccaggcagctcggccccgtttcccaacacttggggggtcagacgggcgggacccgagagtccccgggcgggtcggggggcactggctgggacgcggggtccctggggccgcagctccgcgcgcgtatcggcgggtgcgccttcgccttgcgcggcccccgggcagtccccgctgggtccagagcgtcccgagcgcgttccgggaaggtgactcagcgacgcgctcaggggtcgaaaaactccgagaaacaggaacgaggggagggagcaggggcgtcatccccgactcctggcgtcgcggcgcgtgtcggaatgatgggtcctgcacctccgagccccccacccccttgctccaggaatccggcgcgggcgggggagagagccctgcagccgcagtgccgcggtcatgcgctgcggggacgcgagcggcggctgtgggaggagggggctccgcgcgggagcccaggaccagatccgtccgcccctcccctctcctctgccttcttcccctcctcttcctccagcgagggactttggtgcctagaaaacgcgaatcggaggctgtgctccccgagatctcagccttcgagggtactggctgcggagattagctggggcagccttccccgtctgctccccgccccggagagcatttccaccaaatctgaaaagctctgtcattagccatagagtctgaagaggggaaactgaggcacagggaagcactgtgagttcgtggtgataaagcccacctggttcagggtcccccctttttttttcctcctggggccccagaaaggtcggatcctgcgcctccaggcccactaccaccagccttgagtccgcggagcgggcgggggcggggttgactgcaaactgagttggcaaggggaggcggggcacgggctctttatccaacgcctccgggccccagctcccctcctggctctggaaggccccgcgggagggaggcgaagggcaaagccctctggccccggttccaggccgcacaatgggtcctctgtcctccctggcgcctaaccccctgcccccctcacctccaaggcctttgcccccctcattcttgtcattcacttcccccaacccaggctgcctttctccagacccctttccccttctccctttctaaagaatttgatcctatctccagaaactcccccagctgcatccctgctcagagaggcaggattggccaagagcaagatggttccccttcccacggttgcgggtcggggggcgggcacttggatctctcaagctgccagcttggcccgtttcccactgtactttacttccttttttaaaaaagaaaaaaggacaaggcgggaaggagttgggggggcctgaaaccctgagaggtgaagaggcttgcacaagcctccaaccagttccccacaaagcagagaagcaaacctgtgaacccagaccccacgctgagaagccaagtccagccagagctcccctctgggcctctctgtatcccaggctatttctccctgaagggcaggtatctggggatctggtgcctggtggattgcttgccgcagagctgtggcgtctccctgaggaggaggaagcagcaggccgggcgcagtggctcactcctgtaatcctagcactttgggaggccgacgtgggtggatcacctgagatcgggggttggagaccagcctgaccaacgtggagaaacccgtctcaaaccccgtctctacaccgggtgtggtggcgcatacctgtagtcccagctacttgggaggctgaggcaggagaattgcttgcacccaggaggcagaggttgtggtgagctgagatcgtcccattgcactccagcctgggtgacagggcgaaactccatctcaaaaaaaaaaagaaagaggaagcagctccaagccctccccaggcttcatcctgagtctggaaacagctgagcagccgctgtgctcagcaaggcccaccgtgggcctgggaacaggcctgggccggcagagaggtctgatttgatcaccaacccagagcttggcttgcaggtaatctgcttcacaggtgggagactttttctaacttccccagcctccccttccttgtgggcagcctccccagggagacacacctgagaacccccttttttcttttcccgagaaagaaagcaggcattcacctggcctggtcccagctctccagaaacttggagtcaaggctgccagatggcaaattacttgcttttatgaggagaggattcctgccatctcacccttccctgaagctaccttccctaggagatttcagctccctaattgcatagcctcaa

SEQ ID NO: 1970 - DNA, 6000 bp, Homo sapiens
taccctatatggcaagagggattttgcagatatgattacggattttgagaaggggagattgtcctgggttctctgggtggggtgaatgtcatcacagggtccttatatgagggaggcaggaaggtcagagtcagaagagttgtgtcaatgggagcagaggtcacacagagatagactggaagatgctatgctgccggctctcgaggtaaaggaaggggccctgagccaagggatgcaggtggcttctagaagccagaaaaggcaagggaacacagccctgcaattcatcttatattaggttggtgcacgaggaactgtttttttttttttttttttgagacggagtctcactgtcgcccaggctggagtgcggtggcgcgatctcagctcactgcaacctcccaggctggagtgcagtggcgcaatcttggctcactgcaacctctgcctcctgggttcaagagattctcctgcctcagcttcccgagtagctgggactacaggcacacgccaccacgcctagctaattttttatttttagtagagacggggtttcactatgttggccaggctggtctcaagctcctgacgtcgggtgatccacccgcctcagcctcccaaagtgctgggattacaggagtgagccaccgcacccggcctgtttgttttttgagacagagtctcactctgctgcccaggctggagtgcagtggcacgatctcaggctcactgcaacctccgcctcccaggttcaagcgattttcctgcctcaccctcccgaatagctgggactgcaggtgtgcaccaccacacccagcgaatttttgtagtttttagtagagaggaggtttcactacgttggccaggctgatctcgaactcctgacctcaggtgatccacccgcctggacctctcaaagtgctgggattacaggcatgagccaccgcttctggcctggggaaattgcgttttttggcattaaaagtaatggtattagcaaccattctaatacttctgatcttctgcaagataaaaaatttgtgttgttttaattgtgtgtagcaataggaacctaataccccatccaacacgacactcagctttgctcttccaaagactggggaagaaacccatctgctcaggaagctgaggatgccatacgccaaggtgtaagataacatctgaaagtcaagggagcaggagcacaggaagtctggctgccagcataggcataaacaactcctcccagtagatcacaccttggcaaggctgggaggatggaggcctggcagccaaaaacccctttcctcctgtacccttaggagactacactatcttctatcaagacccctggtattgttacatcttttcattcaaaacttgaaacactggccaggtgcagtggctcatgcctgtaatcccagggctttgggcagctgagacgggatgattacttgagcccaggtgtttgagaccagcctgggcaacatagggagaccacatctctacaaaaaataaaaaaacaaaattggctgggcttggtggcatgcacctgtagtctcagctactaaaggggatggaggtgggaggatcacttgagcccaggaggtcgaggctgcagtgagctgtgactgtgccactgcactccagcttgggtgacgatgtaagaccctgtttcaaaaaaaaaaataaataaaacatgaaacactgattcacactagggccctaataactcactggttttccctccgagtcatctgtagcagaaaaagaacaggcccacgggccctacggaaaaagttccaactctttcccagggagagggccctctgaaggtgaaggcagagacggggacgacgcagcagcaagacacggatgaccaaaggctgtcggcaaaccaccaggacacaggcctgggacagagtcacagcctcagaaggaaccaaccctgccaacaccgtgatcgtagacttcccaacctccaaaactgtgagacagtcaatttctgttgtctacgccaccaggacactaatacaaatgcctatagatgctgggcaggcagctgagacaaatggagtgggtagggctgcagctcgccaccttgagagggctctgaagagaatcaccctgaattgcagccacagtcagcagcctggaggtgagggcatgtgacaggcagagcccagaggcccagaagagacctgggtccccagcctcagcaaggacgacaaggacaaggagaccacccaagggatagagctagggtcaccccaccatacactcatcatagtcaaaccactggggagaatcagaaactcgggcaaagcacacactccctgcaagcagccaagaatctcgcatgaccagtctggtcctctggatctccacatgtggccacgtgtggcgcgtggcatcccctccaccccaatgcctggtatggtcgacctggaaatgacatctaggaaactgagaatggaaagccatgtgggggcagcgctaagcttttttttttctttttctttttttgagacggagtcttgctctgttgcccaggctggagtacagtggtgcaatctcggctcgctcttgggttcaagcagttctcctgtctcagcctcctgagcagctgggactacaggcacctgccaccgcgtccgacgaatttttgtatttttagtagagatggggtttcatcatcttggccaggctggtctcaaattcctgacctcgtgatccacccgcctcagcctcccaaagtgctgggattacgggcgtgagccactgcgcccaaccagccctaagcttttttttttttttttgagacatagtcttgctctgtccccaggcaggagtgcagtggcaccatctcagctcactgcaaccttcgcctcccgggtccaagcgattctcctgcctcagcctcccaagtagctaggattacaggcatgcaccacaacacccagctaatttttgtattttcagtagagacgggggtttcaccatgttggccaggatggtctcaaatctcctgacctcatgatcacccgccttggcctcccaaagtgctgggattacagatgtgagccaccgtgcccggcccctaagctcaaagagcttgtgagatagaacctcccccttccccggtccttgcaaccccctaggcagtaaagtaccataaaaagggaaaaaccggagtggtggctcatgcctataaccccagcactttgggaggccgaggcaggcggatcacttgaggtcaggagtttgagaccagcttggccaacatgtgaaacacaaactctactaaaaatacaaaaattagctaggtgcagtggctcacacttgtaatcacagctattcgggaggctgaggcaagagtattgcttgaaaccgggaggcagaggttgcagtgagccaagatcgcgccactgcactccagcctcagcctgggcaacagagcgagactctgtctcaaaaaaaaaaaaagggaaagaagttgaggtcaaggaagaccttgaggctatgcaattagggagctgaaatctcctagggaaggtagcttcagggaagggtgagatggcaggaatcctctcctcataaaagcaagtaatttgccatctggcagccttgactccaagtttctggagagctgggaccaggccaggtgaatgcctgctttctttctcgggaaaagaaaaaagggggttctcaggtgtgtctccctggggaggctgcccacaaggaaggggaggctggggaagttagaaaaagtctcccacctgtgaagcagattacctgcaagccaagctctgggttggtgatcaaatcagacctctctgccggcccaggcctgttcccaggcccacggtgggccttgctgagcacagcggctgctcagctgtttccagactcaggatgaagcctggggagggcttggagctgcttcctctttctttttttttttgagatggagtttcgccctgtcacccaggctggagtgcaatgggacgatctcagctcaccacaacctctgcctcctgggtgcaagcaattctcctgcctcagcctcccaagtagctgggactacaggtatgcgccaccacacccggtgtagagacggggtttgagacgggtttctccacgttggtcaggctggtctccaacccccgatctcaggtgatccacccacgtcggcctcccaaagtgctaggattacaggagtgagccactgcgcccggcctgctgcttcctcctcctcagggagacgccacagctctgcggcaagcaatccaccaggcaccagatccccagatacctgcccttcagggagaaatagcctgggatacagagaggcccagaggggagctctggctggacttggcttctcagcgtggggtctgggttcacaggtttgcttctctgctttgtggggaactggttggaggcttgtgcaagcctcttcacctctcagggtttcaggcccccccaactccttcccgccttgtccttttttcttttttaaaaaaggaagtaaagtacagtgggaaacgggccaagctggcagcttgagagatccaagtgcccgccccccgacccgcaaccgtgggaaggggaaccatcttgctcttggccaatcctgcctctctgagcagggatgcagctgggggagtttctggagataggatcaaattctttagaaagggagaaggggaaaggggtctggagaaaggcagcctgggttgggggaagtgaatgacaagaatgaggggggcaaaggccttggaggtgaggggggcagggggttaggcgccagggaggacagaggacccattgtgcggcctggaaccggggccagagggctttgcccttcgcctccctcccgcggggccttccagagccaggaggggagctggggcccggaggcgttggataaagagcccgtgccccgcctccccttgccaactcagtttgcagtcaaccccgcccccgcccgctccgcggactcaaggctggtggtagtgggcctggaggcgcaggatccgacctttctggggccccaggaggaaaaaaaaaggggggaccctgaaccaggtgggctttatcaccacgaactcacagtgcttccctgtgcctcagtttcccctcttcagactctatggctaatgacagagcttttcagatttggtggaaatgctctccggggcggggagcagacggggaaggctgccccagctaatctccgcagccagtaccctcgaaggctgagatctcggggagcacagcctccgattcgcgttttctaggcaccaaagtccctcgctggaggaagaggaggggaagaaggcagaggagaggggaggggcggacggatctggtcctgggctcccgcgcggagccccctcctcccacagccgccgctcgcgtccccgcagcgcatgaccgcggcactgcggctgcagggctctctcccccgcccgcgccggattcctggagcaagggggtggggggctcggaggtgcaggacccatcattccgacacgcgccgcgacgccaggagtcggggatgacgcccctgctccctcccctcgttcctgtttctcggagtttttcgacccctgagcgcgtcgctgagtcaccttcccggaacgcgctcgggacgctctggacccagcggggactgcccgggggccgcgcaaggcgaaggcgcacccgccgatacgcgcgcggagctgcggccccagggaccccgcgtcccagccagtgccccccgacccgcccggggactctcgggtcccgcccgtctgaccccccaagtgttgggaaacggggccgagctgcctgggtcctccggaagagaagacaccgcggaggcgtgccggagttcagggcgccgcccggctaattggctgcgtgctcctcctggacctgcctcttctcgactttaagaagcgatgagagaggtgtgtgggggcgggtggggccggcgggggcgcgcgagcc

SEQ ID NO: 1971 - DNA, 6000 bp, Homo sapiens
tccccagtcaccaggacaggacgagcaggctgggaatgtcactttatttggatttggttcgtggggtgggggtctcagaacaaactagaaggccttacataggcagctgggcccagccagctgggctcctgacccaggacttcattctggcctgtccccccaaagcatagcctccaccttctcacccttctccagaggagtctcctccacccccacaggagctgtggacaggccctgcagccctagggaaggaggaagggtcctgcaagtagacactaaggcacagcgcggcccaggggtcataagggctcttctggcggtggcatctgctggggcttccagctgggcgggggctccacgcaaccgctgaccatccagaagtagtttgggtgcacctggccctgcacggcctcgctaaccatcaattccccatccactgcaaacacacctttcccatccttgggctccaagcggaaggcgaccacgggcacatataccaagtaggggcattcatactccatatgcctgcccttctccatggccaggaagaggcgcagcagcatggcacgagacactcccgcccgcacgtagaacagatgcatgacgccagctgcacagcggcccatgggtgcagcaaacatctcactgcccaggtgcgagtgcagcagtgccaggactagcacaaagtcctcgtcgggcaccactgtccagtgagagggcactggctcctccagtggcacaaggtgtgcatctaccgggccctgctggaccacaacgggggaggcaggtgtcttggaacccactcttcctacagggaggtaggccagtcggccgcggtaggtgcgcagggctgccagacgcaggaaggtgcccagagtgaagcgcatctcccccagacgccgatacttctcactctctaggtccacatcagcaatgaagccccaggccaggctgagcacagagaagaggcgcagccccgaagccgtgtgcagagacagcaggttcatgggtgacagcagccggcggcacagcaatagcgtgcagttggtcaggaggtcttcattggtgacctgctcatagctgcagggggaaaaagtcagataaggcaggacaggagcccccatgtatcccccgcttcctcctcccggggagtgggagctggcaaagcgccatgtggtccctggggagttggcaggactggtaggtgacagatggagcaaatggaagcagtcagctggggtcaccaggagagggccccaggactaagggagaaggggaaatggaaatgatctcagcctatgggagcttagacaagaaaacccccgcggtagaggagcactgacgggaaacaggcctactctggccctgggctctcacccagcataatggttcaaggaagctgccagcgcgttgccagagcctgctgggaggctacacaggggcttctggatggcggtctcccagtcaggccgctccatgagcccgttcaccacctgttgaagcacacgtggcctcagcctgggacgcaccgcgccaagccccaggcctagccgcgcagtgcggtcctcacctcgtgcatcagcccgtctccagacatgaccaccagagcgtcccagcggcccagctcctccgaccgcaccagctcccgcgcgtggttccgccgctctgcagggagaccggcagctatcaggactgggggggtcccctgccaggggatgctcccgaaaccccctccgagaggtactcaccagtgagcatcagcgtgaaggagatttcagcctcagccaaaaggggctgcacgtgactccggaagagctgcaaggccttgcccttgccgccgcgcgggttcagcagcaccagcacgcggcagggccgcgggagcacgccccgggggccgcccgctgagaaaacaaaaccaaagaggccacgtccgcaaccgaccactagggggccacgggtaacaatggggcactagtgtgggaacttggtgcccgaaacaccccggtaattgaccctggccagaggagcggcctttgctgggagacctggggtggggacgcggcgcccctgccacccccttccttggctcagattcggccggcttctggcctcgtgagggataatgtttctcccgatcgtccacagcccctttcgtccagctgggcgttccatcattcctggcgaggaacaggaatccccctacagcccttcccagcaggaaccccacaaacctggatccataacctcgacccgcggctcccgctgccagggggtccctggcgctgtgggggcgctgcccgtggcggcggctcctgccttcagctccttatcggtgctgcccaggcgggcgtcgcagggccggctgtggggctcgccttccccgcccggagccgtggctgcaggagcaccggcgtcattccctgcggcggctggacctgagggagagaagacagcgctggcggagtccggggccgcagctgccagaggtggggagcgcccgactaaatcccgggaccacgcgcggggagccaggttcccgggaagtccagagagctgaggtccggtgcctccgagggcgcccccgccgtgtgactaagcctacaatccctgagaagggcgcctgctccggggctttctccctggggcttggggttcggttccggcccgacggatgagtcagagccccgtggctccctccgacggactagctcctcacccctcggggctgccagggggaggggagtccagctgcgtaaaaatcccagaacttgagcggacattgctgggcacgaagttctgggagaggatccctgccccagccatccaggttgccgtgtcccctgcccggagctccagagcggtgggagccgcggcgcgcgcttctcagggccccgctccgttgcgacgcgcgcggcgctcgtgggagccgctcccgggtcgcgccaaagccaagcccgaaccgggccaccagctgccgcctgctctcgcccaagcgacaagtggcccagttcccggggccccgcgagggcgggccgcacaggagccacgagcggcgcgaaggcagggtgggcggccctacccagtcggtccggtttgctggggaggcgccaccgccgttccctacagtggcctggggcggaacgcagctcgtcccaagctcagcccacgtctgagggactggagcgccccgctggagcggactccccggcctcgctccctccggcctcaaacttttcgctcaacttcgcagccggcgccgcggagcggggagggcactgagcctcggcgccggcctggctccgccccgcgctcccgggggtggaacctgagcccggcgcggcctcggcctctgcccgcctccggcctcagcgcgccgcctccggcacggcccgcgcccacggccgggccacgagctggttcccgcccgggtcctaggaagcggcaagcgcgcccccgccgctcgtcctaggcgtctggctagaaggcggcgccgcgacctggccgggtgagctgaggcggcaggccgcgaggcgcggagtcccgggcccggccgcgagcgcagtgtctggggcgcgcgaaagcgaccgcgcagcgcagacggaggcgcgggctccgcgcgaactcgtgtcggagcgagcgccgggcgcgcgcggctccgctctcccgggggacccttggtttcacctcgacgccacgacctcgcccccgcgggtgctgtcggcgccgggatgcagcgccccttttgcgcgctctgccctagcccacccgaaattcgaggcccgcacgccacccggggcgcctctccaggccggggcgtctcgcccgccgcccaccagcttccctctttcttcctcccccgcgctcccacggaggttatttttaacttcccgacgctgcagctgggctaccgagcctgaggccgcctagcgcgctgtcccgggtagagcaggcgacaggccgggggctccgagccggagaggaggcttgacagtgtagatgggcctgggggcccccgtcgggattggaaagccaagcatgtggtacgtgccccccgccccctctggctcagcgtgaagaaggggcgccggaaacgcgctcagaagttgtcacttctttggaggccagtagggacgcgtttgtcagtgtgtttgtgatacacttatcgcggcaagccacagaacgtgtccgcgagcacctcgagttagatccctggggggttacggcggagacggaggaagaagttgccaaggcccattggtgacctgcccaggtagggccagagttaggagaaaccaagcccctgcgggaggctgcggggctcgcgcgcccccgccggccccacccgcccccacacacctctctcatcgcttcttaaagtcgagaagaggcaggtccaggaggagcacgcagccaattagccgggcggcgccctgaactccggcacgcctccgcggtgtcttctcttccggaggacccaggcagctcggccccgtttcccaacacttggggggtcagacgggcgggacccgagagtccccgggcgggtcggggggcactggctgggacgcggggtccctggggccgcagctccgcgcgcgtatcggcgggtgcgccttcgccttgcgcggcccccgggcagtccccgctgggtccagagcgtcccgagcgcgttccgggaaggtgactcagcgacgcgctcaggggtcgaaaaactccgagaaacaggaacgaggggagggagcaggggcgtcatccccgactcctggcgtcgcggcgcgtgtcggaatgatgggtcctgcacctccgagccccccacccccttgctccaggaatccggcgcgggcgggggagagagccctgcagccgcagtgccgcggtcatgcgctgcggggacgcgagcggcggctgtgggaggagggggctccgcgcgggagcccaggaccagatccgtccgcccctcccctctcctctgccttcttcccctcctcttcctccagcgagggactttggtgcctagaaaacgcgaatcggaggctgtgctccccgagatctcagccttcgagggtactggctgcggagattagctggggcagccttccccgtctgctccccgccccggagagcatttccaccaaatctgaaaagctctgtcattagccatagagtctgaagaggggaaactgaggcacagggaagcactgtgagttcgtggtgataaagcccacctggttcagggtcccccctttttttttcctcctggggccccagaaaggtcggatcctgcgcctccaggcccactaccaccagccttgagtccgcggagcgggcgggggcggggttgactgcaaactgagttggcaaggggaggcggggcacgggctctttatccaacgcctccgggccccagctcccctcctggctctggaaggccccgcgggagggaggcgaagggcaaagccctctggccccggttccaggccgcacaatgggtcctctgtcctccctggcgcctaaccccctgcccccctcacctccaaggcctttgcccccctcattcttgtcattcacttcccccaacccaggctgcctttctccagacccctttccccttctccctttctaaagaatttgatcctatctccagaaactcccccagctgcatccctgctcagagaggcaggattggccaagagcaagatggttccccttcccacggttgcgggtcggggggcgggcacttggatctctcaagctgccagcttggcccgtttcccactgtactttacttccttttttaaaaaagaaaaaaggacaaggcgggaaggagttgggggggcctgaaaccctgagaggtgaagaggcttgcacaagcctccaaccagttccccacaaagcagagaagcaaacctgtgaacccagaccccacgctgagaagccaagtccagccagagctcccctctgggcctctctgtatcccaggctatttctccctgaagggca

SEQ ID NO: 1972 - DNA, 6000 bp, Homo sapiens
tgcccaggctggagtgcagtggcacgatctcaggctcactgcaacctccgcctcccaggttcaagcgattttcctgcctcaccctcccgaatagctgggactgcaggtgtgcaccaccacacccagcgaatttttgtagtttttagtagagaggaggtttcactacgttggccaggctgatctcgaactcctgacctcaggtgatccacccgcctggacctctcaaagtgctgggattacaggcatgagccaccgcttctggcctggggaaattgcgttttttggcattaaaagtaatggtattagcaaccattctaatacttctgatcttctgcaagataaaaaatttgtgttgttttaattgtgtgtagcaataggaacctaataccccatccaacacgacactcagctttgctcttccaaagactggggaagaaacccatctgctcaggaagctgaggatgccatacgccaaggtgtaagataacatctgaaagtcaagggagcaggagcacaggaagtctggctgccagcataggcataaacaactcctcccagtagatcacaccttggcaaggctgggaggatggaggcctggcagccaaaaacccctttcctcctgtacccttaggagactacactatcttctatcaagacccctggtattgttacatcttttcattcaaaacttgaaacactggccaggtgcagtggctcatgcctgtaatcccagggctttgggcagctgagacgggatgattacttgagcccaggtgtttgagaccagcctgggcaacatagggagaccacatctctacaaaaaataaaaaaacaaaattggctgggcttggtggcatgcacctgtagtctcagctactaaaggggatggaggtgggaggatcacttgagcccaggaggtcgaggctgcagtgagctgtgactgtgccactgcactccagcttgggtgacgatgtaagaccctgtttcaaaaaaaaaaataaataaaacatgaaacactgattcacactagggccctaataactcactggttttccctccgagtcatctgtagcagaaaaagaacaggcccacgggccctacggaaaaagttccaactctttcccagggagagggccctctgaaggtgaaggcagagacggggacgacgcagcagcaagacacggatgaccaaaggctgtcggcaaaccaccaggacacaggcctgggacagagtcacagcctcagaaggaaccaaccctgccaacaccgtgatcgtagacttcccaacctccaaaactgtgagacagtcaatttctgttgtctacgccaccaggacactaatacaaatgcctatagatgctgggcaggcagctgagacaaatggagtgggtagggctgcagctcgccaccttgagagggctctgaagagaatcaccctgaattgcagccacagtcagcagcctggaggtgagggcatgtgacaggcagagcccagaggcccagaagagacctgggtccccagcctcagcaaggacgacaaggacaaggagaccacccaagggatagagctagggtcaccccaccatacactcatcatagtcaaaccactggggagaatcagaaactcgggcaaagcacacactccctgcaagcagccaagaatctcgcatgaccagtctggtcctctggatctccacatgtggccacgtgtggcgcgtggcatcccctccaccccaatgcctggtatggtcgacctggaaatgacatctaggaaactgagaatggaaagccatgtgggggcagcgctaagcttttttttttctttttctttttttgagacggagtcttgctctgttgcccaggctggagtacagtggtgcaatctcggctcgctcttgggttcaagcagttctcctgtctcagcctcctgagcagctgggactacaggcacctgccaccgcgtccgacgaatttttgtatttttagtagagatggggtttcatcatcttggccaggctggtctcaaattcctgacctcgtgatccacccgcctcagcctcccaaagtgctgggattacgggcgtgagccactgcgcccaaccagccctaagcttttttttttttttttgagacatagtcttgctctgtccccaggcaggagtgcagtggcaccatctcagctcactgcaaccttcgcctcccgggtccaagcgattctcctgcctcagcctcccaagtagctaggattacaggcatgcaccacaacacccagctaatttttgtattttcagtagagacgggggtttcaccatgttggccaggatggtctcaaatctcctgacctcatgatcacccgccttggcctcccaaagtgctgggattacagatgtgagccaccgtgcccggcccctaagctcaaagagcttgtgagatagaacctcccccttccccggtccttgcaaccccctaggcagtaaagtaccataaaaagggaaaaaccggagtggtggctcatgcctataaccccagcactttgggaggccgaggcaggcggatcacttgaggtcaggagtttgagaccagcttggccaacatgtgaaacacaaactctactaaaaatacaaaaattagctaggtgcagtggctcacacttgtaatcacagctattcgggaggctgaggcaagagtattgcttgaaaccgggaggcagaggttgcagtgagccaagatcgcgccactgcactccagcctcagcctgggcaacagagcgagactctgtctcaaaaaaaaaaaaagggaaagaagttgaggtcaaggaagaccttgaggctatgcaattagggagctgaaatctcctagggaaggtagcttcagggaagggtgagatggcaggaatcctctcctcataaaagcaagtaatttgccatctggcagccttgactccaagtttctggagagctgggaccaggccaggtgaatgcctgctttctttctcgggaaaagaaaaaagggggttctcaggtgtgtctccctggggaggctgcccacaaggaaggggaggctggggaagttagaaaaagtctcccacctgtgaagcagattacctgcaagccaagctctgggttggtgatcaaatcagacctctctgccggcccaggcctgttcccaggcccacggtgggccttgctgagcacagcggctgctcagctgtttccagactcaggatgaagcctggggagggcttggagctgcttcctctttctttttttttttgagatggagtttcgccctgtcacccaggctggagtgcaatgggacgatctcagctcaccacaacctctgcctcctgggtgcaagcaattctcctgcctcagcctcccaagtagctgggactacaggtatgcgccaccacacccggtgtagagacggggtttgagacgggtttctccacgttggtcaggctggtctccaacccccgatctcaggtgatccacccacgtcggcctcccaaagtgctaggattacaggagtgagccactgcgcccggcctgctgcttcctcctcctcagggagacgccacagctctgcggcaagcaatccaccaggcaccagatccccagatacctgcccttcagggagaaatagcctgggatacagagaggcccagaggggagctctggctggacttggcttctcagcgtggggtctgggttcacaggtttgcttctctgctttgtggggaactggttggaggcttgtgcaagcctcttcacctctcagggtttcaggcccccccaactccttcccgccttgtccttttttcttttttaaaaaaggaagtaaagtacagtgggaaacgggccaagctggcagcttgagagatccaagtgcccgccccccgacccgcaaccgtgggaaggggaaccatcttgctcttggccaatcctgcctctctgagcagggatgcagctgggggagtttctggagataggatcaaattctttagaaagggagaaggggaaaggggtctggagaaaggcagcctgggttgggggaagtgaatgacaagaatgaggggggcaaaggccttggaggtgaggggggcagggggttaggcgccagggaggacagaggacccattgtgcggcctggaaccggggccagagggctttgcccttcgcctccctcccgcggggccttccagagccaggaggggagctggggcccggaggcgttggataaagagcccgtgccccgcctccccttgccaactcagtttgcagtcaaccccgcccccgcccgctccgcggactcaaggctggtggtagtgggcctggaggcgcaggatccgacctttctggggccccaggaggaaaaaaaaaggggggaccctgaaccaggtgggctttatcaccacgaactcacagtgcttccctgtgcctcagtttcccctcttcagactctatggctaatgacagagcttttcagatttggtggaaatgctctccggggcggggagcagacggggaaggctgccccagctaatctccgcagccagtaccctcgaaggctgagatctcggggagcacagcctccgattcgcgttttctaggcaccaaagtccctcgctggaggaagaggaggggaagaaggcagaggagaggggaggggcggacggatctggtcctgggctcccgcgcggagccccctcctcccacagccgccgctcgcgtccccgcagcgcatgaccgcggcactgcggctgcagggctctctcccccgcccgcgccggattcctggagcaagggggtggggggctcggaggtgcaggacccatcattccgacacgcgccgcgacgccaggagtcggggatgacgcccctgctccctcccctcgttcctgtttctcggagtttttcgacccctgagcgcgtcgctgagtcaccttcccggaacgcgctcgggacgctctggacccagcggggactgcccgggggccgcgcaaggcgaaggcgcacccgccgatacgcgcgcggagctgcggccccagggaccccgcgtcccagccagtgccccccgacccgcccggggactctcgggtcccgcccgtctgaccccccaagtgttgggaaacggggccgagctgcctgggtcctccggaagagaagacaccgcggaggcgtgccggagttcagggcgccgcccggctaattggctgcgtgctcctcctggacctgcctcttctcgactttaagaagcgatgagagaggtgtgtgggggcgggtggggccggcgggggcgcgcgagccccgcagcctcccgcaggggcttggtttctcctaactctggccctacctgggcaggtcaccaatgggccttggcaacttcttcctccgtctccgccgtaaccccccagggatctaactcgaggtgctcgcggacacgttctgtggcttgccgcgataagtgtatcacaaacacactgacaaacgcgtccctactggcctccaaagaagtgacaacttctgagcgcgtttccggcgccccttcttcacgctgagccagagggggcggggggcacgtaccacatgcttggctttccaatcccgacgggggcccccaggcccatctacactgtcaagcctcctctccggctcggagcccccggcctgtcgcctgctctacccgggacagcgcgctaggcggcctcaggctcggtagcccagctgcagcgtcgggaagttaaaaataacctccgtgggagcgcgggggaggaagaaagagggaagctggtgggcggcgggcgagacgccccggcctggagaggcgccccgggtggcgtgcgggcctcgaatttcgggtgggctagggcagagcgcgcaaaaggggcgctgcatcccggcgccgacagcacccgcgggggcgaggtcgtggcgtcgaggtgaaaccaagggtcccccgggagagcggagccgcgcgcgcccggcgctcgctccgaca

SEQ ID NO: 1973 - DNA, 6000 bp, Homo sapiens
ctcagcaaggacgacaaggacaaggagaccacccaagggatagagctagggtcaccccaccatacactcatcatagtcaaaccactggggagaatcagaaactcgggcaaagcacacactccctgcaagcagccaagaatctcgcatgaccagtctggtcctctggatctccacatgtggccacgtgtggcgcgtggcatcccctccaccccaatgcctggtatggtcgacctggaaatgacatctaggaaactgagaatggaaagccatgtgggggcagcgctaagcttttttttttctttttctttttttgagacggagtcttgctctgttgcccaggctggagtacagtggtgcaatctcggctcgctcttgggttcaagcagttctcctgtctcagcctcctgagcagctgggactacaggcacctgccaccgcgtccgacgaatttttgtatttttagtagagatggggtttcatcatcttggccaggctggtctcaaattcctgacctcgtgatccacccgcctcagcctcccaaagtgctgggattacgggcgtgagccactgcgcccaaccagccctaagcttttttttttttttttgagacatagtcttgctctgtccccaggcaggagtgcagtggcaccatctcagctcactgcaaccttcgcctcccgggtccaagcgattctcctgcctcagcctcccaagtagctaggattacaggcatgcaccacaacacccagctaatttttgtattttcagtagagacgggggtttcaccatgttggccaggatggtctcaaatctcctgacctcatgatcacccgccttggcctcccaaagtgctgggattacagatgtgagccaccgtgcccggcccctaagctcaaagagcttgtgagatagaacctcccccttccccggtccttgcaaccccctaggcagtaaagtaccataaaaagggaaaaaccggagtggtggctcatgcctataaccccagcactttgggaggccgaggcaggcggatcacttgaggtcaggagtttgagaccagcttggccaacatgtgaaacacaaactctactaaaaatacaaaaattagctaggtgcagtggctcacacttgtaatcacagctattcgggaggctgaggcaagagtattgcttgaaaccgggaggcagaggttgcagtgagccaagatcgcgccactgcactccagcctcagcctgggcaacagagcgagactctgtctcaaaaaaaaaaaaagggaaagaagttgaggtcaaggaagaccttgaggctatgcaattagggagctgaaatctcctagggaaggtagcttcagggaagggtgagatggcaggaatcctctcctcataaaagcaagtaatttgccatctggcagccttgactccaagtttctggagagctgggaccaggccaggtgaatgcctgctttctttctcgggaaaagaaaaaagggggttctcaggtgtgtctccctggggaggctgcccacaaggaaggggaggctggggaagttagaaaaagtctcccacctgtgaagcagattacctgcaagccaagctctgggttggtgatcaaatcagacctctctgccggcccaggcctgttcccaggcccacggtgggccttgctgagcacagcggctgctcagctgtttccagactcaggatgaagcctggggagggcttggagctgcttcctctttctttttttttttgagatggagtttcgccctgtcacccaggctggagtgcaatgggacgatctcagctcaccacaacctctgcctcctgggtgcaagcaattctcctgcctcagcctcccaagtagctgggactacaggtatgcgccaccacacccggtgtagagacggggtttgagacgggtttctccacgttggtcaggctggtctccaacccccgatctcaggtgatccacccacgtcggcctcccaaagtgctaggattacaggagtgagccactgcgcccggcctgctgcttcctcctcctcagggagacgccacagctctgcggcaagcaatccaccaggcaccagatccccagatacctgcccttcagggagaaatagcctgggatacagagaggcccagaggggagctctggctggacttggcttctcagcgtggggtctgggttcacaggtttgcttctctgctttgtggggaactggttggaggcttgtgcaagcctcttcacctctcagggtttcaggcccccccaactccttcccgccttgtccttttttcttttttaaaaaaggaagtaaagtacagtgggaaacgggccaagctggcagcttgagagatccaagtgcccgccccccgacccgcaaccgtgggaaggggaaccatcttgctcttggccaatcctgcctctctgagcagggatgcagctgggggagtttctggagataggatcaaattctttagaaagggagaaggggaaaggggtctggagaaaggcagcctgggttgggggaagtgaatgacaagaatgaggggggcaaaggccttggaggtgaggggggcagggggttaggcgccagggaggacagaggacccattgtgcggcctggaaccggggccagagggctttgcccttcgcctccctcccgcggggccttccagagccaggaggggagctggggcccggaggcgttggataaagagcccgtgccccgcctccccttgccaactcagtttgcagtcaaccccgcccccgcccgctccgcggactcaaggctggtggtagtgggcctggaggcgcaggatccgacctttctggggccccaggaggaaaaaaaaaggggggaccctgaaccaggtgggctttatcaccacgaactcacagtgcttccctgtgcctcagtttcccctcttcagactctatggctaatgacagagcttttcagatttggtggaaatgctctccggggcggggagcagacggggaaggctgccccagctaatctccgcagccagtaccctcgaaggctgagatctcggggagcacagcctccgattcgcgttttctaggcaccaaagtccctcgctggaggaagaggaggggaagaaggcagaggagaggggaggggcggacggatctggtcctgggctcccgcgcggagccccctcctcccacagccgccgctcgcgtccccgcagcgcatgaccgcggcactgcggctgcagggctctctcccccgcccgcgccggattcctggagcaagggggtggggggctcggaggtgcaggacccatcattccgacacgcgccgcgacgccaggagtcggggatgacgcccctgctccctcccctcgttcctgtttctcggagtttttcgacccctgagcgcgtcgctgagtcaccttcccggaacgcgctcgggacgctctggacccagcggggactgcccgggggccgcgcaaggcgaaggcgcacccgccgatacgcgcgcggagctgcggccccagggaccccgcgtcccagccagtgccccccgacccgcccggggactctcgggtcccgcccgtctgaccccccaagtgttgggaaacggggccgagctgcctgggtcctccggaagagaagacaccgcggaggcgtgccggagttcagggcgccgcccggctaattggctgcgtgctcctcctggacctgcctcttctcgactttaagaagcgatgagagaggtgtgtgggggcgggtggggccggcgggggcgcgcgagccccgcagcctcccgcaggggcttggtttctcctaactctggccctacctgggcaggtcaccaatgggccttggcaacttcttcctccgtctccgccgtaaccccccagggatctaactcgaggtgctcgcggacacgttctgtggcttgccgcgataagtgtatcacaaacacactgacaaacgcgtccctactggcctccaaagaagtgacaacttctgagcgcgtttccggcgccccttcttcacgctgagccagagggggcggggggcacgtaccacatgcttggctttccaatcccgacgggggcccccaggcccatctacactgtcaagcctcctctccggctcggagcccccggcctgtcgcctgctctacccgggacagcgcgctaggcggcctcaggctcggtagcccagctgcagcgtcgggaagttaaaaataacctccgtgggagcgcgggggaggaagaaagagggaagctggtgggcggcgggcgagacgccccggcctggagaggcgccccgggtggcgtgcgggcctcgaatttcgggtgggctagggcagagcgcgcaaaaggggcgctgcatcccggcgccgacagcacccgcgggggcgaggtcgtggcgtcgaggtgaaaccaagggtcccccgggagagcggagccgcgcgcgcccggcgctcgctccgacacgagttcgcgcggagcccgcgcctccgtctgcgctgcgcggtcgctttcgcgcgccccagacactgcgctcgcggccgggcccgggactccgcgcctcgcggcctgccgcctcagctcacccggccaggtcgcggcgccgccttctagccagacgcctaggacgagcggcgggggcgcgcttgccgcttcctaggacccgggcgggaaccagctcgtggcccggccgtgggcgcgggccgtgccggaggcggcgcgctgaggccggaggcgggcagaggccgaggccgcgccgggctcaggttccacccccgggagcgcggggcggagccaggccggcgccgaggctcagtgccctccccgctccgcggcgccggctgcgaagttgagcgaaaagtttgaggccggagggagcgaggccggggagtccgctccagcggggcgctccagtccctcagacgtgggctgagcttgggacgagctgcgttccgccccaggccactgtagggaacggcggtggcgcctccccagcaaaccggaccgactgggtagggccgcccaccctgccttcgcgccgctcgtggctcctgtgcggcccgccctcgcggggccccgggaactgggccacttgtcgcttgggcgagagcaggcggcagctggtggcccggttcgggcttggctttggcgcgacccgggagcggctcccacgagcgccgcgcgcgtcgcaacggagcggggccctgagaagcgcgcgccgcggctcccaccgctctggagctccgggcaggggacacggcaacctggatggctggggcagggatcctctcccagaacttcgtgcccagcaatgtccgctcaagttctgggatttttacgcagctggactcccctccccctggcagccccgaggggtgaggagctagtccgtcggagggagccacggggctctgactcatccgtcgggccggaaccgaaccccaagccccagggagaaagccccggagcaggcgcccttctcagggattgtaggcttagtcacacggcgggggcgccctcggaggcaccggacctcagctctctggacttcccgggaacctggctccccgcgcgtggtcccgggatttagtcgggcgctccccacctctggcagctgcggccccggactccgccagcgctgtcttctctccctcaggtccagccgccgcagggaatgacgccggtgctcctgcagccacggctccgggcggggaaggcgagccccacagccggccctgcgacgcccgcctgggcagcaccgataaggagctgaaggcaggagccgccgccacgggcagcgcccccacagcgccagggaccccctggcagcgggagccgcgggtcgaggttatggatccaggtttgtggggttcctgctgggaagggctgtagggggattcctgttcctcgccaggaatgatggaacgcccagctggacgaaaggggctgtggacgatcgggagaaacattatccctcacgaggccagaa

SEQ ID NO: 1974 - DNA, 6000 bp, Homo sapiens
aaccagccctaagcttttttttttttttttgagacatagtcttgctctgtccccaggcaggagtgcagtggcaccatctcagctcactgcaaccttcgcctcccgggtccaagcgattctcctgcctcagcctcccaagtagctaggattacaggcatgcaccacaacacccagctaatttttgtattttcagtagagacgggggtttcaccatgttggccaggatggtctcaaatctcctgacctcatgatcacccgccttggcctcccaaagtgctgggattacagatgtgagccaccgtgcccggcccctaagctcaaagagcttgtgagatagaacctcccccttccccggtccttgcaaccccctaggcagtaaagtaccataaaaagggaaaaaccggagtggtggctcatgcctataaccccagcactttgggaggccgaggcaggcggatcacttgaggtcaggagtttgagaccagcttggccaacatgtgaaacacaaactctactaaaaatacaaaaattagctaggtgcagtggctcacacttgtaatcacagctattcgggaggctgaggcaagagtattgcttgaaaccgggaggcagaggttgcagtgagccaagatcgcgccactgcactccagcctcagcctgggcaacagagcgagactctgtctcaaaaaaaaaaaaagggaaagaagttgaggtcaaggaagaccttgaggctatgcaattagggagctgaaatctcctagggaaggtagcttcagggaagggtgagatggcaggaatcctctcctcataaaagcaagtaatttgccatctggcagccttgactccaagtttctggagagctgggaccaggccaggtgaatgcctgctttctttctcgggaaaagaaaaaagggggttctcaggtgtgtctccctggggaggctgcccacaaggaaggggaggctggggaagttagaaaaagtctcccacctgtgaagcagattacctgcaagccaagctctgggttggtgatcaaatcagacctctctgccggcccaggcctgttcccaggcccacggtgggccttgctgagcacagcggctgctcagctgtttccagactcaggatgaagcctggggagggcttggagctgcttcctctttctttttttttttgagatggagtttcgccctgtcacccaggctggagtgcaatgggacgatctcagctcaccacaacctctgcctcctgggtgcaagcaattctcctgcctcagcctcccaagtagctgggactacaggtatgcgccaccacacccggtgtagagacggggtttgagacgggtttctccacgttggtcaggctggtctccaacccccgatctcaggtgatccacccacgtcggcctcccaaagtgctaggattacaggagtgagccactgcgcccggcctgctgcttcctcctcctcagggagacgccacagctctgcggcaagcaatccaccaggcaccagatccccagatacctgcccttcagggagaaatagcctgggatacagagaggcccagaggggagctctggctggacttggcttctcagcgtggggtctgggttcacaggtttgcttctctgctttgtggggaactggttggaggcttgtgcaagcctcttcacctctcagggtttcaggcccccccaactccttcccgccttgtccttttttcttttttaaaaaaggaagtaaagtacagtgggaaacgggccaagctggcagcttgagagatccaagtgcccgccccccgacccgcaaccgtgggaaggggaaccatcttgctcttggccaatcctgcctctctgagcagggatgcagctgggggagtttctggagataggatcaaattctttagaaagggagaaggggaaaggggtctggagaaaggcagcctgggttgggggaagtgaatgacaagaatgaggggggcaaaggccttggaggtgaggggggcagggggttaggcgccagggaggacagaggacccattgtgcggcctggaaccggggccagagggctttgcccttcgcctccctcccgcggggccttccagagccaggaggggagctggggcccggaggcgttggataaagagcccgtgccccgcctccccttgccaactcagtttgcagtcaaccccgcccccgcccgctccgcggactcaaggctggtggtagtgggcctggaggcgcaggatccgacctttctggggccccaggaggaaaaaaaaaggggggaccctgaaccaggtgggctttatcaccacgaactcacagtgcttccctgtgcctcagtttcccctcttcagactctatggctaatgacagagcttttcagatttggtggaaatgctctccggggcggggagcagacggggaaggctgccccagctaatctccgcagccagtaccctcgaaggctgagatctcggggagcacagcctccgattcgcgttttctaggcaccaaagtccctcgctggaggaagaggaggggaagaaggcagaggagaggggaggggcggacggatctggtcctgggctcccgcgcggagccccctcctcccacagccgccgctcgcgtccccgcagcgcatgaccgcggcactgcggctgcagggctctctcccccgcccgcgccggattcctggagcaagggggtggggggctcggaggtgcaggacccatcattccgacacgcgccgcgacgccaggagtcggggatgacgcccctgctccctcccctcgttcctgtttctcggagtttttcgacccctgagcgcgtcgctgagtcaccttcccggaacgcgctcgggacgctctggacccagcggggactgcccgggggccgcgcaaggcgaaggcgcacccgccgatacgcgcgcggagctgcggccccagggaccccgcgtcccagccagtgccccccgacccgcccggggactctcgggtcccgcccgtctgaccccccaagtgttgggaaacggggccgagctgcctgggtcctccggaagagaagacaccgcggaggcgtgccggagttcagggcgccgcccggctaattggctgcgtgctcctcctggacctgcctcttctcgactttaagaagcgatgagagaggtgtgtgggggcgggtggggccggcgggggcgcgcgagccccgcagcctcccgcaggggcttggtttctcctaactctggccctacctgggcaggtcaccaatgggccttggcaacttcttcctccgtctccgccgtaaccccccagggatctaactcgaggtgctcgcggacacgttctgtggcttgccgcgataagtgtatcacaaacacactgacaaacgcgtccctactggcctccaaagaagtgacaacttctgagcgcgtttccggcgccccttcttcacgctgagccagagggggcggggggcacgtaccacatgcttggctttccaatcccgacgggggcccccaggcccatctacactgtcaagcctcctctccggctcggagcccccggcctgtcgcctgctctacccgggacagcgcgctaggcggcctcaggctcggtagcccagctgcagcgtcgggaagttaaaaataacctccgtgggagcgcgggggaggaagaaagagggaagctggtgggcggcgggcgagacgccccggcctggagaggcgccccgggtggcgtgcgggcctcgaatttcgggtgggctagggcagagcgcgcaaaaggggcgctgcatcccggcgccgacagcacccgcgggggcgaggtcgtggcgtcgaggtgaaaccaagggtcccccgggagagcggagccgcgcgcgcccggcgctcgctccgacacgagttcgcgcggagcccgcgcctccgtctgcgctgcgcggtcgctttcgcgcgccccagacactgcgctcgcggccgggcccgggactccgcgcctcgcggcctgccgcctcagctcacccggccaggtcgcggcgccgccttctagccagacgcctaggacgagcggcgggggcgcgcttgccgcttcctaggacccgggcgggaaccagctcgtggcccggccgtgggcgcgggccgtgccggaggcggcgcgctgaggccggaggcgggcagaggccgaggccgcgccgggctcaggttccacccccgggagcgcggggcggagccaggccggcgccgaggctcagtgccctccccgctccgcggcgccggctgcgaagttgagcgaaaagtttgaggccggagggagcgaggccggggagtccgctccagcggggcgctccagtccctcagacgtgggctgagcttgggacgagctgcgttccgccccaggccactgtagggaacggcggtggcgcctccccagcaaaccggaccgactgggtagggccgcccaccctgccttcgcgccgctcgtggctcctgtgcggcccgccctcgcggggccccgggaactgggccacttgtcgcttgggcgagagcaggcggcagctggtggcccggttcgggcttggctttggcgcgacccgggagcggctcccacgagcgccgcgcgcgtcgcaacggagcggggccctgagaagcgcgcgccgcggctcccaccgctctggagctccgggcaggggacacggcaacctggatggctggggcagggatcctctcccagaacttcgtgcccagcaatgtccgctcaagttctgggatttttacgcagctggactcccctccccctggcagccccgaggggtgaggagctagtccgtcggagggagccacggggctctgactcatccgtcgggccggaaccgaaccccaagccccagggagaaagccccggagcaggcgcccttctcagggattgtaggcttagtcacacggcgggggcgccctcggaggcaccggacctcagctctctggacttcccgggaacctggctccccgcgcgtggtcccgggatttagtcgggcgctccccacctctggcagctgcggccccggactccgccagcgctgtcttctctccctcaggtccagccgccgcagggaatgacgccggtgctcctgcagccacggctccgggcggggaaggcgagccccacagccggccctgcgacgcccgcctgggcagcaccgataaggagctgaaggcaggagccgccgccacgggcagcgcccccacagcgccagggaccccctggcagcgggagccgcgggtcgaggttatggatccaggtttgtggggttcctgctgggaagggctgtagggggattcctgttcctcgccaggaatgatggaacgcccagctggacgaaaggggctgtggacgatcgggagaaacattatccctcacgaggccagaagccggccgaatctgagccaaggaagggggtggcaggggcgccgcgtccccaccccaggtctcccagcaaaggccgctcctctggccagggtcaattaccggggtgtttcgggcaccaagttcccacactagtgccccattgttacccgtggccccctagtggtcggttgcggacgtggcctctttggttttgttttctcagcgggcggcccccggggcgtgctcccgcggccctgccgcgtgctggtgctgctgaacccgcgcggcggcaagggcaaggccttgcagctcttccggagtcacgtgcagccccttttggctgaggctgaaatctccttcacgctgatgctcactggtgagtacctctcggagggggtttcgggagcatcccctggcaggggacccccccagtcctgatagctgccggtctccctgcagagcggcggaaccacgcgcgggagctggtgcggtcggaggagctgggccgctgggacgctctggtggtcatgtctggagacgggctgatgcacgaggtgaggaccgcactgcgcggctaggcctggggcttggcgcggt

SEQ ID NO: 1975 - DNA, 6000 bp, Homo sapiens
ctttgagaggctgaggtgggtgaatcacctgaggtcaggagttcaagaccagcctggccaacatggtgaaaccccgtctctattaaaaatacaaaaaattagctgggcgtggtggtgcaggcctgtaatcccagctacttgggaggctgaggcaggagaatcactcgaacccaggagctggagtttgcagtgagccgagatcatgccattgcactccagcctgggccacagagcaagactccatctcaaaaaaaaaaaaaagaaaaaaagaaagtcttttttttttttgagactgtatctcactctttctcccaggctggagtgcagtggcccaatcatggctcactgcagcctcgacctcccaggatcaagtgatccttccacctcagcctcccgagtagctggaagtataggtgcacgcccgactgatttttttttttttttttagacggagtctcactcttgttgctctggctggagtgcaatggcaggatctcggctcactgcaacctctgcctcttagattcaagcgattctcgtgcctcagcctcccgagtagctgggattacaggtgcccaccaccatgcccggataattttttgtatttttaatagagacagggtttcaccatattggtcaggctggtctcaaactcctgacctcaggtgatccacctgcctcagcctcccaaactgctgggattacaggcgtgagccaccgggcatggcctttcctggctaattttttaaatttttgatagagatggggtctcagtgttgcccaggctgatcttgaactcctagattcaagtgatcctccctccttggtctcccaaagtgctgagattacaggcgtgagccaccgccccgggctggaaaatacttttttaaacgagggcaatgtgaatctgaaatgccatttgaggaaagatctgttcgcctgacatcctgtttgagcctgggtggacaggacagcacctgccagcatcgggaagcactgcagatgggaagaggcttggtcactctccaaaggtggcaggagttggagggggtgagctgaaggtaaggagaaaggaggtggggacccaggagacaggggctgcgcagcgggctcggggctgacacccccacggatacagttcactggggctcaaacataaaaggaacccaactattgtgggaggaaaagactcttctgcctttctgccttttctttttttctttttctttctttctttttttttttttttttttgagacagagtcttgctctatcgcccaggctggagtgcagtggcgtgatctcggctcactgcaagctctgcctcccgggatcacgccattctcctgcctcaacctcccgagcagctgggactacaggcgcctgccaccacacccggctatttttttgtattttttagtagagatggggtttcaccgtgttagccaggacggtctcgatctcctgaccttgtgatccgcccgcctcggcctcccaaagtgctgggattacaggcgtgagccaccgcgcctggctcttttttctttcttttttttttttccgagacagagtttcactcttgttgcccaggctggagtgcagtggcgcaatcttggctcactgcaacctccacctccagggttcaagcgattctcctgcctcagcctcctgagtagctgggactgcaggcgcgcaccaccacgcctggctaatttttgtatttttagtagagacagggtttcaccatattggccaggctggtctcgaactcctgaccttgtgatctgcccacctcagcctcccaaagtcctgggattacaggcgtgagccaccgtgcccagcctgacccctctgccctttcaaaaactatgttcgttctctcacagccttctcttgtcatattaagtccacaccgcaggcctaatttgtccagtgaatgctatgcaaatatttcatgcacctgctgatcgcaggaatgatatgtacttggtacgcactgatcgtacctcggggtgggagaagagagggcaaggaagcaaagaatagccccctcctttcctggtgcaccttcagatgtgccgatggggcccaggctcgctgcagatggcccccttcccagagacaggggaggatcctccacccactccccagcctccaggaccatcctgactcctgccttcaggcactcaagttatgcgtctagacatgcggatatattcaagctgggcacagcacagcagccccaccccaggcagcttgaaatcagagctggggtccaaagggaccacaccccgagggactgtgtgggggtcggggcacacaggccactgcttccccccgtctttctcagccattcctgaagtcagcctcactctgcttctcagggatttcaaatgtgcagagactctggcacttttgtagaagccccttctggtcctaacttacacctggatgctgtggggctgcagctgctgctcgggctcgggaggatgctgggggcccggtgcccatgagcttttgaagctcctggaactcggttttgagggtgttcaggtccaggtggacacctgggctgtccttgtccatgcatttgatgacattgtgtgcagaagtgaaaaggagttaggccgggcatgctggcttatgcctgtaatcccagcactttgggaggctgaggcgggtggatcacgaggtcaggagttcaataccagcctggccaagatggtgaaaccccgtctctactaaaaatacaaaaaaattagccgggcatggtggcgggcgcatgtaatcccagctactgggggggctgaggcagagaattgctggaacccaggagatggaggttgcagtgagccaagattgtgccactgcactgcactccagcctggcgacagagcaagactctgtctcaaaaaaaaaaaaaaaaagtgaaaaggagttgttcctttcctccctcctgagggcaggcaactgctgcggttgccagtggaggtggtgcgtccttggtctgtgcctgggggccaccccagcagaggccatggtggtgccagggcccggttagcgagccaatcagcaggacccaggggcgacctgccaaagtcaactggatttgataactgcagcgaagttaagtttcctgattttgatgattgtgttgtggttgtgtaagagaatgaagtatttcggggtagtatggtaatgccttcaacttacaaacggttcaggtaaaccacccatatacatacatatacatgcatgtgatatatacacatacagggatgtgtgtgtgttcacatatatgaggggagagagactaggggagagaaagtaggttggggagagggagagagaaaggaaaacaggagacagagagagagcggggagtagagagagggaaggggtaagagagggagaggaggagagaaagggaggaagaagcagagagtgaatgttaaaggaaacaggcaaaacataaacagaaaatctgggtgaagggtatatgagtattctttgtactattcttgcaattatcttttatttaaattgacatcgggccgggcgcagtggctcacatctgtaatcccagcactttgggaggccgaggcaggcagatcacttgaggtcaggagtttgagaccagcctggcaaacatggtgaaaccccatctctactaaaaatacaaaaattagcctggtgtggtggtgcatgcctttaatctcagctactcgggaggctgaggcaggagaatcgcttgaacccgtggcggggaggaggttgcagtgagctgagatcatgccactgcactccagcctgggcgatagagcgagactcagtttcaaataaataaataaacatcaaaataaaaagttactgtattaaagaatgggggcggggtgggaggggtggggagaggttgcaaaaataaataaataaataaataaaccccaaaatgaaaaagacagtggaggcaccaggcctgcgtggggctggagggctaataaggccaggcctcttatctctggccatagaaccagagaagtgagtggatgtgatgcccagctccagaagtgactccagaacaccctgttccaaagcagaggacacactgattttttttttaataggctgcaggacttactgttggtgggacgccctgctttgcgaagggaaaggaggagtttgccctgagcacaggcccccaccctccactgggctttccccagctcccttgtcttcttatcacggtagtggcccagtccctggcccctgactccagaaggtggccctcctggaaacccaggtcgtgcagtcaacgatgtactcgccgggacagcgatgtctgctgcactccatccctcccctgttcatttgtccttcatgcccgtctggagtagatgctttttgcagaggtggcaccctgtaaagctctcctgtctgactttttttttttttttagactgagttttgctcttgttgcctaggctggagtgcaatggcacaatctcagctcactgcaccctctgcctcccgggttcaagcgattctcctgcctcagcctcccgagtagttgggattacaggcatgcaccaccacgcccagctaatttttgtatttttagtagagacaaggtttcaccgtgatggccaggctggtcttgaactccaggactcaagtgatgctcctgcctaggcctctcaaagtgttgggattacaggcgtgagccactgcacccggcctgcacgcgttctttgaaagcagtcgagggggcgctaggtgtgggcagggacgagctggcgcggcgtcgctgggtgcaccgcgaccacgggcagagccacgcggcgggaggactacaactcccggcacaccccgcgccgccccgcctctactcccagaaggccgcggggggtggaccgcctaagagggcgtgcgctcccgacatgccccgcggcgcgccattaaccgccagatttgaatcgcgggacccgttggcagaggtggcggcggcggcatgggtgccccgacgttgccccctgcctggcagccctttctcaaggaccaccgcatctctacattcaagaactggcccttcttggagggctgcgcctgcaccccggagcgggtgagactgcccggcctcctggggtcccccacgcccgccttgccctgtccctagcgaggccactgtgactgggcctcgggggtacaagccgccctcccctccccgtcctgtccccagcgaggccactgtggctgggccccttgggtccaggccggcctcccctccctgctttgtccccatcgaggcctttgtggctgggcctcggggttccgggctgccacgtccactcacgagctgtgctgtcccttgcagatggccgaggctggcttcatccactgccccactgagaacgagccagacttggcccagtgtttcttctgcttcaaggagctggaaggctgggagccagatgacgaccccatgtaagtcttctctggccagcctcgatgggctttgttttgaactgagttgtcaaaagatttgagttgcaaagacacttagtatgggagggttgctttccaccctcattgcttcttaaacagctgttgtgaacggatacctctctatatgctggtgccttggtgatgcttacaacctaattaaatctcatttgaccaaaatgccttggggtggacgtaagatgcctgatgcctttcatgttcaacagaatacatcagcagaccctgttgttgtgaactcccaggaacgtccaagtgctttttttgagattttttaaaaaacagtttaattgaaatataacctacacagcacaaaaattaccctttgaaagtgtgcacttcacactttcggaggctgaggcgggcggatcacctgaggtcaggagttcaagacctgcctggccaacttggcgaaaccccgtctctactaaaaatacaaaaattagccgggcatggtagcgcacgcccgtaatcccagctactc

SEQ ID NO: 1976 - DNA, 6000 bp, Homo sapiens
ttgttacccccaccacaccttcgaccggactgaaggttgaaagggagctgttttgctctgagaactctacttttaagagtagtagctggccagaagcagatcacttgagctcagcagttcaaaaccagcctgggcaacacaggagaccccatctttaaaaaaataaaaattaggtgggcatggtggtgcacaactgtagtcccagctactcaggaggctgaagcaggaggatcacttgaggctacaaggcagaggctgcagtgggccatgactgcaccactgtgctccagcctaggtgacagagtgagaccctgtctcaaaagagtaatattgtacacacagtacatttcaaaaactgcatcaatcaaaacatttaatcacaaaccagttggctgggcatgatggctcacgcctgtaatcccagcactttgggaggccgaggcaggaggatcacgaggtcaggagttcgagaccagcctgacaaacatggtgaaaccctgcctctactaaaaatacaaaaatcatccagggttggtggtacacgcttataatcccagctactcaggaggccaaggcaggagaatcgcttgaacctgggaggcagaggttgcaggagaatcgcttgaacctgggaggtggaggttgcagtgagccaagatcacgccaccacactccagcctgggcaacagagggagactctgtctcgaaaaaacaaaaaacaaacaaaaaccaactaagcaacatttaatggatcccttcaccaagcctgagactccctaaaggatgtctggagcacctgtgatgatccaaagaaataccagccacaggagggctctgacccccaagggcacactcctcgaagggcctgggcatgaggtgaacacagcccatcttctcaccctagggttagaaggcacaggagcaggcctcaggaaaaggacatcagccctctgcaggtgcccagcggaaccagcctgcattcttgggggcaggacccatgccctgcacatttccatccactcaacaacccccatagagggcgtctcaggccatcgcagaccaggcttcctcctccagccttaccagaaagtccacctttgctgcacctgtcaggttggtgtaggaagccagtccaagggcagaggcaccttgagaggaccctatgggcagccatggcatctgtctaagatactgtgattcggctgggcgtgctggctcacatctgtaaccccagtgctttgggaagctgaagaggggaggatcctttgaggtcaggagttcaagaccagcctgagcaacatagcaagatcctgtctttaaagaaaaaaaatgctgccatctatctaggttagtgctggttgggcacctgattttcacaggagaatgtcaggtcggccacagccacctgggctgctgttctgtagccctgccctctgctaccctggctaggccttcacccacactgaggtgtgttccactggcccagagccagcctgagactcatccacggccactgggatccttgcctggtctgtgtgccttgagtattcaccacttggtcccagttttcattgtctgtgaacacttttcctttttactttatgctctggcctaagctgccgccaaaccatcacaagctaatcaacattatggtatgtcaaatctcttcactcttcccccaacagtggacaaaacacaagctacaatatttaggcatctgaactctgacctcgtatctagatgtggtacaaatatgggctggggttttatgtaagatacagggtctctgtcacgcagacagaagtgcagtggtatgatcatggctcactgcagcctagacctcctgggcccaagctattctcctgcctcaccctccaaagtagctgagattataggcatgcaacaccatgcccagcttgtctcaggccccaaactgtggtctgtacaacagctcatggcaaccacaaaaacgttggaagatagtgcagtgacctgaagcaatttccatcatccagagagcagaaggaacaatgcctgcaatcaaaaccatttatgaagagatggtgtttcctgagtgggctccaggccagtgctcagggaggcacatactcatattccttcttggccagaaaagtcacccggaggaagcagacagttctcccagcaggtacaacttatgccgctgactgacctttgctccgctggcactggggggaagggaacaggggacccagtcttgaccacaaggagctcatattctagtggagggagttccctgtcggaaggagaagcatgttctcaggaacaactgatcaacaaacagaaactctcaaagtacaaaagcaacttactctacgttttaccatttcaaaagtcaggatactattgcagtcaatgtgtatacatttaacatgggagtacctcccttttgcctgccaagtttcaactttaaaatcagtggcggtgccgattcccagcggaggaaagtgaggaggaatggagagggcaggcacctggggaaaaggagagcagcagattccaggcagtgagggagacggagggctgccagtgtccaacactaacaaaatgcagaccatctatgtaattttaaaagtttctaaaagccacgttaaaagatagaagaggaggcctggtgcggtggctcacgcctataatcccaacgctttgggaggccaaggcgggtggatcacctgacgtcaggagttcgagaccagcctggccaacatggtaaaaccctgtctctactaaaaatacaaaaattagctgggcatggtggtgcatgcctgtaatcccagctactcgggaggctgaggcaggagaatcgcttgaatccgggaggtggagtgagccgagatcgcccactgcactccagcttggatgacaaagtgagattctgtctcaaaaaaataaaaaataaaaattttaaaaaaaggacatttttttactattttttgagatagggtgtcgatctgtcgcccaggctggagtgcagtggtgggatcatggctcaccgcagcctcagcctcctgggctcaaatgattctcccacctccacctcccaagtagctgggaccacaggtgcacaccaccgtgcctggctaatttttttaatttattttttgtagagacgggagtctcactatgttgcccaggctggtctcgaactcctgggctgaagggatcctcctgcctcggtctccaaaagtggtgggattacaggagtgagccacacagcacctggcctcaatattattatgtaatccaacatatgcatacagaatatttcaacatgtagtagtcaatgtaaagttattaacgaaatactgtaccttctgtcctccagcccctacacgcacacttttttttttttttttttgagatggagtctcgctctgttgcccaggctggagtgcaatggcgcgatctcggctcactgcaacctctgcctcctgggttcaagcgattctcttgcctcagcctcccgagtagctgggattacaggcgcgcgccaccaggccctgttaatttttgtatttttagtagagacgggaggtgagggggtttcaccatgttgatcaggctggtctcgaactcctgacctcgtgatccgcccgcctcggccttccaaagtgctgggattacaggcgtgagccaccgcactcggccccgcacactcagtcttagaagtttgatgtgcattgcgcactcacagcccgtctcaggtggactggccatatttcaagtgctcaggagcctcggtggcgggtcgagtcgggaggcaaacccagctgctgccttcggagtgaagcagcgcccagggtatttccacagctgtgtaacagctgcgaggtctcctgagccgaccagagcatctgagaagcaccagagaaggggcagcgtcacaggatttggcaacccgtgggaaaggaaggaagagatcgcacagggcaaagggccgctccctgaaggccttagcggggagtacctttcctgcggccgctccacgcatgagcagcgtcttcctggggcctgggagccggcaggtccccggggcccaggtcccgcccctcccgcccgtctctccagccccattctcctaaccacccgccctgtgctcgtatcccctccgaggcttcctcgcactgtgcgcacgattcccatgcccaggccctgccgccatgcctcggtgagtgtctcgcgtgacctcgcggagcgcgtcggaccgggccggctatcccacaccgagcccaccgccgaccctaggcggccaaccccaccttccacggccgccgccgcacgcttgacacgcgcgccggaaattgcgtcaccccaacttccggtccgggggccggggggcgtgccagttgggtacgcggtccagtcagaatgcaacacgaggggtttcggaagcgcagccgcagctccgcccctaaactgggaactcctccccactgccacgttcgacgaaggaacgcgcagagtgcgcgcatcccttggccaatcaggaggcgcagagtccgtgctaccgaaaggggcagccattccagacccgtggaaggtgcaggcgaaagccaccaattagaagccaaggcagaaaaagttcttgtcgggagccaatgagaggctaagaaagacagcgagcgcgaggtcctcggccaatcccgaacgaaggccagggagcactcaggagcgtttccgaatccggggccaggcctggtgtgagtgtccaatccgagagcggcaaagacgagcctcgaagtccgccggccaatcgaaggcgggccccagcggcgcgtgcgcgccgcggccagcgcgcgcgggcgggggggcaggcgcgccccggacccaggatttataaaggcgaggccgggaccggcgcgcgctctcgtcgcccccgctgtcccggcggcgccaaccgaagcgccccgcctgatccgtgtccgacatgctgcgccgcgctctgctgtgcctggccgtggccgccctggtgcgcgccgacgcccccgaggaggaggaccacgtcctggtgctgcggaaaagcaacttcgcggaggcgctggcggcccacaagtacctgctggtggagttctgtgagcgccgggcctggcgggcgggcggggctcggggccgctgagccaggctcttgggacgcaggcacggcccggcagcccccggggtcgggacccccggcgcgcccggaactgaagggctcccttgctgcccgccttgggggccatgtcaggggctccctgggggtgagagccgggctgggagccggggggccgtcccgatgcccgccctgcgcacggcaggatcttcctgttagtgcgagaagaacaggatcgacctgtgtgagcaaacagagcaagccagtgtccagccttgccgagtcctccccgggggccgacccggaaggcgccccgctcctgcccaccccaccttcagcttgccacagcagtccttccgatggtgtctcagaggagaatcccaagccttcctcacgtccataaggatttgagctctgtccctggggtgggaaccttgtgcctgacacagctgctaactctattgacagatcgtcttattctcaccctaagcaactcagggtctgtgtgcacggatgtgcatctcatactcacagctagtgctggtacaggccgccacggtcacttcttcacttttgtctgtagtcttaaagggaaagtctaggggagatccttgccttagttgcctgtggggaataagaagtcagcaaccattgaaaggtttgtctggctgtgctgatggtgacatagcagagtgggggctggtgttggttggtggtagtttgtcgttcacggcctctgtcctgatattgcccaagaacaccaggctatcagctcagccttgtgcgttaggaggggttatcttggtgagtagataaggtttttatgaagggaaatgccagaggaaaaagggaagcactgctgagggatcaag

SEQ ID NO: 1977 - DNA, 6000 bp, Homo sapiens
tacaggcatgagccaccaatcccagcccttttttttttcttggaagacagggtcttgctctgtcacccaggttagagtgcagtggcatgatcatggctcactgcaacctcgaacttctgggctcaagcaatcctcctacctcaggctcccaagtagctgggaccacaggcatgtgccaccacacccaactaacttttttttttttttttttttgaggcggagttttgctcttgttgctcaggctggagtgcaatagtgtgatctcggctcactgcaacctccacctcccgggttcaagcaattctcctgcctgaccctcccgcgtagctaggattataggtgcccgccaccacacccggctaatttttgtatgtttagcagagacagggttccccatgttggccaggctggtctcactcctgacctcaggtgatacacctgcctcagcggtctcccaaagtgctaggattacagaggtgagccactgcgcccagcaatgtttcttcttttttttttttttttttgagacggaatctacctctgtcgtccaggctggagaatgcagtggcgccatcctggctcactgcaacctccatctcccaggttcaagtgattctcctgcctcggcctcccaaatagctggtattacaggcgcccgccaccatgcccagctaatttttgtatttttagtagagacggggtttcactgtgttggccaggctggtcttgaactcctgacctcgtgatccgcccgcctcggcctcccaaagtgctgggattacatgcgtgagccaccatgcccggccaatttttctattttttgtagagatggggttttgccacgttgcctaggatggtctcaaactcctgggattaagcagtccgcccacctcggccttccaaagtgctgggattaccgggatgaaccactgtgcccagccctagctaatttttgtattttttgtagacagggtttcaccatgttgcccaggatggccctctgcattttaaaaattttattttttgaaacgaagtctcactctgtcacccaggctggagtgcggtggcacgatctcagctcactgcaaccttacctcccaggttcaagggattctcctgtgtcagcctcccaagtagctgggattacagacgtgcaccaccacgcccggctaatttttgtatttttagtagagacgggggtttcaccatattggccatgctggcctcgaactcctgacctcaggtgatccacccgtctcagcctcccaaagtgctgggattacaggcatgagccaccgcacccagcctgtcctctgcgttatctaaattttctttgacatgtacatccatcaaacacatgttctcacccaggagtctgacagcaggcctcattttagagaggtggacagtaactcaaaactcagtgccagttttctacctctgggaacaggctgacgccccgcccacctgactcccgcgcctcctaacttatcccaggcgtttcgggagttctcgccaatggcccaccctccatgcctcccagaccaggaagaagatgacacacttttatgccaccaaaggcggtcaactgacaggaaagaaacttcctcctcctgggagactgaggctaaggaatgatgcctctcctttttccctcctagaacttgactccctggtccgaatcgggaaaaccccattcagatgtagaaggattccaccagtgctaacaagacggtcaccagtgacaagtggatttaggagtgctcatctcatctgcaaacctgagtgttagtgacagaaccacggtgactttggacagagcacttcccgttccaaaagtgaacatgagtaaaaaatgagaacatcaatcacgcctgtaatcctagcactctaggaggccgagacgggtggatcacgaggtcacgatcgagaccatcctggccaacatggtgaaaccccgtctctactaaaaatacaaaaattagccaggcgtggtggtgcacacctgtagccccagctactcaagaggctgaggcaggagaatcacttgtacccgggaggcagaggttgcagtgagcagagatcgcaccactgcacgacagagcgagactgtctcaaaaaaaaaaaaaaaaaaaaaaaaaggaaacatcaaaacagccaagtgagaggcaaccacagagctgctgccactagaacaggacagggcacacctgcttaaggggacaaaaggaaacatcaaaacagccaagtgagaggcaaccacggagttgctgccactagaacaggacagggcacacctgcttaaggggagaaccctgctaacactggaatgagctgctttcgggctacccaccatgagcatctgacatgccacagaaccggttttatagacgagttttcttttgccaccgtcactgatctggctacacaggggctcggcctccactacggcagcttcagaggcggcagacgagcagctgagggcccgtgctacagacggagcagggcgggcttggattcgaggtctgctaccgacaggctcgatgctgttactcagctgctctaagcctcagccctttgtctgggaaaagcccgcctcacagagaggatgcgaggagaaatcacgcaagcacgtgacgcggcagctggcacgctacacacgacagctagcaggtgtcaccccgagagctacagccatgctgctgctcctaggaacagggggcagcacaaacagcccatgtggccagaaaggcaccagtctccctctcctcgctggtcagtctccaaacagacctcagccagccgcccccaggatggcaccagacaagacaggttctccattcgaaggttcttccaggatgaaaactcctcacaagaccctcagggcacaagtggacagagaacccggtctgaggaacgggatccctccaagcctctggaacccggcctccccaccgctcagacagctgcccctgcccttccaagtcggcaggccagtccctctctaaagacagttcaagggcagtgccacagccacacctgtatattccttgggggaagccgtgtctccattcctgaagaacttgatggtgggatagccgcgcacgccgtactgctgggccaggtcagactcctccgtggcgtccaccttggccaacctgatctcggaaccttctgccttcagcttcccagcggctttggcatactcaggggccagagccttgcagtggccacaccaaggggcatctggaagcggaaatgagatgctagaaagcagccttgatccctaaagcagccttgatccctcagcagtgcttccctttttcctctggcatttcccttcataaaaaccttatctactcaccaagataacccctcctaacgcacaaggctgagctgatagcctggtgttcttgggcaatatcaggacagaggccgtgaacgacaaactaccaccaaccaacaccagcccccactctgctatgtcaccatcagcacagccagacaaacctttcaatggttgctgacttcttattccccacaggcaactaaggcaaggatctcccctagactttccctttaagactacagacaaaagtgaagaagtgaccgtggcggcctgtaccagcactagctgtgagtatgagatgcacatccgtgcacacagaccctgagttgcttagggtgagaataagacgatctgtcaatagagttagcagctgtgtcaggcacaaggttcccaccccagggacagagctcaaatccttatggacgtgaggaaggcttgggattctcctctgagacaccatcggaaggactgctgtggcaagctgaaggtggggtgggcaggagcggggcgccttccgggtcggcccccggggaggactcggcaaggctggacactggcttgctctgtttgctcacacaggtcgatcctgttcttctcgcactaacaggaagatcctgccgtgcgcagggcgggcatcgggacggccccccggctcccagcccggctctcacccccagggagcccctgacatggcccccaaggcgggcagcaagggagcccttcagttccgggcgcgccgggggtcccgaccccgggggctgccgggccgtgcctgcgtcccaagagcctggctcagcggccccgagccccgcccgcccgccaggcccggcgctcacagaactccaccagcaggtacttgtgggccgccagcgcctccgcgaagttgcttttccgcagcaccaggacgtggtcctcctcctcgggggcgtcggcgcgcaccagggcggccacggccaggcacagcagagcgcggcgcagcatgtcggacacggatcaggcggggcgcttcggttggcgccgccgggacagcgggggcgacgagagcgcgcgccggtcccggcctcgcctttataaatcctgggtccggggcgcgcctgcccccccgcccgcgcgcgctggccgcggcgcgcacgcgccgctggggcccgccttcgattggccggcggacttcgaggctcgtctttgccgctctcggattggacactcacaccaggcctggccccggattcggaaacgctcctgagtgctccctggccttcgttcgggattggccgaggacctcgcgctcgctgtctttcttagcctctcattggctcccgacaagaactttttctgccttggcttctaattggtggctttcgcctgcaccttccacgggtctggaatggctgcccctttcggtagcacggactctgcgcctcctgattggccaagggatgcgcgcactctgcgcgttccttcgtcgaacgtggcagtggggaggagttcccagtttaggggcggagctgcggctgcgcttccgaaacccctcgtgttgcattctgactggaccgcgtacccaactggcacgccccccggcccccggaccggaagttggggtgacgcaatttccggcgcgcgtgtcaagcgtgcggcggcggccgtggaaggtggggttggccgcctagggtcggcggtgggctcggtgtgggatagccggcccggtccgacgcgctccgcgaggtcacgcgagacactcaccgaggcatggcggcagggcctgggcatgggaatcgtgcgcacagtgcgaggaagcctcggaggggatacgagcacagggcgggtggttaggagaatggggctggagagacgggcgggaggggcgggacctgggccccggggacctgccggctcccaggccccaggaagacgctgctcatgcgtggagcggccgcaggaaaggtactccccgctaaggccttcagggagcggccctttgccctgtgcgatctcttccttcctttcccacgggttgccaaatcctgtgacgctgccccttctctggtgcttctcagatgctctggtcggctcaggagacctcgcagctgttacacagctgtggaaataccctgggcgctgcttcactccgaaggcagcagctgggtttgcctcccgactcgacccgccaccgaggctcctgagcacttgaaatatggccagtccacctgagacgggctgtgagtgcgcaatgcacatcaaacttctaagactgagtgtgcggggccgagtgcggtggctcacgcctgtaatcccagcactttggaaggccgaggcgggcggatcacgaggtcaggagttcgagaccagcctgatcaacatggtgaaaccccctcacctcccgtctctactaaaaatacaaaaattaacagggcctggtggcgcgcgcctgtaatcccagctactcgggaggctgaggcaagagaatcgcttgaacccaggaggcagaggttgcagtgagccgagatcgcgccattgcactccagcctgggcaacagagcgagactccatctcaaaaaaaaaaaaaaaaaagtgtgcgtgtaggggctggaggacagaaggtacagtatttcgttaataactttacattgactactacatgttgaaatattctg

SEQ ID NO: 1978 - DNA, 6000 bp, Homo sapiens
tcatttcggtctcatgaaaaaccatttcgctgatgcaaaactctgctttcaacctaaacataatcaaacatttccactttttttctttttttttgagatggagtttcactcttgttgcccaggctggagtgcaatggtgcgatcttggctcaccacaacatctgcctcccaggttcaagcgattcttttgcctcagcctcctgagtagctgggattacaggcatgcaccaccatgcccggctacttttttgtatttttagtagagacgggattttaccatgttggccaggctggtctcaaactcctgacctcaggtgatccatccacctcggcctcccaaagtgctgggattacaggcacctgccaccatgcccggctaatttttttggatttttagtagagtcggggttttgccatgttggccaggctggtctcgaacacctggcctgaagcaatccgcctgccttggcctcccaaagtggtgggattacaggtgtgagccactgcgcctggcctatgccattcaattttgagaattttcaaataaaaagtttaaactaatcttttttttgtttgttttttgagatggagtcttgctcttggctcactgcaacccccgtctcccaggctcaagagattctcctgcctcagcctccccagtagctgggattacaggcacacgccacacacccagctaatttttgtatttttagtagagatggcgtttcactatgttggccaggatggtctcaatctcctgaccttgagatccatccacttcagcctcccacagtgctgggatgacaagtgtgggccaccacaccctgccttgatctcttgaccctgtgatctgcctaccttggcctcccacagtgctaggatgacaggtgtgagccaccgtgccggcctccatctcttgaccttgtgatccgcccgcctcggcctcccacagtgctggaataacaggcgtgggccgccatgccggcctccatctcttgaccttgtgatctgcccgcccagactctaatctctttttaatcccacgtatttcacagctgagtttcatcctatggagtctgtgacaggatctttatataaacatgggtaccaaccacctggctttttttctatcaacttttcttcatgagatgaaaatgaaaatgttggggggggcacggtggttcgcgcctgtaatcccatccctttgggaggctgaggcgggtggatcacctgaggttgacagttcgagaccagcctaacatggagaaagcctgtctctactaaaaaatacaaaattagccgggtgtagtggcacatgcctgtgatcccaggtacttggaaggctgaggcaggagaatcgcttgagcccaggaggcggaggttgcagtgagccgagatcgcgccattgcactccagcctgggcaacaagagtgaaactccatctcaaaaaaaaaaaaaaaaaaaaagaaaagaaagaaagaaaagaaaataaaaatgtgggccaggcaaagtggctcacacctgtaatcccagcactttggaaggctgaagcgggcaggtcacctgaggtcaggagttcaaggccagcctagccaacaaggcaaaaccccgtctctactaaaaataaaaaaattagcccagcatggtggcacatgcctgtaatcccagctgcttggaaggctgaggcaggagaaccgtttgaacccgggaggcagaggttgcggcaagccgagatcgcgccattgcactccagcctgggaaacaagatcgaaactcggtctcaaaaaaaaaaaaaaaaaaagaaaatgaaactgggtatttcgtgcaggtatttaacaggagctactgaggctagtccagcaggcagcagacagcacagaggggacactcacagtcggggccgctcagacagcatggaggggacactcacagtcagggcagcatccgttaaatgccatcctgcagatgccacagttctcatcgttggccacccagagccaagtggccacgccgttccagcacttaatcttcaccttcatggcagcagagcctgcggcggagggaacaggacgactggctaaattgagtctgcagagctagaacgtttaggcaccaacacaggtataagcctgccacagtgcagtcccagctactcagggggccaaggcaggaagatcataccggcccaggagtccgaacccagcctgggaaacatcgtgagccctgtttctattttattttacttttatttttattaattttttttttttgagacagagtctcactctgtcacccaggctgtagtgcagtggcatgatctcagctcatttcttgtgcttcggcctcctgagtagctgaggctataggcacgtgactccacgcccgactaatttttgtatttttagtagtcgaggtttcaccatgtaggccaggctggtcttgaactcctggcctcaagcgatctgccactgcggcctcccaaagtgctgggattacaggcgtgaacccctatgccctgctatgagccccgtttctattaaaacaaataacaagtaaagggctctgggcccagagggtcagggctgcaggggagctacgggagaacagcaagccccagcagcaatccgctttgtggctcacacctgtgatcccagcactctgggaggccaactcgggaggatcgcctgagctcaggagtttgagaccagcctgtgtaacacagtgagactgagtctctaccaaaaaaaaaaaaaaaaaaaaaggaaaaaaaagaactatctgtgaggtttctttagccatctagagaaagggcacactcttctctccaagggaagggactcagctccttacggacaaggagatcacatttgggagcacaggacagtcaggagtttggttttacctcacgttgaggatatcttcaaagatctcaaatgggcctggccaacatgacgaaactccgtctctacaaaaaatacaaaaaaattagccgcaggtggtggctcatgcttgtaatcccagcactttgggaggccgaggagggtggatcacttgaggtcaggagttcgagaccaacctggccaacatggtgaaaccccatctctaccaaaaaaacaaaaattagaggccaggcgtagtggctcacgcctgtaatcccagcactttgggaggctgaggcaggcagatcacaaggtcaggagttcaagaccagcctggccaacatactgaaaccctgtctctactaaaaatacaaaaaattagccgggtgtggtggtgggcaactgtaatcccagctactcgggagggtgaggcaagagaatcacttgaacctgggaggcggaggttgcagcgagctgagatcacgccagctcccagctctattcgggaagctgagccacaggaatcacttggacctgggaggcagagattgcagtgagccgagatcgcaccactgcactccagcctgggcaacatagtgggactgtctcaaaaaaaaaaaaaaaagccagctgtggtggcgtgcaccagctgcctgagaggctgacgtgggaggatagctcgagcccaggagtttgaggctgcagtgagccaagatcacaccactgcactccactctgggtgacggagggagaccctgactcaaaaaacaaaaacaaaagcaagtatctcaaaacaacttaaaatccatgaaatgggctgggtgtggtggctcatgcctgtaatcccagcactttgggaggccaaggcgggcggatcatctgaggtcaggagttcaagaccaccctggccaacatggcgaaaccctgtctctattaaaaatacaaacattagccaggtatggtggcacgtgcctgtagtcccagctactcgggaggctgccgctggagactcgcttgaacccaggaggcagaggttgcagtgagccgagatcgccccactgcactccagcctgggcgacagaatgagactgcctcaaaaaaaaaaaaaaaaaatcaatgaaatggcacactggttttcattaataagttgcaaaaataatttttttttggagacagggtctggctctgtcgcccaggctggagtgcagtggtgccaccacggctcactgcagcctcgacctcctgggctcaagcaatcctcccacctcggcctcccaagtagctggtagtacagaagtgcaccaccatgcccagctcatttttttttttagagatgggggtctcacgatgttgccccggctggtctcaaactcctgggctgaagcgaacctcttgcctcggcctcccaaagtgctgggattacaggcgtgaggcccgcgcccggcccgcaagaaaacttgtaaaggatatgactggcaaaatgtgacagtgcagacttgggggggctgcaggtggagaccaaaaaaccaacccgcagctcgtctgcagcggctgccgcccgccgaagccgcgcccgccggaccccaccgcgagccgagcgcacagtcctgggcgggagcggaaacaaggactcccagcagctcccaggcacccgccgcgcccgtagcgcccccagcgcccccagccctggccgatcgggcggagcgtgcggggagggaggggcgcgtaggctccgcctccaacggccgccgccccaccccctgcgccctcgcaccttcgccaacctaatcacgcaccgccctacccgcccttccgttggcagcgccggcgtccgcgcgggaaggtataaaaacgaccacagtcgcggcccgactccctcaacagcgcccgccgagtctcgcacgccagtgcgcacgcgcctccccgcctcaccccgtcccgcgcgcgcagccgtccgccagcggccaatcagcagccgctccgaggccgtggcaccggaaggcctcacgcggcgccggaagtgacgtgccggcgtgctgacgcgcgggctcgagccgatgcccgattccgcgcccgccatggccgacaaaatggacatgtctctggacgacatcattaaactgaaccggagccagcgaggcggccggggcgggggccggggccgcggccgggccggctcccagggcggccgcggcggtggggcgcaggccgccgcgcgagtgaatcgaggcggcgggcccatccggaaccggccggccatcgcccgcggcgcggccggcggaggcggcaggaaccgaccggcgccctacagcagggtgagtgcggaggccggccgcgccggagagtgggagggggccagccggggctggggccggggccgctcgcggcggagacccgggccggcgggtggataaggctggtggagcggccgcccggaggtccggagggtgcgtgtgggcgcggagggggtggtgggcgggagcgaggtcgttctttcggggtccggtcccggaggctgagacccttcccagctctttgtttgttccggacgttggggcctcgtggcaggagaggaggggacgctgggcgcggcacaggcggcgggaagttagtctaagggaactgaagttgtgcggccgcggtgggaccgtgcggcctcgggctggggcagctgcagcgccggagggagcgctggcggccccgtttcggccggatcctctcaggccgggaagaggaagggtccggagtagccgtgagggtcaggaaagccctggactgagactcacagatctgctcttgttgcggtttttttttcagccaaaacaacttcccgacaagtggcagcacgatcttttcgacagtggcttcggcggtggtgccggcgtggagacaggtgggaaactgctggtgtccaatctggattttggagtctcagacgccgatattcaggtaagagacgagggcttctcggtgagccgttcgccctgcacaggacggatcgtgattttggggatgtggccctgagtccccttcccgccttagcgaagggagccctcccagctctgaagggctgcaggacagacccagtgctagtaaagccggggtcagtgcgcaggcaggt

SEQ ID NO: 1979 - DNA, 6000 bp, Homo sapiens
ttctgccctgacctcccaaagtgctgggattacaggtatcaggcgttgccctactcctttttgagacggagttcactcttgttgtccagactggagtgcaatggcacaatctcggctcactgcaacctccacctccctggttcaggcgattctccagcctcagcctcccaagtagctgggattacaggcatgcaccaccacacccagctaattttgtatttttagtagagacggggtttcgccatgttggccaggctggtcttgaactcctgacctcaggtgatctgcctgccccagcctcccaaagtgctgggattacaggcgtgagccaccgcgcccagccgccccactcttaaatggacggattatcacagcttccaccagccacttcatcaaatatacaactaagagaggatcctcatgccttgctccgtggcaaggttaaaaacaacaacaaaaaaacaaacagaaaaaggaattacactacaaagtcaaaactgctgaatccacgtttctctgaaaaccagagtacaagaaggaaaggaacagcccagagatgttctggctgtgggaagcctgtggacggcacacagggcagccatcccaccccaacctcccctcacctggaggcacaggcacaagggtcaacaggtggctcccgggcaaaggtgtcctcccacctggtgagttagagaggaaggtgttaggtgtgaggcaggaaagaagataagaaagaagacaggcagcttcggccctccaggagcggggaccccccgccacccccacaacccatgccaacttcaggtgtccaacaccagatggggctgctccctccatccccaactcaggttctcccaccccctcccagctggacagacaccaaaatcctggcccaggcctggactccaacagtgggacgaatcaaacagttccagttctacacacatttctattttattatggaaaaggtggaaacgccaccttctccacaacagcaaccagtaaaatttatcccaaaaataactcggtacaaaacaggtctgtttcagaattaaaaaaaaaaaaaaagaaaaaaaaaaaacctttacatgagtttttaaatcctattttaaaacataaaagaaacaaatccatcattggccgcacagccccagccaccgccccccaaccagggagcaagaggagacgcctgggtcctgttccgcacgcggatttgctggtctgtttaactggtgtccatctgaaacacagaggagaaagaggcttgcattcacaggcggcctgctccccactgcggctttgaccaggcccccagctggctcccccgggactcactctcgcattataggcgtccagctgggcatccagctcctctgccgaaagctgctgctttgaattcctgccggcacctctgcctcttccacgggcgcctccgcgggtgcctctccgggtgcctccaccaccaccaaaacctccagcgccacggtttctagtcatgccacctctgtttacgctagcaaggaagacgaaaccgttcacacacccggaaggaccctaagagcgacgcagcctcaccctcggccaatccccttccccagaggccccggaagtcacctctgtgcaggcctccgctgtgcgtcaatctgtgacgtgacaagctgaatgttcatggggcggcctgcggcaaagaatacgagaaggcacgttctattgagaggctctgaaacccacccagctggcgccacaccctggtctccatgcaaacactggaaagggcctctgtgcgtctcaaatgcccccgacaagggaaatggcctggagatactggtgggagaacaaaatggcaaggaagcaaccccaccaacacctcctcactccttctcagtccagactaggtgggctgctcgctgaggtatcggggtgctcgtgggtggagaggtgtgggtgacctgacgaagaagaaccggtacctttgtctttacgactacagccccgcactcagaggtgtactatggcggttctgagaaggcttcacagaagtgaatcttccggaaggagctgaaggaggggagggatgtagcttgctggatgggggttcacaagaggttggtccagatgtgtggggcagcatgagaggtggcagatggaagagagagacaaaggggcaaatgcaaagtgtcctcagccacaggggtaccccatattcctacctggacaggtgccagccccaaactccacaagccccacagtcagcgtgggtccacccccagactcaccatccagagggacgccgttgtactgcttcatggccttcagggcatctgccttccgctcaaagtgcacgtctgctgttcctaagctgcgaccagagcgatcatagtgcacagccgccttcttcagcgttccaaattcagcaaagagttcctgggagttgcagagagcagttgtcagaaaagcaacaaaactgcgttccttctggtggcccagggacaggccctggaagcgtgagttgctttgggggtggttctctgggaggcaggacagtggttaacgggaaatgagggaagggcggggcaggagggacagcaacttccaagagcacctgggtctgagggctcctgccattgtggggacctgacacgtgtaccacgatgcaggtagaggaagctgcaaagcccactagcaacgggcacaaaattaagccactatcctcttcaacaaaggaaaatgtacaacacacccaagggctgttccaagaaacggtaaaggccaaaatcaagagcaagggaagcagtccgatatcagaccagcttgaagggcctgtagattcgggagccctgaccccagcccctcccccaaaggcagattctggctcacctttccctctcctcctactcaagcctgcggcaaagtctgaagtcaagcgctgtcatggaaactgccctgacctcaggcaggctgggagttggagagggaacccagagtgtggggatactccggccgcaggcacacagcgggaactggagttcaccaaaagcggtttccagtggatgctagaaaccaccttaaaaaaagtgttgagacactgtgagtgctcactggccctactctgtcctcccaaggcaaatggctgggctgtgggcaactgaaccctgcccagccatctccaaaactgattcccaaaaagtcatttcttaaccagaaaacaagttgaaatgccattgggattcaatttttctttttttaaaaaagaaaagcttcaaccaaagatggatttgagagtcatgtcactgacgggacacggcggtggggagtgataaaaccacagcgtacaaggtctttataagacagtactcaaggcaaacagagccagaaaaacagactccctgtgcttcacaagatacataaagaagattctttttctcacattaacccactaagacaggcacaaaatttaaaaagcaactgggctgggtctaacagccaaaaaccactcacatttggtcagtctttgtccctgttagaaactggaagccctggcaggggattttcactcacagaacccatcttcagactaacagcagcagttcctcaggctcagctaggctcgcacctgcctgcgcactgaccccggctttactagcactgggtctgtcctgcagcccttcagagctgggagggctcccttcgctaaggcgggaaggggactcagggccacatccccaaaatcacgatccgtcctgtgcagggcgaacggctcaccgagaagccctcgtctcttacctgaatatcggcgtctgagactccaaaatccagattggacaccagcagtttcccacctgtctccacgccggcaccaccgccgaagccactgtcgaaaagatcgtgctgccacttgtcgggaagttgttttggctgaaaaaaaaaccgcaacaagagcagatctgtgagtctcagtccagggctttcctgaccctcacggctactccggacccttcctcttcccggcctgagaggatccggccgaaacggggccgccagcgctccctccggcgctgcagctgccccagcccgaggccgcacggtcccaccgcggccgcacaacttcagttcccttagactaacttcccgccgcctgtgccgcgcccagcgtcccctcctctcctgccacgaggccccaacgtccggaacaaacaaagagctgggaagggtctcagcctccgggaccggaccccgaaagaacgacctcgctcccgcccaccaccccctccgcgcccacacgcaccctccggacctccgggcggccgctccaccagccttatccacccgccggcccgggtctccgccgcgagcggccccggccccagccccggctggccccctcccactctccggcgcggccggcctccgcactcaccctgctgtagggcgccggtcggttcctgccgcctccgccggccgcgccgcgggcgatggccggccggttccggatgggcccgccgcctcgattcactcgcgcggcggcctgcgccccaccgccgcggccgccctgggagccggcccggccgcggccccggcccccgccccggccgcctcgctggctccggttcagtttaatgatgtcgtccagagacatgtccattttgtcggccatggcgggcgcggaatcgggcatcggctcgagcccgcgcgtcagcacgccggcacgtcacttccggcgccgcgtgaggccttccggtgccacggcctcggagcggctgctgattggccgctggcggacggctgcgcgcgcgggacggggtgaggcggggaggcgcgtgcgcactggcgtgcgagactcggcgggcgctgttgagggagtcgggccgcgactgtggtcgtttttataccttcccgcgcggacgccggcgctgccaacggaagggcgggtagggcggtgcgtgattaggttggcgaaggtgcgagggcgcagggggtggggcggcggccgttggaggcggagcctacgcgcccctccctccccgcacgctccgcccgatcggccagggctgggggcgctgggggcgctacgggcgcggcgggtgcctgggagctgctgggagtccttgtttccgctcccgcccaggactgtgcgctcggctcgcggtggggtccggcgggcgcggcttcggcgggcggcagccgctgcagacgagctgcgggttggttttttggtctccacctgcagcccccccaagtctgcactgtcacattttgccagtcatatcctttacaagttttcttgcgggccgggcgcgggcctcacgcctgtaatcccagcactttgggaggccgaggcaagaggttcgcttcagcccaggagtttgagaccagccggggcaacatcgtgagacccccatctctaaaaaaaaaaatgagctgggcatggtggtgcacttctgtactaccagctacttgggaggccgaggtgggaggattgcttgagcccaggaggtcgaggctgcagtgagccgtggtggcaccactgcactccagcctgggcgacagagccagaccctgtctccaaaaaaaaattatttttgcaacttattaatgaaaaccagtgtgccatttcattgattttttttttttttttttgaggcagtctcattctgtcgcccaggctggagtgcagtggggcgatctcggctcactgcaacctctgcctcctgggttcaagcgagtctccagcggcagcctcccgagtagctgggactacaggcacgtgccaccatacctggctaatgtttgtatttttaatagagacagggtttcgccatgttggccagggtggtcttgaactcctgacctcagatgatccgcccgccttggcctcccaaagtgctgggattacaggcatgagccaccacacccagcccatttcatggattttaagttgttttgagatacttgcttttgtttttgttttttgagtcagggtctccctccgtcacccagagt

SEQ ID NO: 1980 - DNA, 6000 bp, Homo sapiens
agccctaggtgctagcagggctgcaaaggacaccccagttcagagcagctcgggctggcagacctgcctcacgcccacagtgacagcagccagaccctgaccacacgtcacccactggcttccccggggcagactttaggcaccacctacacctgtacatgtgcccacaacatcctgcgccctgccagggaagttttccctggctgaggcagggaccagcctactgccctgggctgggaggacttagcaacaggggaacgtggggtcagctgggcgtgacccaggccctcacctgcggcacacttgagcttggtgaggatggcctgggtctggctgtcacgctctcctcgctgctgtaggaggaagccacatgcgtgaggcccatgctccacatttcctagagctcgatgcccagcccccagactgagaggggatgaaggcagattcagatctgggggagaatgaggtgggggaggacaggaggggccagcagtggtcaggaatcctgggggcaaggtctctgaggaggtggcccgtacctcggcaatctctggggtggactcagccttgctgacgtagctgagcacatgagaccaattctgcaagtagacgctgacctggcgggggggcgcagagccaagtgagcccgggcgccccaatggcccagccatgctgcccacccccgcccgccgaggcaggccgaccttgatgacattgaggcacatgttgatgacgtgtttggcgctggtgcagtagtcccgggcccgggaatagcacttgagggcgttgctgaggtccccacagtccaggtagtggtcgcccaggtcgtcgtggccgcgccggatgctctctttgatggagttgcccttgtagttcttcaggtctgtgtccagcttctccagcttcagcagcgccttcttccgcgtggcctccacccaggccgtgtccagggctgggggctccacgccgctctcagggatggcgtcgggtgcgttctgcagctccctgagagaggacctggccatcaggatggcggcggtcacgggggccagggaggaggggaggaagccgccaatctcaggctgccctcaaaggcccaaccggcacacaggtgggcacctcccgctggcctcaaaccccacctctagggaccagtctgcaccagggccacagagagaactgctgccccaggagcctacagccgggtggggaaaccagcagggaggcggcccctgagccacagtctccaacagctccccttggaatcaaagccctgcatgcacacacacagaagccacacacacacagggcacttccactgctggccaaaagagagcgagagctctacccgcccgacttcccagcacaggggtgggagatgcagggcacaggaagggggcccagtcccagacacccgcgctcccttggtggcctctgcttcctctcgccaagcccctggcctcacctggtggcctctgagagcttgcggtggatctcctcgtacatgtccacgttaaaggttctctgcacgaaggagagggccatcttcagggcctccacccgcagcgtggggcagtgatcagcaatgaactgcagccgttcgatgcgcatcaggccgctgtagctggccgcgtactgttccagatcctgggagcaggcacagacaagagtcaggcaggatgggaggcaggaccctggccccaggccctgagggtcaggagttggggcctgactgtcctagccagaatgtcgccctgggcccataaccagaaccgggcatgggggtacgagactgactgctgtcccaggagctacgaagaccgctggggtgggcctggcgcaggagcctcaggagtgggaccctgcacccgggggctttcggggatagacacccactagtgactgctggtcgctaggctgagcggggaggagacctgccctggcttctccatgagcagcatctgaagctgagctacaagcctcatgtgagtgcgcaatcagaaacgctgatggtttcggggtcagaaaaagacgacagcgatcactgaggaggatcattctacctgctgtgcaggctgcagcggggagtgtgccctggacccctcagcaggactgagacacccaaggtccccccactgggctccgtaccaggctggggttctccaccacgtagttgacgtcaggtgcattctgcgggtcttcctgggggtccacgtcgatctgcatgggctccacggccccctgcaacatgggccaggcacctggcacctcgtcctggggactgccccaggagggcgagagacccgcactgttctctgaggtcagctctgcccaagatcttccaggccagtcggaccacactcccgccgctgctgtcccccaggtgtgccctcccagtcacccccgcccccacccaggctcctgtgccaccacatcagggaggggtctcctcacaagactctaaggctcagaagcagaaacccctcgcctgattctagccgctcatctctgaaagccagaaagcagacaggggacaaccaactacacaggggcctctgagggcccctacacgttcccagccaccatcctgatgtagtttcctccaagccacggagaagaacgggacgccacctcaaccccaggaggcaggaggaccagcccccggaatctgtcctgagcagcggagcagcaatactgggctgagagtcacgccacggagttgggagaaggggaaaagagtcatctcagggagcctcatggcccccagctgggagacacagagaagccaggacctcggcttaacacaaagcaggctggaaaagccgccatgccgggcactcgccggacccgtgggcctcccgcgctccttcgggaaaagcaccaagagctcggctccctccgcaggccccgggcccaccggggctccctcccctcctgcgcttggcactgagtccctgtcctcggccagcagagcagcaggggcccagccacagcaggggcggccggggccctgctcccccctccctcgctcgggggtccctgtcctggaaggtacctcgtagagcagcgtacaggccgacaggctggcgctcaggctgaagtccccggccgtgccgggcaggacgaggtctgacctactgctgtgaggggtgcagtacagatctgtcactgacgaggaggccgagctgggggccgagctatccctcattctgtcctgactttctgcaccccccgaccctgacacagagctggctggctgctgaagggagaaagagcgttagcgtcggggcggccgggaacctctcccgtgagctgctgggaggggaggcggggcgggcgcggcccggcggcccccgatcgcagcgcgcagccacggcggagacgcgccctcggccctgcagcccccgacgcgcgctgcccgcggaggcccggcacggagcgtgcccgaccgactcctggcgcaggccccgcgcccctgctcgacctcagcccggccccagtggcggggggcgcgggggcgcggaggcccggggcggcctcggctcgttacctgcaagttaaacacctgaaccggcagcggcatcttgcacccaccccgccgcggcgtgccgtccacttccggggcagcgaagccgtcgcttccggggcgcggggcggggcggggccgctgcgttcttaaaggggccgccgcccacccacggctccggccaggttctccgctcgcagcgccgggggtcccggcggccgcatgagccgcgcgcgtggggcgctgtgccgggcctgcctcgcgctggccgcggccctggccgcgctgctgttactgccgctgccgctgccccgcgcgcccgccccggcccggacccccgccccggccccgcgcgcgcccccgtcccggcccgctgcccccagcctgcggcctgacgacgtcttcatcgccgtcaagaccacccggaagaaccacgggccgcgcctgcggctgctgctgcgcacctggatctcccgggcccgccagcaggtgcgccggaccccgaccccgacggcgagccccacgcccacccgccccgcctcccagggtctaggcccggcccaggcccccggaggctccgcgcggggcgggtcggtctccggcctgggcagcgccccagaagcctcatagattgtttctcccccagacgtttatcttcaccgacggggacgaccctgagctcgagctccagggcggtgagtgtcccccactccccggcgcccgcgggatctgccccccgagcctttctcgctccgaagccacggccccttcgctgctgtgggtgcctttctctgcccaggctcccgaggcccggggaggccccgacgctgcccaggtcacgcggcctgcggagggcccaccctgccagccaagctctgctccccaccagcctctcacactagccgcttcccggggcgtggggctagtgccacgtcccctgaagaagcgccagcagggaatccgcccttccaggccaggtcagggcgagctgcctccgtcctgtttccactcaagagatcccaaccgatggccgcctgcttcagcctcggtggcaccagcagggtcagcgcgtgagggctagggctgtggttggacccaggcaaggtgtccaggcatgtcagacagccacgttgtgccctggcccttgggggcaggtggggcacaggccttaccccaaccccagtgccatcctctacgtgcgtgcttcccgtctctgattcgcaggcgaccgtgtcatcaacaccaactgctcggcggtgcgcactcgtcaggccctctgctgcaagatgtccgtggagtatgacaagttcattgagtccgggcgcaagtacgcggcgctgacccgacccgcagagagctcagagccaagctgggtgggggcctcctgtccagccatgccaggccctcgtgcccaggactcccctcgcccacaggtggttttgccacgtggatgatgacaattatgtgaacgccaggagcctcctgcacctgctctccagcttctcacccagccaggacgtctacctggggcggcccagcctggaccaccccattgaggccaccgagagggtccagggtggcagaactgtgagtgtcggagcagacgccatcggagcagacgccttccttgacaccagcccgggaggcacagcagagggcgtggaaagctggcttgagaagggcatagggttgggggcccaagctgatccacccaggtggtttgcatgtggtgtttcaggagcaggccaggaggccctcaccgtactgggcagagagggggtgtctgggccaggtggggagggtctggaggctacgggtcaatggcctgcagaagcccccggctctttttgctccaagaagcttctgttacctgggtgggatctcctaaggggcagcttaagaaagatgcctggggagtcccatgaagagtcaggggtgagaagccctgtcctgggcagctctgaccaccaccccatcttcaggtgaccacggtcaagttctggtttgctactggtggggccgggttctgcctcagcagaggccttgccctcaagatgagcccatgggccaggtgagtgggggtccagctgcccgggctgggaggcggaggctgagacctgaaaggtgctgaccggcctccccccagcctgggcagcttcatgagcacagctgagcaggtgcggctgccggatgactgcacagttggctacatcgtggaggggctcctgggcgcccgcctgctgcacagccccctcttccactctcacctggagaacctgcagaggctgccgcccgacaccctgctccagcaggtacaggcgccactctgggtgcctctgccacctgggctttgccccgccctgactcccccaggggccccactgccccggcccgatgcccggctgagcaggcaggtgggatttgcatgtggctgggggtggaccctggacaggccccttggcctgttggacaca

SEQ ID NO: 1981 - DNA, 6000 bp, Homo sapiens
gggactggtcctgcccgggaatggttatttgaatcaaagcggaaaactgctggtttgaaacgtttataaacataacccaacaatacaaaagggagcagcgtaactggtcacttaggagaaaagcctcaggacctcgtggacctgaacttaggccaaaaaaaatggggaggataaatgagacagggtgacctcccggaccaggcactatgcaaccttagagtgtggcttaaacatgaatgatcatctcctttccgttagacagcagtaacaggctttaggttttaagactagtgttgacggagtttaggtaaaacggatacaacattatattctcagaggacctgcaagctggactcttccggaaagcgtgtgtgcaccaagatttgctagagcctcatgccctggaaacaacccactggggacactttgtccctagacaccctttctggtggcgtgaacgcactctagtccacgttccccactcccaggatgccgggaccgtgtggcgcaggcttaggagggagggaggtccacatgaggtcagagaaaagcgcaacacccagaccgtgcatccgggagagccagcgtgaggccccgaggccacgcgggcagacccaccgcggacgcaggggacgcaggggacgtctacagttctgcagcaattttcaagaattcgcttttctttcgtttctgttgaaatgcaggtttcagacttgctgaaattcacccgacacttgttctgagccccagaattcctctcccagcccagagcctgcagtggacaaagccaagggcctgggctgttggctgaggacccagtcatgattaacctcaagtctccttggggtgccttctactccaggctgagcacaaatgagacagaaaccagcgaactccacgcgcgttatgtgggtgcctcctctttgccctccacacacccacgcacaagtgcacacacccacgcacgcagacactgccacgcacacacccactgatgcacacagacgcacacacgggtggatactcacctacatgcacgtacacacccactctcaatgtgtccactgagcttcgtgtacacgcccacgcacacccaccctcatacacacccacgtgcacctggctccacacaacacacgggaggaggcaagcacgatgctcaggaaggcggcctctcagggcagcgtccagtgtccgtccctcccggcgggaccctcgcacgccacctctgctggagattttggcttccaaagaagagtctggtgggttcaaggctgggtgggcaggacggcaaggatacagccctgcctgggacagagccttcctggggtagaagggggatatggcagggacccgaggagagctgggccggtgggtgactaagacaggagccacgtgaagtaagaacaaaagctttactcgtgctcggcaacagcaaagcaggaggcagaggggagatgacggcccctgtcccatttccctccatggaaggcaccaggcggggaggtgggtctgctgggatgggcaggtcagcggaacaaaaggctcctgttgtttatgggcccaggcacagtggggcaggagcacgacccagaaagtagtcctgagccacaagtcagagcggagaaaacatctctgtggtcccagtcaagaggcctccgaatgaggcgcctggactgggagcaaagctctggtcgagaacatgaccttcccgggcctgagtcccactgtggtgcccggccgtgcacccagcctgcggcagagagggcggcgtcccccacaaagcctgccaggctgagcccttgcaatggccgtggctgggccaggaccttggcctggagcctgctccttgacacccagccagcctagcacccgccttcagcaacaggtaatggagcccggatggcagctccctcccaggtgcgcaagtgctggggtggaagcctgttcccgtgggatcaaccttggggctgggtcggggggaggggcactgcggccctggccatcagcctggctgtcttcgttctcccaaaacacccatcaccgcagcccaccaggggctgggagagggggggctgcaggctagccagagggtctgccaggtgcctgcatctcactggtgtggccgtggcacctgagggagcccactgagcccatagggggctctggttccccgcgcctgggacagagccaggcagccctgggtcggggtggttggtgtcaccgagaggtcggggcgccctgtttctgcctgggacaccagtccgtgtctgggtacagaagacaatggatagacttaaacctggggaaggaagaagtaggggtcagggccgtgggcggagagagaagcgggggccagggccgtgggcggcgggagaacctggggtcagggccgtgggtacagggagaagccggggtcagggccgtgggcggagggagcagcgggggtcagggccgtgggtagagggagctgatgccagagcccctgcggggccgagggcctgcccatgccactacctactcaccgtgtggggtcttgatgcaggctgaagcctccagccacgttcaccacgttatgtgggttctcaggacccccatggctcaaggtaacctgggagggaagggtgtgggcagagtgtgtggcctggtctggtctcgggccacgcctgcccctggccaggagccctgctagagcccctttgcccaccccctctccccaggccctcggggaggccaggcttggaaacagcattgaagcatggcatgagctgagtagggggacacctcaggcagagcctgggggacagaagatagggatctgaaacctccagggcaaagctgaccctcattccctccctgctccacgtgatgggacctgttccgactcaccatcaccatacacaccacacccactgcccagctggcatggggcctcactggcccgagaactgtgcttctcccctcgttcctctgccccagacaccataccccatctgtacgtgaggaccctgtgtccaacaggccaaggggcctgtccagggtccacccccagccacatgcaaatcccacctgcctgctcagccgggcatcgggccggggcagtggggcccctgggggagtcagggcggggcaaagcccaggtggcagaggcacccagagtggcgcctgtacctgctggagcagggtgtcgggcggcagcctctgcaggttctccaggtgagagtggaagagggggctgtgcagcaggcgggcgcccaggagcccctccacgatgtagccaactgtgcagtcatccggcagccgcacctgctcagctgtgctcatgaagctgcccaggctggggggaggccggtcagcacctttcaggtctcagcctccgcctcccagcccgggcagctggacccccactcacctggcccatgggctcatcttgagggcaaggcctctgctgaggcagaacccggccccaccagtagcaaaccagaacttgaccgtggtcacctgaagatggggtggtggtcagagctgcccaggacagggcttctcacccctgactcttcatgggactccccaggcatctttcttaagctgccccttaggagatcccacccaggtaacagaagcttcttggagcaaaaagagccgggggcttctgcaggccattgacccgtagcctccagaccctccccacctggcccagacaccccctctctgcccagtacggtgagggcctcctggcctgctcctgaaacaccacatgcaaaccacctgggtggatcagcttgggcccccaaccctatgcccttctcaagccagctttccacgccctctgctgtgcctcccgggctggtgtcaaggaaggcgtctgctccgatggcgtctgctccgacactcacagttctgccaccctggaccctctcggtggcctcaatggggtggtccaggctgggccgccccaggtagacgtcctggctgggtgagaagctggagagcaggtgcaggaggctcctggcgttcacataattgtcatcatccacgtggcaaaaccacctgtgggcgaggggagtcctgggcacgagggcctggcatggctggacaggaggcccccacccagcttggctctgagctctctgcgggtcgggtcagcgccgcgtacttgcgcccggactcaatgaacttgtcatactccacggacatcttgcagcagagggcctgacgagtgcgcaccgccgagcagttggtgttgatgacacggtcgcctgcgaatcagagacgggaagcacgcacgtagaggatggcactggggttggggtaaggcctgtgccccacctgcccccaagggccagggcacaacgtggctgtctgacatgcctggacaccttgcctgggtccaaccacagccctagccctcacgcgctgaccctgctggtgccaccgaggctgaagcaggcggccatcggttgggatctcttgagtggaaacaggacggaggcagctcgccctgacctggcctggaagggcggattccctgctggcgcttcttcaggggacgtggcactagccccacgccccgggaagcggctagtgtgagaggctggtggggagcagagcttggctggcagggtgggccctccgcaggccgcgtgacctgggcagcgtcggggcctccccgggcctcgggagcctgggcagagaaaggcacccacagcagcgaaggggccgtggcttcggagcgagaaaggctcggggggcagatcccgcgggcgccggggagtgggggacactcaccgccctggagctcgagctcagggtcgtccccgtcggtgaagataaacgtctgggggagaaacaatctatgaggcttctggggcgctgcccaggccggagaccgacccgccccgcgcggagcctccgggggcctgggccgggcctagaccctgggaggcggggcgggtgggcgtggggctcgccgtcggggtcggggtccggcgcacctgctggcgggcccgggagatccaggtgcgcagcagcagccgcaggcgcggcccgtggttcttccgggtggtcttgacggcgatgaagacgtcgtcaggccgcaggctgggggcagcgggccgggacgggggcgcgcgcggggccggggcgggggtccgggccggggcgggcgcgcggggcagcggcagcggcagtaacagcagcgcggccagggccgcggccagcgcgaggcaggcccggcacagcgccccacgcgcgcggctcatgcggccgccgggacccccggcgctgcgagcggagaacctggccggagccgtgggtgggcggcggcccctttaagaacgcagcggccccgccccgccccgcgccccggaagcgacggcttcgctgccccggaagtggacggcacgccgcggcggggtgggtgcaagatgccgctgccggttcaggtgtttaacttgcaggtaacgagccgaggccgccccgggcctccgcgcccccgcgccccccgccactggggccgggctgaggtcgagcaggggcgcggggcctgcgccaggagtcggtcgggcacgctccgtgccgggcctccgcgggcagcgcgcgtcgggggctgcagggccgagggcgcgtctccgccgtggctgcgcgctgcgatcgggggccgccgggccgcgcccgccccgcctcccctcccagcagctcacgggagaggttcccggccgccccgacgctaacgctctttctcccttcagcagccagccagctctgtgtcagggtcggggggtgcagaaagtcaggacagaatgagggatagctcggcccccagctcggcctcctcgtcagtgacagatctgtactgcacccctcacagcagtaggtcagacctcgtcctgcccggcacggccggggacttcagcctgagcgccagcctgtcggcctgtacgctgctctacgaggtaccttccaggacagggacccccgagcgagggaggggggagcagg

SEQ ID NO: 1982 - DNA, 6000 bp, Homo sapiens
tgtctcggacctgtggctccagctccaagaacaacttgaaggagctggtgaggcagacccctcagaactctgtcctctgcctgcccctccctccaagtggccagtgggacaccagtccccagacaaacacctgagaaaacgctggggccagggggccaggacatgcaaggccgaagcagcagccacggagagggacggggacagccttcagggctgcaggaccggggcacctacctgctggagatgacattgcgctgcagctcctgccggtcaaaggtagccaaggcgcacaggccaccgtagatggccacgttgctgggggacagcagctgaggagcagagacctggcgtcacaggcagtgaagggccaggccacccctgcctgcccatcacccgctcggagaatgcctaagaccccatttgtgagagacctcaccctcctacagaagcagcctgacccatgagcccatgctctgcctcccaagtccccagagggctcctcacctcagggaagtcacagtgatcaaaggaagccagcaggaggcacttggcagcctgcttgtacttcctggcggccagctctgccaagcctagtggaaggagccgggggcggggaggggggagagggggtaagaccccagagcctggggaagccgctaacgcctggaaaccagggagaacgcgaccaccagccggctcgctggcctctcctgccccgggagctgttcctcagcgctggggacagatactctagtcacgggtggaaagagccccaccaatgctgaggaggctccctgaagccaggcatgcagggaagccctaggtgctagcagggctgcaaaggacaccccagttcagagcagctcgggctggcagacctgcctcacgcccacagtgacagcagccagaccctgaccacacgtcacccactggcttccccggggcagactttaggcaccacctacacctgtacatgtgcccacaacatcctgcgccctgccagggaagttttccctggctgaggcagggaccagcctactgccctgggctgggaggacttagcaacaggggaacgtggggtcagctgggcgtgacccaggccctcacctgcggcacacttgagcttggtgaggatggcctgggtctggctgtcacgctctcctcgctgctgtaggaggaagccacatgcgtgaggcccatgctccacatttcctagagctcgatgcccagcccccagactgagaggggatgaaggcagattcagatctgggggagaatgaggtgggggaggacaggaggggccagcagtggtcaggaatcctgggggcaaggtctctgaggaggtggcccgtacctcggcaatctctggggtggactcagccttgctgacgtagctgagcacatgagaccaattctgcaagtagacgctgacctggcgggggggcgcagagccaagtgagcccgggcgccccaatggcccagccatgctgcccacccccgcccgccgaggcaggccgaccttgatgacattgaggcacatgttgatgacgtgtttggcgctggtgcagtagtcccgggcccgggaatagcacttgagggcgttgctgaggtccccacagtccaggtagtggtcgcccaggtcgtcgtggccgcgccggatgctctctttgatggagttgcccttgtagttcttcaggtctgtgtccagcttctccagcttcagcagcgccttcttccgcgtggcctccacccaggccgtgtccagggctgggggctccacgccgctctcagggatggcgtcgggtgcgttctgcagctccctgagagaggacctggccatcaggatggcggcggtcacgggggccagggaggaggggaggaagccgccaatctcaggctgccctcaaaggcccaaccggcacacaggtgggcacctcccgctggcctcaaaccccacctctagggaccagtctgcaccagggccacagagagaactgctgccccaggagcctacagccgggtggggaaaccagcagggaggcggcccctgagccacagtctccaacagctccccttggaatcaaagccctgcatgcacacacacagaagccacacacacacagggcacttccactgctggccaaaagagagcgagagctctacccgcccgacttcccagcacaggggtgggagatgcagggcacaggaagggggcccagtcccagacacccgcgctcccttggtggcctctgcttcctctcgccaagcccctggcctcacctggtggcctctgagagcttgcggtggatctcctcgtacatgtccacgttaaaggttctctgcacgaaggagagggccatcttcagggcctccacccgcagcgtggggcagtgatcagcaatgaactgcagccgttcgatgcgcatcaggccgctgtagctggccgcgtactgttccagatcctgggagcaggcacagacaagagtcaggcaggatgggaggcaggaccctggccccaggccctgagggtcaggagttggggcctgactgtcctagccagaatgtcgccctgggcccataaccagaaccgggcatgggggtacgagactgactgctgtcccaggagctacgaagaccgctggggtgggcctggcgcaggagcctcaggagtgggaccctgcacccgggggctttcggggatagacacccactagtgactgctggtcgctaggctgagcggggaggagacctgccctggcttctccatgagcagcatctgaagctgagctacaagcctcatgtgagtgcgcaatcagaaacgctgatggtttcggggtcagaaaaagacgacagcgatcactgaggaggatcattctacctgctgtgcaggctgcagcggggagtgtgccctggacccctcagcaggactgagacacccaaggtccccccactgggctccgtaccaggctggggttctccaccacgtagttgacgtcaggtgcattctgcgggtcttcctgggggtccacgtcgatctgcatgggctccacggccccctgcaacatgggccaggcacctggcacctcgtcctggggactgccccaggagggcgagagacccgcactgttctctgaggtcagctctgcccaagatcttccaggccagtcggaccacactcccgccgctgctgtcccccaggtgtgccctcccagtcacccccgcccccacccaggctcctgtgccaccacatcagggaggggtctcctcacaagactctaaggctcagaagcagaaacccctcgcctgattctagccgctcatctctgaaagccagaaagcagacaggggacaaccaactacacaggggcctctgagggcccctacacgttcccagccaccatcctgatgtagtttcctccaagccacggagaagaacgggacgccacctcaaccccaggaggcaggaggaccagcccccggaatctgtcctgagcagcggagcagcaatactgggctgagagtcacgccacggagttgggagaaggggaaaagagtcatctcagggagcctcatggcccccagctgggagacacagagaagccaggacctcggcttaacacaaagcaggctggaaaagccgccatgccgggcactcgccggacccgtgggcctcccgcgctccttcgggaaaagcaccaagagctcggctccctccgcaggccccgggcccaccggggctccctcccctcctgcgcttggcactgagtccctgtcctcggccagcagagcagcaggggcccagccacagcaggggcggccggggccctgctcccccctccctcgctcgggggtccctgtcctggaaggtacctcgtagagcagcgtacaggccgacaggctggcgctcaggctgaagtccccggccgtgccgggcaggacgaggtctgacctactgctgtgaggggtgcagtacagatctgtcactgacgaggaggccgagctgggggccgagctatccctcattctgtcctgactttctgcaccccccgaccctgacacagagctggctggctgctgaagggagaaagagcgttagcgtcggggcggccgggaacctctcccgtgagctgctgggaggggaggcggggcgggcgcggcccggcggcccccgatcgcagcgcgcagccacggcggagacgcgccctcggccctgcagcccccgacgcgcgctgcccgcggaggcccggcacggagcgtgcccgaccgactcctggcgcaggccccgcgcccctgctcgacctcagcccggccccagtggcggggggcgcgggggcgcggaggcccggggcggcctcggctcgttacctgcaagttaaacacctgaaccggcagcggcatcttgcacccaccccgccgcggcgtgccgtccacttccggggcagcgaagccgtcgcttccggggcgcggggcggggcggggccgctgcgttcttaaaggggccgccgcccacccacggctccggccaggttctccgctcgcagcgccgggggtcccggcggccgcatgagccgcgcgcgtggggcgctgtgccgggcctgcctcgcgctggccgcggccctggccgcgctgctgttactgccgctgccgctgccccgcgcgcccgccccggcccggacccccgccccggccccgcgcgcgcccccgtcccggcccgctgcccccagcctgcggcctgacgacgtcttcatcgccgtcaagaccacccggaagaaccacgggccgcgcctgcggctgctgctgcgcacctggatctcccgggcccgccagcaggtgcgccggaccccgaccccgacggcgagccccacgcccacccgccccgcctcccagggtctaggcccggcccaggcccccggaggctccgcgcggggcgggtcggtctccggcctgggcagcgccccagaagcctcatagattgtttctcccccagacgtttatcttcaccgacggggacgaccctgagctcgagctccagggcggtgagtgtcccccactccccggcgcccgcgggatctgccccccgagcctttctcgctccgaagccacggccccttcgctgctgtgggtgcctttctctgcccaggctcccgaggcccggggaggccccgacgctgcccaggtcacgcggcctgcggagggcccaccctgccagccaagctctgctccccaccagcctctcacactagccgcttcccggggcgtggggctagtgccacgtcccctgaagaagcgccagcagggaatccgcccttccaggccaggtcagggcgagctgcctccgtcctgtttccactcaagagatcccaaccgatggccgcctgcttcagcctcggtggcaccagcagggtcagcgcgtgagggctagggctgtggttggacccaggcaaggtgtccaggcatgtcagacagccacgttgtgccctggcccttgggggcaggtggggcacaggccttaccccaaccccagtgccatcctctacgtgcgtgcttcccgtctctgattcgcaggcgaccgtgtcatcaacaccaactgctcggcggtgcgcactcgtcaggccctctgctgcaagatgtccgtggagtatgacaagttcattgagtccgggcgcaagtacgcggcgctgacccgacccgcagagagctcagagccaagctgggtgggggcctcctgtccagccatgccaggccctcgtgcccaggactcccctcgcccacaggtggttttgccacgtggatgatgacaattatgtgaacgccaggagcctcctgcacctgctctccagcttctcacccagccaggacgtctacctggggcggcccagcctggaccaccccattgaggccaccgagagggtccagggtggcagaactgtgagtgtcggagcagacgccatcggagcagacgccttccttgacaccagcccgggaggcacagcagagggc

SEQ ID NO: 1983 - DNA, 6000 bp, Homo sapiens
actggggacactttgtccctagacaccctttctggtggcgtgaacgcactctagtccacgttccccactcccaggatgccgggaccgtgtggcgcaggcttaggagggagggaggtccacatgaggtcagagaaaagcgcaacacccagaccgtgcatccgggagagccagcgtgaggccccgaggccacgcgggcagacccaccgcggacgcaggggacgcaggggacgtctacagttctgcagcaattttcaagaattcgcttttctttcgtttctgttgaaatgcaggtttcagacttgctgaaattcacccgacacttgttctgagccccagaattcctctcccagcccagagcctgcagtggacaaagccaagggcctgggctgttggctgaggacccagtcatgattaacctcaagtctccttggggtgccttctactccaggctgagcacaaatgagacagaaaccagcgaactccacgcgcgttatgtgggtgcctcctctttgccctccacacacccacgcacaagtgcacacacccacgcacgcagacactgccacgcacacacccactgatgcacacagacgcacacacgggtggatactcacctacatgcacgtacacacccactctcaatgtgtccactgagcttcgtgtacacgcccacgcacacccaccctcatacacacccacgtgcacctggctccacacaacacacgggaggaggcaagcacgatgctcaggaaggcggcctctcagggcagcgtccagtgtccgtccctcccggcgggaccctcgcacgccacctctgctggagattttggcttccaaagaagagtctggtgggttcaaggctgggtgggcaggacggcaaggatacagccctgcctgggacagagccttcctggggtagaagggggatatggcagggacccgaggagagctgggccggtgggtgactaagacaggagccacgtgaagtaagaacaaaagctttactcgtgctcggcaacagcaaagcaggaggcagaggggagatgacggcccctgtcccatttccctccatggaaggcaccaggcggggaggtgggtctgctgggatgggcaggtcagcggaacaaaaggctcctgttgtttatgggcccaggcacagtggggcaggagcacgacccagaaagtagtcctgagccacaagtcagagcggagaaaacatctctgtggtcccagtcaagaggcctccgaatgaggcgcctggactgggagcaaagctctggtcgagaacatgaccttcccgggcctgagtcccactgtggtgcccggccgtgcacccagcctgcggcagagagggcggcgtcccccacaaagcctgccaggctgagcccttgcaatggccgtggctgggccaggaccttggcctggagcctgctccttgacacccagccagcctagcacccgccttcagcaacaggtaatggagcccggatggcagctccctcccaggtgcgcaagtgctggggtggaagcctgttcccgtgggatcaaccttggggctgggtcggggggaggggcactgcggccctggccatcagcctggctgtcttcgttctcccaaaacacccatcaccgcagcccaccaggggctgggagagggggggctgcaggctagccagagggtctgccaggtgcctgcatctcactggtgtggccgtggcacctgagggagcccactgagcccatagggggctctggttccccgcgcctgggacagagccaggcagccctgggtcggggtggttggtgtcaccgagaggtcggggcgccctgtttctgcctgggacaccagtccgtgtctgggtacagaagacaatggatagacttaaacctggggaaggaagaagtaggggtcagggccgtgggcggagagagaagcgggggccagggccgtgggcggcgggagaacctggggtcagggccgtgggtacagggagaagccggggtcagggccgtgggcggagggagcagcgggggtcagggccgtgggtagagggagctgatgccagagcccctgcggggccgagggcctgcccatgccactacctactcaccgtgtggggtcttgatgcaggctgaagcctccagccacgttcaccacgttatgtgggttctcaggacccccatggctcaaggtaacctgggagggaagggtgtgggcagagtgtgtggcctggtctggtctcgggccacgcctgcccctggccaggagccctgctagagcccctttgcccaccccctctccccaggccctcggggaggccaggcttggaaacagcattgaagcatggcatgagctgagtagggggacacctcaggcagagcctgggggacagaagatagggatctgaaacctccagggcaaagctgaccctcattccctccctgctccacgtgatgggacctgttccgactcaccatcaccatacacaccacacccactgcccagctggcatggggcctcactggcccgagaactgtgcttctcccctcgttcctctgccccagacaccataccccatctgtacgtgaggaccctgtgtccaacaggccaaggggcctgtccagggtccacccccagccacatgcaaatcccacctgcctgctcagccgggcatcgggccggggcagtggggcccctgggggagtcagggcggggcaaagcccaggtggcagaggcacccagagtggcgcctgtacctgctggagcagggtgtcgggcggcagcctctgcaggttctccaggtgagagtggaagagggggctgtgcagcaggcgggcgcccaggagcccctccacgatgtagccaactgtgcagtcatccggcagccgcacctgctcagctgtgctcatgaagctgcccaggctggggggaggccggtcagcacctttcaggtctcagcctccgcctcccagcccgggcagctggacccccactcacctggcccatgggctcatcttgagggcaaggcctctgctgaggcagaacccggccccaccagtagcaaaccagaacttgaccgtggtcacctgaagatggggtggtggtcagagctgcccaggacagggcttctcacccctgactcttcatgggactccccaggcatctttcttaagctgccccttaggagatcccacccaggtaacagaagcttcttggagcaaaaagagccgggggcttctgcaggccattgacccgtagcctccagaccctccccacctggcccagacaccccctctctgcccagtacggtgagggcctcctggcctgctcctgaaacaccacatgcaaaccacctgggtggatcagcttgggcccccaaccctatgcccttctcaagccagctttccacgccctctgctgtgcctcccgggctggtgtcaaggaaggcgtctgctccgatggcgtctgctccgacactcacagttctgccaccctggaccctctcggtggcctcaatggggtggtccaggctgggccgccccaggtagacgtcctggctgggtgagaagctggagagcaggtgcaggaggctcctggcgttcacataattgtcatcatccacgtggcaaaaccacctgtgggcgaggggagtcctgggcacgagggcctggcatggctggacaggaggcccccacccagcttggctctgagctctctgcgggtcgggtcagcgccgcgtacttgcgcccggactcaatgaacttgtcatactccacggacatcttgcagcagagggcctgacgagtgcgcaccgccgagcagttggtgttgatgacacggtcgcctgcgaatcagagacgggaagcacgcacgtagaggatggcactggggttggggtaaggcctgtgccccacctgcccccaagggccagggcacaacgtggctgtctgacatgcctggacaccttgcctgggtccaaccacagccctagccctcacgcgctgaccctgctggtgccaccgaggctgaagcaggcggccatcggttgggatctcttgagtggaaacaggacggaggcagctcgccctgacctggcctggaagggcggattccctgctggcgcttcttcaggggacgtggcactagccccacgccccgggaagcggctagtgtgagaggctggtggggagcagagcttggctggcagggtgggccctccgcaggccgcgtgacctgggcagcgtcggggcctccccgggcctcgggagcctgggcagagaaaggcacccacagcagcgaaggggccgtggcttcggagcgagaaaggctcggggggcagatcccgcgggcgccggggagtgggggacactcaccgccctggagctcgagctcagggtcgtccccgtcggtgaagataaacgtctgggggagaaacaatctatgaggcttctggggcgctgcccaggccggagaccgacccgccccgcgcggagcctccgggggcctgggccgggcctagaccctgggaggcggggcgggtgggcgtggggctcgccgtcggggtcggggtccggcgcacctgctggcgggcccgggagatccaggtgcgcagcagcagccgcaggcgcggcccgtggttcttccgggtggtcttgacggcgatgaagacgtcgtcaggccgcaggctgggggcagcgggccgggacgggggcgcgcgcggggccggggcgggggtccgggccggggcgggcgcgcggggcagcggcagcggcagtaacagcagcgcggccagggccgcggccagcgcgaggcaggcccggcacagcgccccacgcgcgcggctcatgcggccgccgggacccccggcgctgcgagcggagaacctggccggagccgtgggtgggcggcggcccctttaagaacgcagcggccccgccccgccccgcgccccggaagcgacggcttcgctgccccggaagtggacggcacgccgcggcggggtgggtgcaagatgccgctgccggttcaggtgtttaacttgcaggtaacgagccgaggccgccccgggcctccgcgcccccgcgccccccgccactggggccgggctgaggtcgagcaggggcgcggggcctgcgccaggagtcggtcgggcacgctccgtgccgggcctccgcgggcagcgcgcgtcgggggctgcagggccgagggcgcgtctccgccgtggctgcgcgctgcgatcgggggccgccgggccgcgcccgccccgcctcccctcccagcagctcacgggagaggttcccggccgccccgacgctaacgctctttctcccttcagcagccagccagctctgtgtcagggtcggggggtgcagaaagtcaggacagaatgagggatagctcggcccccagctcggcctcctcgtcagtgacagatctgtactgcacccctcacagcagtaggtcagacctcgtcctgcccggcacggccggggacttcagcctgagcgccagcctgtcggcctgtacgctgctctacgaggtaccttccaggacagggacccccgagcgagggaggggggagcagggccccggccgcccctgctgtggctgggcccctgctgctctgctggccgaggacagggactcagtgccaagcgcaggaggggagggagccccggtgggcccggggcctgcggagggagccgagctcttggtgcttttcccgaaggagcgcgggaggcccacgggtccggcgagtgcccggcatggcggcttttccagcctgctttgtgttaagccgaggtcctggcttctctgtgtctcccagctgggggccatgaggctccctgagatgactcttttccccttctcccaactccgtggcgtgactctcagcccagtattgctgctccgctgctcaggacagattccgggggctggtcctcctgcctcctggggttgaggtggcgtcccgttcttctccgtggcttggaggaaac

SEQ ID NO: 1984 - DNA, 6000 bp, Homo sapiens
taggctgactggaacctgacatgataacatggatacatgtagtgacacagtgcaggaaataggatgttttcagaggcagaacacgaggcacaaagcctcatagatgggaataagcccatgacgtgtggggagacactaaatagcctggctgacagggagcaaaagatgctgcataaggagggaagagacaggaatgggaaggaggtagtggtaaccatgaacgttgctggaatattctggcggccagctggagaggaagcttagggagtgtcagagatcaagtgcagtgatcccagcaggcagcacaaatggactgtggctctctctcctccagtattctgccttgccttgatctccctggactctcagcttctcttctacccaaggtgcccatcaggctctgcccaagttccttttatcacaggctggaaactctctcaaggcagaaagctggagaaactacagcgttcagcttgtttgtttcccatctctcatctgtccttcgtggctgctctggctgctgtgtgttggagcctggagtggagaaggtgccaaggtgggcgtggggaggccctttggaaggttagtgcagcagctcagatgggctatgatggcctctacatgggggatgcagtggagatggagagacagagaagtttgagatgtatttctaaggtagaagcagggcttggtgaggatgtagagttgagggagagggaggagtcaagggtgattgggctttttcatcagtataaaggtgatactagcatggggctggggtgaggggaagatgagatgatgcttcctccagattctgaaactttagtctgaatgcaaggcctggctgctgcttctgggggtggggaagcttgcctgtgacctggaggacctgcaggccatctttgagttcaaagcatcttcagctccatggctcagtcctttccaatcacattcttctcttctttccttttcccttcttttctccctgatccccagctcaattctcaattcctcccagagctcttgaccagagaaatcctgatcagctgatgatctgcatgtgaccatgaccttccgtcttcatatcctccagagtggggctcagaggaggctccacactgaggacctgtggggcccaactcactctgtgctgaaggtgacagggtggggggaggaaggcactcatccaggattccttctttttttagagatgggtttcactctgttgcccaggctggagtacagtggcatgatcctagctcactgcagcctcaaactcttgggcctaagcaatcctcctgcctcagcctgatgagtagctgggactacagatgcatgccaccacacccagctgatttttaaattttttgtctcactatgttgcccaggctggtcttgaattcatggcctcaagtgaccttccttccctggcttcccaaagccccgggatgagccaccgcacctggtcccaggactgttccttaaaattatccttagaaaagttgctaagcctgttttctcatcagtagatctatgaatctggctcattatcacagctgacatcatagccttaggggtttcttgtttgttttttaccttatcattcttctgtttgaatttttttattgtagtcaaatatatatatttatcatcttagctatttttcagtgtatagttcagtggctttaagtatattcacattgttgtgcaaccatcaccaccatccatctccagaattcttttcatcctgccaaatggaatctttgtgcctgtgaaacaactccccatcccccccccggcaaccaccattctactttctatccctatgcattttactctctctctctctctctttttttttttttttttttgagatggagtctcactctgtcgcccaggctggagtgcagtggcgcgatctcggctcactgcaacctctgcctccgggttcaagcgattcttccacctcagcctcccaagtaggtgggactacaggtgccagccaccatgcctggctaattttcgtatatttagtagagacaggggtttcagtatgttggcgaggctggtctcaaactcccgacctcgtgattgacctgccttggcctcccaaactgctgggattacaggcgtgagccaccacgtctggcggcattttactctcttttataagtagaatcatattggtccttttgtgactggcttatttcacaaagcataatgcctcaagttttatccgtgttgtagcatgtgttagaatttcctcccttttaaagactgaatcatattccactgtatggctataccatattttgtttatccattcattcaacagtgaacactaggttgttccaccttttggctattgtgagtaatgttgctatgagcctggatgtacatctatttgttaccctgctttcacctcttttgggtcccagaaatagaattcctggactatatggtaattgtgtgtttaatttttggagaaatcaccatactgttttccatagtggctgtaccattttacattcccaccagcaatgcacaaaagttctaatttctccgcatcctcgccaacacttattttgttttgtttttttttttaaatagccatcttactgggtatgaagtagtagctcattgcggttgattcaaatttccctgacaattagtgattgaatatccttcatgtacttattggccattatatgtcttctgtggagaaatgtccatgtcagtccttggttcattttcaaattgggttgcctgttttgttgttgttgctgaggtgcaggaatcctttatatatcctggatattaatcctgtatcagatatagggcttttgcacatattttctcctattctgtgggttggctttccactctgtttatactggcctttgaggcacaaaagtctgatgaagtacaatttatctatattttttcttttgctgcctgtacttttggtgtcatattcataatttgggttttaaaaacgatttttttttttcggcagggcgtggtggctcacgcctgtaatcccagctctttgtgaggctgatgcctgcggatcgcttgaggtacggtttgcgagcagcctggccaccatggtgaaaccccgtctctactaaaaatacaaaaattagctgggcttggtggcccacccctgtagtcccagctacttgggaggctgaggtgggagaattgcttgaattcaggaggcagaggttgtagtgagccaagattgtgcctgggcgacagagtgagattccgtctcaaaaaaaaaaaaaaaaaaaaagaaagaaagaaaaaaaagaaagccgggcgcggtggctcacgcctgtaaccccaacactttgggaggcagaggtgggcggatcacgaggtcaggagttcgagaccagcctggccaacatagtgaaaccccgtctctactaaaaacacaaaaaaattagctgggcctggtggcacacgcatgtaatcccagctactcgggaggccgaggcaggagaatcgcttgaacccgggaggtggaggttgcagtgagccgaggtcacgccattggttagtaaactccgggctgaaaattcatatcctaagctcccttcagggatccccatttgccctgaaagacaaggctggtgccccagtgagatctgaaacatgctccaggaccaggaccctgtagtttcatcaactgcagacagtgcgggggaaaaagcatttcggtcttttcatttgttcgtcatgttcaaggtgcccccttatgttaaaaaattaaaaaaaaaaaaaaagaaagaaaaaagaaatctcctggaacggagaatctatgaaatgtttcaatatgtattcattttggggcactaccttttactagagcaaagaatcccctacttagagggaaccaatggattggttacaccgtgttaccaagtcctcaggagggcaaactgaaaagctgcaagcactgcccggccagtgttcgattgcttttggtggactagtgcgtctgagtagccatctgtaatgtcaacatgtggcagaaagtttctccgcacctccctcgccccagctccactcaccacttagtgtatgttttaaagcaataaagcgatgggtctgcttagagggggttctaaagagaaagataaacacgggctttattaagtatacagcagggcaatgtgacgggcgaccacgaagggaactcagggagcctctcagcagcccggcctcctttcgtaacaaaactggagtcaacccgatcattttaggggcgctgggtggaaggctggcttttccagccaaggcaggatgtgctggctttttctctggaggtgtccaagagcgcagagagagtgtctaatggtgacttcggattctggccactcgggctctccctgggtgacagagagagtgttccctgctgcttggtctccttcaggcgtcaaccagcgcacgcacttggaaactctgaacccggaggacgttctgtacctctccatgccccagagccgtttggggaagggcccaccttaccccccgccacccccggggcacagcagctccccatcctctcgcccaacacttgctaggtagtttggggtgtagaagcgaccccagcagcagcggcaccttaggtgctcgccgaaggtgaacgctggaccgccccgggaagggctttgctcccgacttcatcccgacgctggtgcaacgggaaaaagagagagcccgcgcgagtggggccagggcgcgcaggagagggcgggcgagaaagtgcccggcgagggcaggcgcgggccgagggcggggcgggcgcgggagggcgcgagaggggcgtgggcgcggccgctcgctcggccgggtcgggccagggggaggggcgctgggagagcgagagcggcgcgcgcggcagccccgaggcagcagagcgcggagccgggagcgcggggagcgcgggccggcggcggcgagggaggacgggggcgcagacggccggcgcgcggcgcggctaccatgggcgtgcggtgagcagccgctcgggacgacttcctcggctgcgcggcgctcgcgcggagctccccggccggcggtgcgtccccacggtcaccatgaaaggtagggcggcggcagctccgcggggctctgggcggggggaacgggcttcggggcgcgcgggaggccacggaggtgcctcccgcgcgaaccttcccttgggctgcgggcccggggagtcggggctgccagggcgccgggttcgtgcgcggacactgggggcgcacccggctcccgggtcaggcgcggctggagacctcgaggttggggttttgaagcgcgcaagtattcccctccccatcgcgtctttgcaagtagtttgaagccctaagtcgttgtttacggattcccgtttccaactttttaattgaaaaaacctgccgaggagagtggaggcatcgccatccctcccggtcgcttttccacgccgcagcgctccccacgctcgcccagtcctctctcctcccgcctctagccgtttcccggcccgagcggtccccgcgctggcggccgggtgttttctccgggactggggatgttctccgtgcgccctcgccacatctggcaatgattaggtgcccgaggagttcagctggctcgggaagtgcatttggcatctttctccatcagattcaccgactggaaaatagttgccctcggttccgcgtcccttccacgtgcccgccttggggtgtgcccactggtgttttggggtgacacacctcagctggttagtcgccccctgcgcggtgtcctctgcaggccggtttatggaagtgtcagatgttatcgtactttagaaagaagcacgagaaggactgcagggcagccttctgtttagtggaaacacggagatttgtcagcggaatcctgatttatgtatgagataagtaaccgcagcggaggcatcaaagagtcgttcaggaatgggcccgcgtggtgttt

SEQ ID NO: 1985 - DNA, 6000 bp, Homo sapiens
gttaggctggcctccctgagagattacccacatgctggttttacccagggtgaaacatattttctatcacaaaatttaaatgtccattttcccatttgaaagctaatacttcaaggtccatttaactttatttggcagcggttgcaagagttgttttgaaataatattataatgagaataggcatttagtaggaaaatgagatactctgttatgacatagcctgaaagccatcatcggctagctttttctattcaccccattatcagtggatgagccacatggcaaagggttggagccattggaacaaccgtgggaaattgcataggagaccacagagaagatgtatacttagcaataattaaacctcagattaagaatgtcaagcattcccaaactaatgaaaagtcaaaagtataattagattgtaaatttgcctcccagagaagggcagcccctattaccaatcagtgaagggaaaaaggcctcattttgtttccattttcctttagaaaatatgactctttcaatgttaaatgcaattgcctttataggcttgtttgcttatcccagttaagaacaagaaatctcagagagacactgaaaaagcaaaaagactgtgagtcccaaaaaactttgggagaagtatactgcttactagtgcattttaaatatattattgccaaactgtatttcagaaatatttatgcacaaaagtacaaaaataagcagctgaacactgtgttttcatggcaccagcctcctctctgtgttaaattataacactggtttggacctctgtggtcccgggtggtggcagctgtttttggttgtctcttaggcaacaagtgctgctgcactgaaactaaccaatatccccaactttaagaaccaagaatgtgatttagttaacgacacacgtaactctagaggagtcagattccttcgtcaagaatgtgaatatgtatccaaaaagccatgagattgatggtgtagtacagctaattgaaaatgaaattggaaataaattaaaacaaacttcatgttttaatcagtttggaagacttcaagtactgcagcaacggggaaagtcattttcttctgggtaatatataatgatgtcattattttggtacttgtgactccagggatggaggaaatggatgtttgctgaatgcaacagataggtggcgctgtgactgactggcagatgcaggattacactccaagagcctggtcactacaaaggccatatccaggtttaaatatcagaattagaaagtcacgttggtaccctaaaaaggcatctgacttgcacaggaatatttgcttttgcaaatgaacttctttaacttctatggtgtccactgattttcaatttggctaaagaatggggtgtgtgtgtgtgtgtgtgtgtgtgtgtgtgtgtgtgtttgagagagtcttgcttctgtcacctgcgctgaagtgcagtggcacgatctcggctcattgcaacctccacctcccgggttcaagctattctcctgcctcagcttcccaagtagctgggactacaggcatgcgccaccaggcccagataatttttgtattttttagtagagacagggtttcattacatgttggccaggctggtttcactatatggtgatccgcctgcctcagcctcccaaagtgctgggattacaggcatgagccactgcacctggccaagaatgttttagattaacacgtttattctaagaatttacaaggcttgtcgttgctttctatcatgttggctttctgaagcacggggagttaacaactatttgatgtaatcaggaacccggggaaaatctttagttggttccctatggcaaatggtcaaaacaattccacttggtaaaagcagctttccgtttttgtctaggcttccaaagcctcacatgcaactggttggctccacctcttcctggatacagcaccaattgtgggttacttggctagttagttgtctcagattcacttttttttccagtcatcttcaccagaggttatctatttggtgtcttagggccttccaagccacacggggtaactgacaaggcttgtctttagatgcctactctatcctcctagttgccagttcctatttcttctagactcagttttcatacctatactgttaggattgaaatgtctactctcagggctgttgagaggattaattgcaatgtgtttgtagtgtatatagtacagtggctggcacttagtaggtactaaaaaattattactgcccctcccgtccccaccccaccactcagacaaatgtaataaatacagattacgtggtaataattggtaggcaaaactctcatggaatattttttttcttttttttttttttagacggagtctcgctcttgtcacccaggctggagtgcaatggctcgatctcggctcactgcaacctccatctcctgggttcaagtgattctcctgcctcagcctctcaagtagctgggattacaggtgcctgccaccacgcccagctaattttttgtatttttagtaaagacaggatttcacaatgttggccaggctggtctcgaactcctgacttcgagtgatcttgcccacctcggcctcccaaagtgctgggattacaggtgtgagccaccgcgccccgctggaatattttcgtttttaaaagagggcttcaaaatgattagtctacccggggattcaccagtccgtccctccatcaacctccccgactggggcggaaagtgtatggggcttctgggcagcgctagaccacagcgggtaggccaccatctggtccagaatgcagcataaatctctccaaaaatgtgtttaggacttctgggtatgttttccagtgcaaatgtaaagtggaaaagtgtctcaagtgcaatagcggtcctttacccagtaaaaagcataacaaaagtttcagggtttaagaacccacgtgggagctgatggagtgggtaggtggttaatcttcccaagttttaaaaaccactggtcttaatgaccagcagagaagattcacttctggctaaaatgataactgagccccagataacttttagccatgtgaaattctttcctttctagggagtctcctcaatcagagccagctaaggaatgtgtgtatttcctagaatgtaaatgagggaagagaaactgagatggagacagaaggaaagcaagccactgcattttgaaattctctaggtaggcagttgtatcgtgtcttttgtttctttttccctggggcagaccacttttcacctggccatcagtcacctcccttcccgaggtctcccgacgtggacacctaacgcccttggaaagggagtgaattggtaggatatcatcgctccggttagttccgcgggagctgcccttcagaaaaaaaactttccagagccaaaagttactttccaagcgccttggggcttcccgggcgcctccctcggacggcaaccctagaagtcaaagcgattgcatcgccaggtctgtggcggctggaagcggggtgaccgcggtcagatggcatttcgcacccacgcagggctgtgttatcctagcacagaaccagcaactctcacacgaagccttgtgtaaacaccacgcgggcccattcctgaacgactctttgatgcctccgctgcggttacttatctcatacataaatcaggattccgctgacaaatctccgtgtttccactaaacagaaggctgccctgcagtccttctcgtgcttctttctaaagtacgataacatctgacacttccataaaccggcctgcagaggacaccgcgcagggggcgactaaccagctgaggtgtgtcaccccaaaacaccagtgggcacaccccaaggcgggcacgtggaagggacgcggaaccgagggcaactattttccagtcggtgaatctgatggagaaagatgccaaatgcacttcccgagccagctgaactcctcgggcacctaatcattgccagatgtggcgagggcgcacggagaacatccccagtcccggagaaaacacccggccgccagcgcggggaccgctcgggccgggaaacggctagaggcgggaggagagaggactgggcgagcgtggggagcgctgcggcgtggaaaagcgaccgggagggatggcgatgcctccactctcctcggcaggttttttcaattaaaaagttggaaacgggaatccgtaaacaacgacttagggcttcaaactacttgcaaagacgcgatggggaggggaatacttgcgcgcttcaaaaccccaacctcgaggtctccagccgcgcctgacccgggagccgggtgcgcccccagtgtccgcgcacgaacccggcgccctggcagccccgactccccgggcccgcagcccaagggaaggttcgcgcgggaggcacctccgtggcctcccgcgcgccccgaagcccgttccccccgcccagagccccgcggagctgccgccgccctacctttcatggtgaccgtggggacgcaccgccggccggggagctccgcgcgagcgccgcgcagccgaggaagtcgtcccgagcggctgctcaccgcacgcccatggtagccgcgccgcgcgccggccgtctgcgcccccgtcctccctcgccgccgccggcccgcgctccccgcgctcccggctccgcgctctgctgcctcggggctgccgcgcgcgccgctctcgctctcccagcgcccctccccctggcccgacccggccgagcgagcggccgcgcccacgcccctctcgcgccctcccgcgcccgccccgccctcggcccgcgcctgccctcgccgggcactttctcgcccgccctctcctgcgcgccctggccccactcgcgcgggctctctctttttcccgttgcaccagcgtcgggatgaagtcgggagcaaagcccttcccggggcggtccagcgttcaccttcggcgagcacctaaggtgccgctgctgctggggtcgcttctacaccccaaactacctagcaagtgttgggcgagaggatggggagctgctgtgccccgggggtggcggggggtaaggtgggcccttccccaaacggctctggggcatggagaggtacagaacgtcctccgggttcagagtttccaagtgcgtgcgctggttgacgcctgaaggagaccaagcagcagggaacactctctctgtcacccagggagagcccgagtggccagaatccgaagtcaccattagacactctctctgcgctcttggacacctccagagaaaaagccagcacatcctgccttggctggaaaagccagccttccacccagcgcccctaaaatgatcgggttgactccagttttgttacgaaaggaggccgggctgctgagaggctccctgagttcccttcgtggtcgcccgtcacattgccctgctgtatacttaataaagcccgtgtttatctttctctttagaaccccctctaagcagacccatcgctttattgctttaaaacatacactaagtggtgagtggagctggggcgagggaggtgcggagaaactttctgccacatgttgacattacagatggctactcagacgcactagtccaccaaaagcaatcgaacactggccgggcagtgcttgcagcttttcagtttgccctcctgaggacttggtaacacggtgtaaccaatccattggttccctctaagtaggggattctttgctctagtaaaaggtagtgccccaaaatgaatacatattgaaacatttcatagattctccgttccaggagatttcttttttctttctttttttttttttttaattttttaacataagggggcaccttgaacatgacgaacaaatgaaaagaccgaaatgctttttcccccgcactgtctgcagttgatgaaactacagggtcctggtcctggagcatgtttcagatctcactggggcaccagcct

SEQ ID NO: 1986 - DNA, 6000 bp, Homo sapiens
actttcactaatgccaagcaaaggcattttgcccagattgctttccccagctcatatacagagttgaaagcagggaatggggtgaagtggaatggaggaagaacagatgtaaatactaagcatattgcaggttcagtgactcgccccagaatgggaccctgtcttagatcctacaaattcctgttcaatccttctaggcaagatgcttaattattgttatgtgtagggaagaaaattgttagcagcagaaggtatccgagtcacgtggcaccaaaatgtatcactagtagcgaatatccaagttaccttaatagaatccgtatgggtctgcagcaacctcaattcctacatcctcagaagaaagaattcaactcagggtcatacggcagaaaaagagactgaggcaagtttcagagcgtttattaaaacgctttagagcaggaacataaggcaagtgatactggagacagaaattattttaagcagataatgagggcaaaagagtcctcggcagaacttccctgctaacaaagaacagcccaagaaatcccttcttttctaacaaagagcagcctgggagatcgggctgcaaacatagataaggaagctggaaacttgcacgaggggatgccagaagctgcacagttagaaagaggtacctggggccaggaatgtccaccctgggggctccacctcccctctatttttagcacatgcacagtaagaaggaaataagcggccgggcccggtggctcacgcctgtaatcccagcactctgggaggccgaggcaggcggatcacaaggtcaggagtttgagaccagcctgaccaacatggtgaaaccccgtctccactaaaaatacaaaaattagccgggcgtggtgacgcacacctgtaatcccagctacttaggaggctgaagcaggagaatcgcttgaacctgggaggcggaggttgcagtgagcccagatctcaccactgcactccagcctgggtgacagagtgagactcctactcaaaaaaagaaagaaagagagagagagagaggaaggaaggaaggaaggaaggaaggaaggaaggaaggaaggaaggaaggaagaagtaacatggagtatctagccacgggcataataaaagactggggtgggggctgccagagattcgtgccctatgcagatggcacacccggtcctaaccagtttttcatgccctttgtaggtcagacaccgcctccccactagctcatctataaaaccccctgcatttaaccacggatcggcaactccttttctcgggacccttctctggggcagagagctattctccttctttcacctattaaaattctgctcgaaacctcaccctttgtgtgtttccacatcctttacctccgtggccgtgagaccgagaaccttgggtgtcaccccaggcaacaaggccacttcacaagtacacctggaagagagccaatggacgccctggaggtcaagtgccccgtttgatcttgaacctaggattttatacgctggcctacttcccgcatcttgtgcccctttcccttattcttctcttaaggtgaaccgcccacatgcatagtgccctgcttgggattgggaggtgagcatgggcagtgtgtttaagaagttgtatgcgtgatcacctgaggctttcttccccttttccagtggaacgcccctagaaggtcatacgctgccattttgtctcttaatgcgcatgctcaagcccactggcccaattcctgagatcttattggaagctgccgactaccaatttcaagtgtattcatctgttgggaaactgcctctccctgttgtggccatgatcaatgatcattttagagaggcagtgtgacaactgccaaaccatcccctgatcatcacctgacattcctggcgggttgggaggggagcccttctctgccccgctcatgcctgactagctacctactgtaacaaaatctgtatcatgtcttcccagtgattctatattttggtaatatagaatcaacttgtggagaaggcagcatgatgtagtgaacaaagcttcagcaggccaggatttaaatcccagagccaccatttattggccatgtaccattaaatatgtgttacaggcctctcctgggcctcatttttttcatctgcaaaataggaaatgatggcaaggatcaaataagatgacaactatgagaagcacgcccaaagctaggcacacattaaatgtgtttcccttcccttcttaagtcagagtttggactctgaacataatgtaactccccaccaagagctgactgtgactatgggcactgtttctatgaagggagctcttggtggccctttgttgtaactgttgattgcacacatctggaaaccatgacaaccgttttgcttttagttcagcttggcccaaatgtagctctatataaggcagcttccatacttcagtttttcccaacacatcatagcttggcttgaatttgggcagaagggtgggtgccaaaggaaatgtacaatgtctgagaaaaattcttattcaactaacaattacccagatctgtatggccccactagggcactgttcctggagcttttgtgtacattctcccactgaaaatgcagtgggaagctttatgatgatgcctactttgcaggtgtttcgatgactctgggtggtttaagtgactttccaaagtcacagagataataaggcatagacttgggataagatcccaggcttctgacatggaaaaaagcaggtcacaaggatttgcggtgttagaagaacagcagctgtagtgtctgcctgccagtgtgccttgagttgacactgtccacaacaagtactggaaggcaggagaggggaggtcctatgtaagtttccttggcctttagaagaaaccctgtgtccaggctctctgtcaactaagtcacatatcgaactggggcaggtagtgatatatggctaattaaatgtgccatgtaaacaatatctgaccactaattttaaaaaacagtttgtaaaacattcctggcatcatttaatcttttggggttttcacttgttgtattcagaaggtattttaggaccaaccttaattgtcatgcattcattcaacgaatatttattaacctacctactgtgttgtatccagcactgttttgttttgttgttgtttgtttttttggggacagaatctcactctgttgcctagggtggagtgcaggggcacaatatctgctcactgcaacctccgcctcctgggttcaagcgattcccgtgcctcatactcccaagtagctgggattacagttgtgcgcagcaactctcagctaattttcgtatttttcatagagacagggtttcaccttgttggccaggctggtcttgaactcctgacctcaggtgatcctcccgccttggcctcccaaattactgggattacaggtgtgacccactgcacccagccataaaactctttaacacaaactcttcaaagtgacatcttttgtaaccttcataggttacaaaaggtattgatatattaatagattgagatttgattgcgggggggcggggcagggggagaatgctaaaaaaataagtcagctttcttttctgtaactatttaaaagaatgcaaagtaattctacaggcaattccttggtgggcttatttggtaattttttttttcttttccattttcctcttgctctttggtttgtaggagaaccgctttattcccaggaggcaattttgagtcccaacatgtcctgcatcatctcctgtgcccattgccaaaggaaggcgaccagagcgtgggtttcagcacagctctgattggatgataagcaaggagagtaatgtgctgctaggaggttagagaaaagaaaatactagaatataccagaatgtagtatttccacttccctccctccaaatcaaaagcctcatgaatgaaattatgaccattattcaagtgcaattatactgagtatgtaaaatggaaacactgaaagtaaatcatacatttggatattacatttcatatttgagaacatgccagaaacattgtattattgttgagtgtaatgtcaggagacaaacttctacgcattttatacataaatttttccattttctctgtttcccatttatgtcaagttgaacacatggtatgacttttaatattctctcttccttctccttccccacattgaatgtcaagtgatcacactcaatcttgattatcctaaatttacccttaggacctgtcacctcattgggtgttgccgctagaacaagagggttttttaaatggtataaaaaggagaggcccggcttggtagctcatgcctgtaattctagcactttgggaggctggggcgggaaatcccttgatcccaggagtttcagaccagcctgggcaacatggtgagactctgtctctataaaaaaaaaaatttttttttttaatttagctgggtgtggtggcatgccctgtagtctcagctactatggaggctgaggtgggaggatcacttgatcctggaaggtggaggctgcagtaagctgagtggcaccagtgcactcctgtcaaaagagagagaggagagagagagagagagagaggaagagtccctaaagaaacctataaaactggggtcttatggatgctagcacatatcttggaaagaactgccagcgccagtggattacagaagacaactgtggctacaggctgttcttgccagctcaggcgtcaactcgtggaaaccggttaatgacccgaggggacagcggattctcgcctaagcaagatcccgcagatgggagggcgtaggaagaggttccccgggccggctccaggccccagcgggcgtgggcgttggcagtgagcgaggggtggtcccgcgccgcgccggcggggggcgcccgaatgagagcgcggggcggtgccgttgggaccacggcggccagagcggcaggatggcttccggcttcaagaagcccagcgctgcctccaccggccaaaagagaaaggtggcacctaagcccgagctcactgaggatcagaagcaagaagttcgggaagcatttgacctcttcgacgtggacggaagtgggaccatcgacgcgaaggagctgaaggtggccatgagagcgctgggcttcgaacccaggaaggaagagatgaagaaaatgatctccgaggtggacagggaaggcacggggaagatcagcttcaatgacttcctggccgtgatgacgcagaagatgtccgagaaggacaccaaagaagaaatcctgaaggccttcaggctctttgatgacgatgagaccgggaagatctcgttcaaaaacctgaagcgtgtggccaacgagctgggggagaacctcacggatgaggagctgcaggagatgatcgacgaagctgatcgggatggggacggcgaagtgaacgaggaggagttccttcggatcatgaagaagaccagcctttactgaagtcggttcagaagctaaagtgactctctgggttgcctgcttccattttgtgaaaccttagaggacagcggctgcctgtcccttcttcaccccctcacccccataatttgtctagatctatttccatatctctagttcaataatagaatttgaaagatgcttgtaatgtgagttttgggttttaattctcaagagtcaacctggagcacatgaggttaaacaaagggccctgaagtttgagtgcgccctccatttgccctgtgctgaacttgctgttcatctgttgatctggaggcaggacagcttctgggacacacaaaaatgtggttccctttgtcacttctttggtggtcttaaattatcttgcttcatatatcattccttaaattccagtcattgttccagcataatgagatggaatctgccagtagatttgcctagcctgtccacttagctgaataccagtttgaagga

SEQ ID NO: 1987 - DNA, 6000 bp, Homo sapiens
cccataaaacaaaagctctgtggagttctcattaatcttttagactgtaaaaatgactaaaatgttggactagataatgtttcctcattttacatttatttttttgagacagggtgtttctctgttgcctaggctggagtgcagtggtgctaacctggctcaccggagcctcgaccttctgggctcaagtaaacctcctgcctaagcctcttgagtagctaggattataggcgtgcaccatgatgcttggctaatttttaaattgaaaaaagtttctttttgagacagagtctcactgtcacccaaggtggagttcagtggtatgatctcagctcactgcaacctccacctcctgggttcaactgatcctcctgattcagccttccaagtagatgggactacaggcatgtgccactgcccccggctaatcattgtattttttgtagagacagggtttcaccatattgcccagctaggtcttgaactcctggactcaagtgatctgcccgccttggcctcccaaagtgctgggattacaggtgtgagccaccacacccggtctacaagcctggctcattaaaaaaaatttttttttgtagagacagggtcttgcaatgttgcccagggtggtctcgaactcttggactcaagatcatctcagcctcccatctcagcctcccaaagtgctgggattacaggtgtgagccactgcacctggtctgcatgcctgcctggctaattaaaaaaatgtggagtcagggtcttgtcacgttgcccaggctggtcttgaactcctggactcaagcaaagcctcccaaagcgctgggattacaggcatggccaccatgcctggccactccttattttaaaatgcgatgactccaccgtgtctgaaagctaggtatagaattttcaatcaactatttacttgtaacaatgaaatagtggtctgaatgtgttagctacactgtctacagcagatgtaaactaaaattttaaccatttaaaatcagaggaaaactagattataacttttctctcgaaaggaaccatgtcatctaatgtatttgttctctgagggcaacaacgtatggctataagaatccctttattagagctaatgaaaaatataattaccttttgccaaatagcgagacttttctttcagatgtcggtttgtttatactcaactttccaaaggttggtttctctttgctttaagaaaaatagaaaacaactctttaaaataaaaattaaaattagctcaagaaacttttagaaatatattagaaccaacaactcttccccactagctataaaaataattcaaaaatcataaaaatgtttagcagtcatgaaagctgttataaataggatgggctaaacatggtactataagttataatgcttgtaatgttgggggaccagcagaggtccctctggtgtatgtaccctttggtagatttagtcttcgttttaacctcagcagggtctgttttactcatctcatttttaataactatctaaacattttctaccctaaatttgcatttccaaagagtaaaaacaaggttaaaaaaaaaccctgaaggtaaagtacaagatagaaaatttgtagcccaaagacacagaacatactttcaggcctaaatatcattattattattactttctgattttaaattattaacagaaaaaattaaaaattgacacataattgtacctacttatggggtacacagtgatgctgtgatacatataatgtacagtgatcagatcagagtaattaccatatccatcatctcaaacatttatcatttctttgttgggaacagtcaatattctcctagctatttaaaactatacaatatattattgttaactatagtcattatacagtgctatgaacaccaggacttattcctcccatttagctataattttgtgtcctttaacagatctctccctatttccgtcttctccctatgcttcctagcctctagcatccattttattttttacttctatgagataaacttttttagcttccacctatgagaacatgtgctgtttgtctgttccctgcttatttcacttatttaccaagagaaagaaaagtgtaggtaggaagtccagttaagacaaaatggtcaaaggtaaggcttgttatgcagatttaagtcttttgcttctctgcagaacaaaaaccctatctacattatgatttccattatcttaaccacatttacattttttttttttagagcctgctctgtattagaatgtagctgcacttattacattatctaaactgcaggcaaaaaaacattgacaatggtgaccttttagcttctaatacaattaaaggcataactttttttggtataagtaatgtataacagcacaaacattttcttggtttacagtattcaaaaggaaaaatatataaatatttcaaatttctaaaagtaacataggctcatactatgtaaatccaagtaatttaaaaacagttagcaagtaacttgtacctcggtactagagaagaattatacagctctacaatggcttacaaatagccttctcttatctggaagataatcactcataatgaaaaactatagtttatgacagcaggttctttcagatatttttccagcaaatcttgaggaaagagttcggaggagtggtgttttgtaggctgctactatattataccttatgagagcaaataattttgctctgatttgattgaagctttgctaattggaaatatctcagtgaactctaagttacagcacagagcctgcttaaacaagtagctctagaataaaagagaaaaataagagagtactgaacaagaattaacagtccttttagggggtgcctggtaaagcatttggctttggaaatttgtgaaacaaatgacacaaacaacacctagcagagtatcatgcccacttttagatttcattgatccaaaattaggtacccctgggaacagacaagattcaccaagacatcactcatattacatctttatattaactatttcttatgatttctttgcctaagatgataaagcatgcaaattagaaccacaagggaaatactcacgtttgaggggtatagaggccttgtttatttacatcctgggatcttaactcctgcatggagaggcggccagcaccaccgctggaaactgaactgcgcttcatgcttatgacctacattcacgaattcagtatttaaaaaaaactttccagacagagatggtacattaagcaactatttatccttaaacagaaagacagtcaggtttcattgtttcttcaagatcatcatctttcccctggggtatctcttttttgttcatgtacactgaagttctcatttgcaaggaacatctatttaattccatttaaaaatattcaacataaacatttattaactgcccactatatatataggggagtgtgctaggcaatgcaggagatgcaaagacgagtaagttacggtttttgccttcacaagggtatccgtggtagctaaagccctgtctgttacccagaccacattactgctgttggctgtgcctatttcaataggaagacaaaaaaattacctcaaattctcttattcacctcaaaatgtttccttttctttggtttcagagaatggaattattctgttttcctaatgtcaatctctcctgctctgtccttaacccattgtttcctcaattactgcccttttggcatcaatctccccttcaacaaggataaatcatccggtccataaaatggtctataggctgcctccatttacaaaccacattaacaggtcactcccttcacatctgctaaaaaatttgtctcctaggatacacatgattgacaaaacttttgatcctgtctcatctctgcacccagccttctcaggtcctgccctggctttcaggaaggtgacaatccttttacttctctgggtactccttagtcttttacactgattagactcttcttgattttggccgcctatttcctcttcaatatgcgcttgttcatctattcaacttttccactcacacctgtgtgtccacgtttaatctccacttagaatgtagctctcatgatttaagatgaagacttctacacgcagtcctacacggccataagaagctacactagtattcagacgcaacccacccaacgagtcctctcttgtccatctctttccgcccccttcaattcttccccgtttcctctcccgagcctccactcctcatcagtgtcccccaggccctcccctttcctccttgggaaatcgttgccactagaaatttaatagatcccgtgaaaccagcgcctcgcacagttttggcctcgaggcttctcccaacagcaaacaaacaccaaaacatcgcctcaggacctctaaatttaagtcattggcgccatcactttcttcctccagaacagctctgcagaaacaaagttaatccgatgtcattcagtcaccttttttccagtttcctgacacgacccagggaccgaatttctgtaaaccgtgcaagtatctgctagacaggacagcggtcatcaaaacaccaggtccttcctcggcccgccaaagccgttcgaatttgaaattctccgccggcgctgacgtcattacgcacgacgcgcgcagtaacttccatgcgaccgcctcgtcgctggaaggctgcgtgctggtcgcgcccagctgcgtcaccccaggaactggggtctgtgggccagtgtggccgtctctacgaagactggcacgacccctaaagttaggtcggaagacctgtgggcagcttgagcgccgaggagtgccctgaacgctcaactcgccctggaaacgtttttccgtacagcaacatggcggcgcccatggactcttagaaaaggagaaagctttttctctgtggactggaaggggcatttttcatgatcactatttagatgggtgctgttttcatgaggagagtctgggaaggcggcgtccgcttttctgacaagggaagaggtgaggtgggagaggggctgcggagtgggtggaatgggctcccaggattgcgttggtacggctgccgaaattcgggctcagtatttgatcacttgccggaggctcacggtcctctggtggtggctgacctgtgagaggctaggaagaatccaagtgtttgggggcgggcggcgagggagtggatgtgaagcagagacgcaggagaggggtgcactaacaacagtaacagtagatcactttgctaaaataggatttcctcgctgctgtgagtttgaatccagaaacaggcactgcccggtacctggagagtggtggtgatgaaagatctcacagctccaggaagtctggatacttgggtctggtagcaattgtgccattaactagcgttgttatttttgggcagcttgcctttctgctctgagtttcaattttcccgtctgaatttctagctctcactagccattccaggacccttttcacctcagctgtggcctatgaaggggatggggaggaaccaaggattatattaatataaaaattatatgaaaattaggcaaccgtctgataataaaaagtctccttgtggaatactgttaggttaaactttacctacagattgttaaatccttagcactaatgttttccccagaaaagattaatggaaacatcatttgcttttctgactagatagttgctgcttccaaaggtggttttacacaaatacaaaattaaaaacacctttagtacagaaataattgcttgtatttcggtatacattcacagtacagttcagcatttagtggtcctgctagcaatttgccaggaagtcaagcctgccaatttcctgatattcctgctgtgcaccccaacttcttaatccctgctgaggatcttgagaagcagcagcaccaaaaccaaagtaggcaccaaattcaaggttctttt

SEQ ID NO: 1988 - DNA, 6000 bp, Homo sapiens
tttgcttatttttgaaatactatgcaatttggtcttctaagaatagttgaagctagaaaaaagctacaaattatttcagatatgctaaagcctttttgggttttactgattcttctttatacttaacgaatcaccagatatttaagacatttagataataaatctcaattatgttttctggagaaaaataaatatttcttaaaactttctaccttcccaataatagaaatggagatttcttttttaacaccattcatcagatcttccttttcattactttgctggcattctttatgaacagctggagttatataaggtttggtgacatcaaacagttcaggtcgaaaaacaaattttcgtgtgaacatttcataatttcctccatcatcattctctggcttagtggaagagtcagaagcaataaatgcagcacagactccagaggaggacacagaatccatttgaagagactcaaagtgaacagaagtagtgaactcctttttacggcaacaaggttcatgatgctggtgaagttgatagtttatcttgttgataaaagaaagatgatccagtaaccacccagctgacaactggtgtaccacagacattcccttcctttaaaaaagcctctgggaattaggaactagaatgaaaatccaactttccagatcagcttcttaaatatcttgtatttcaataaacatacacttcatacacacagatagatttgatatacaagtacaaaaacctgacatgcacattgaagagaatttatcattcatgatgttaatatatacagaaattctaaggaaaattgcaatgttttaatataaactttctttttaatttcagagttgataattcaacattttcagccaaaatttggccaaagggggttaaaacctgatcttatgtctggaatcccaatgtgatcctcctgtcttcctgggccccccacgacttcttgctttggtccttgggtctagccactaggtccacatcctccaagtcaggaagtcattgaatccttaaaaggacaaagtagcctgtaaaagcaaagaacactacattagctacgtgaattcaccctttttaatgagataaacctatctagagaggggcatagaatttcagaaggtgctgttagcaggtaatccctcgtttttgcaaactacacttgtcatagtaagtcagcccattctccagtatcatcttccctacttaatcactactaccaatggagtaataaggtaaaaagaaaaaattgttctagtcagagaaaatgcaattttaccagcacatcagaagcactaaaccctagcaaaaccgcaaggttaagagtctagatctgtaattggttctgagcagtaccccttggataactaggtttctcagaactaaccttttttcaaaagatggattagagttctagatattgctttctaaatccagtgcagtggagaacttaagaggggacagaataagaaataaatgagtgcttaatggcacaattaataatcacagcatttagattcaaatttctaactccatgagtgagattatgatgtacattggttttcatccacagttcctggctcaccgcccctgtagccttactgagtgcagggatgaaggctgagttgatcaccagtgaccaatgatgtaatcattcatgtctgtacaatgaatttgggagatgtgacactatctaaagatagaaatagtgtcagaaatgaattagagggaagaaggggcgagcctaagagtgacagtgacacatgatggcagtcaccacaggctcaggagtaggagtacctctcaatttccaactgttggaagaacctgaaggttagaaaggagtggctgggcatggtggcccacgcctgtaatcgcagcactttgggaggccgaggcgggcagatcccctgaggtcgggagttcaagacctgcctggccaacatggtgaaacgctgcgtctactaaaagtacaaaaattagctgggcttggtggcatgcgcctgtaatcccagttactcagaaggctgaggcatgagaatcacttgaacccaggagggagaggttgcagtgagccgagactgcactactgcactccagccagggcaacaagagtgaaactacgtctcaaaaaaaaaaaaaaaagggagtatgagatggcacagatagctagagtctagaagatgataaagacatgacacttaccaaatggacagggatgataattgggccttcaagaacaatttacaaaaactgaatatacagctttaaaatagaatgtggacctaaatacccagcagcactcccctttgtaagatgtgtaacaaaaattaatgctattctaaaggagtggtggactcaagagccatttcagtgctagctaaatagcagaattcagatagcatcaaagttgtcttggaagaggttgaacagctaatgacatctaaagaaaacatgaaactccctcagcagcctgaaagacactgttacagtaattaatcaaaaagaaaaaccatagtcccttttccccacacccattcaatttaagcagtcttcattttcaacagtagtaaattttctagatacatcttgtagacctcacagtactagaaaggatgctcctattcaaaagaaatgtatcttaagatactgtgaatgatactaacttttttgtccatttgaattatgtaagttgtgctataacaaatcatcctgtcaagcgacaggatcaagcaagtatatttaaattgattcccatcataactggtggggtacatctaattcaactgtggaaagaccacacaatcaccttgcttctccttacatggcctggagtctccgccttctccccctaccgctctcccttcctcccacccccacccactgcaacagccctctagcctgggaggcttgttagagtagacgtgaagatcacagcctgtgggaccactgctgagtgtgtgggcactcagtttaagtattcagtgatgctccttccaaaccactgtcctgtccccacctcttccactcccacccttggccaaagcacagatcataagccctctgctccgctcccctctgagattcgccttccatgaggaattcagggctttccccatatcttctcttccccacctttatcaagagatgctgctccctccccgtcaagtctctttttgcactgtcaccacccaacactttccacgacacttctttgctttgaccagaagccataaggtaaggttggaagaacatttattcactctccaccagcctaggaaattaatagtgggtcctcagccctgccaccttctgctgttatcatcagccttttaactcaggttttgatatggtgaaaagagtcaccagggttattcagacaccccggctgtcagggtccttggtggttaaacctgggaaaaggccacatgaagacaactgtaagcacacatgatccctctgaattgttttcttttcctgcaattgtgcttgctcttaaaaattgaagttttaaacagggctcacatgtgatcatccttccatctattggagtctagcttgaaatgtgacaaccggaaccaaaagaaccttgaatttggtgcctactttggttttggtgctgctgcttctcaagatcctcagcagggattaagaagttggggtgcacagcaggaatatcaggaaattggcaggcttgacttcctggcaaattgctagcaggaccactaaatgctgaactgtactgtgaatgtataccgaaatacaagcaattatttctgtactaaaggtgtttttaattttgtatttgtgtaaaaccacctttggaagcagcaactatctagtcagaaaagcaaatgatgtttccattaatcttttctggggaaaacattagtgctaaggatttaacaatctgtaggtaaagtttaacctaacagtattccacaaggagactttttattatcagacggttgcctaattttcatataatttttatattaatataatccttggttcctccccatccccttcataggccacagctgaggtgaaaagggtcctggaatggctagtgagagctagaaattcagacgggaaaattgaaactcagagcagaaaggcaagctgcccaaaaataacaacgctagttaatggcacaattgctaccagacccaagtatccagacttcctggagctgtgagatctttcatcaccaccactctccaggtaccgggcagtgcctgtttctggattcaaactcacagcagcgaggaaatcctattttagcaaagtgatctactgttactgttgttagtgcacccctctcctgcgtctctgcttcacatccactccctcgccgcccgcccccaaacacttggattcttcctagcctctcacaggtcagccaccaccagaggaccgtgagcctccggcaagtgatcaaatactgagcccgaatttcggcagccgtaccaacgcaatcctgggagcccattccacccactccgcagcccctctcccacctcacctcttcccttgtcagaaaagcggacgccgccttcccagactctcctcatgaaaacagcacccatctaaatagtgatcatgaaaaatgccccttccagtccacagagaaaaagctttctccttttctaagagtccatgggcgccgccatgttgctgtacggaaaaacgtttccagggcgagttgagcgttcagggcactcctcggcgctcaagctgcccacaggtcttccgacctaactttaggggtcgtgccagtcttcgtagagacggccacactggcccacagaccccagttcctggggtgacgcagctgggcgcgaccagcacgcagccttccagcgacgaggcggtcgcatggaagttactgcgcgcgtcgtgcgtaatgacgtcagcgccggcggagaatttcaaattcgaacggctttggcgggccgaggaaggacctggtgttttgatgaccgctgtcctgtctagcagatacttgcacggtttacagaaattcggtccctgggtcgtgtcaggaaactggaaaaaaggtgactgaatgacatcggattaactttgtttctgcagagctgttctggaggaagaaagtgatggcgccaatgacttaaatttagaggtcctgaggcgatgttttggtgtttgtttgctgttgggagaagcctcgaggccaaaactgtgcgaggcgctggtttcacgggatctattaaatttctagtggcaacgatttcccaaggaggaaaggggagggcctgggggacactgatgaggagtggaggctcgggagaggaaacggggaagaattgaagggggcggaaagagatggacaagagaggactcgttgggtgggttgcgtctgaatactagtgtagcttcttatggccgtgtaggactgcgtgtagaagtcttcatcttaaatcatgagagctacattctaagtggagattaaacgtggacacacaggtgtgagtggaaaagttgaatagatgaacaagcgcatattgaagaggaaataggcggccaaaatcaagaagagtctaatcagtgtaaaagactaaggagtacccagagaagtaaaaggattgtcaccttcctgaaagccagggcaggacctgagaaggctgggtgcagagatgagacaggatcaaaagttttgtcaatcatgtgtatcctaggagacaaattttttagcagatgtgaagggagtgacctgttaatgtggtttgtaaatggaggcagcctatagaccattttatggaccggatgatttatccttgttgaaggggagattgatgccaaaagggcagtaattgaggaaacaatgggttaaggacagagcaggagagattgacattaggaaaacagaataattccattctctgaaaccaaagaaaaggaaacattttgaggtgaataagagaatttgaggtaatttttttgtcttcctattgaaatagg

SEQ ID NO: 1989 - DNA, 6000 bp, Homo sapiens
taaagtcaacaagagtggggcaacaaataatgccttaatttcctgctagcaggaggattaatctgaaagtgagattgtcctgtcctctgtgatttggcagaggctttatctattgcaggcatttagattggtcacaagacagaaaaggaacaaggaaatgggaaaataatacatggagcaatgcaactattccattattagttttcagaagtagacatcctactgataagcaaaggcagaaaagtatatactgcaatttagagtcagtaaggaaacaagcaatttaaacaagtccaggaaattacattcatggttttgagttcagcaggagaacatggtcttttaattcttgctgtagggggtgtgaaaaagaccttcaccacttatgtaactataatgttgagcaccacgatgtgtcatctaggttatagcgtttatttctagcactggtacacatcaaagctgaaacaatcaaagatgtccccaggactttcttgggagatctcagaacgggggccactcttttcactgaaaccagtttgctgtgaacttatgtaatctctgccgagttgtcaggaaagcatacttgagaatgaaactaatacagatgaaagaagagctgggcattgtagagtgtcctgctgacatcatctgacatcctcaggttttaggatgacctgaggtcagcagttcccctatagctcctggttatggtagcaatacttttttttgtttttttttttaaatgttgctcacatgagtttgagctggatttcagtcattttctaactaaagagacctgactaacattttgtttggattatcaaacactactttctttttctaagttgaatgtcttcctacagttatctgaaaaaatattttcttgctagtcttagaccccctttgaactaaaacttgtgattctttcagttgtgatctataattctctacctgttcaatgctaggcttctcactaattgtaaaacttttaacatttaaaaatatttattcattcattaataaaaatgctttagatgtagacataagtaacagttatatttccaaattataagttatatttttatttttcttttttacaaaatttttaacttttattttaggtttgagggtacatgtgaaggtttgttacacaggtaaacacgtgtcatgggggtttgtggtacccattatttcatcacccaggtattaaacccagtacccaacagttatcttttctgctcctctccctcctcccactcttcctcaaaaaactttaattctttttttgtttgtttgttttgagatgaagtctttgcccaagtggcacggtctcagctcactgcaacctctgcctccagggttcaagtgattctcctgcctcagcctcctgagtagctgggattacaggcaggtgccaccatgcccggctaatttttgtatttttagtagagacgaggtttcaccatgttggtcaggcttgtcttgaactcctgacctcagatgatctgcccgcctcggcctcccaaagtgctgggattacaggcatgagccactgtgtccggccaactttaattctttactctttcctgaaagagactgtaatctcaaagacatttaaataataatggattattatttaatcagattattattgtttcttagtagacaaccaaattaaatgaaccaaattccaaagctcatagatagaatgctctaaaagaaaactaccgatagaaggaaaaacaaatatgatataatagttcagaggaagatttaatcaattacactacaaattgagactactggtattcatgaatcggaagtgaaaaatatccttcaaaatgataaagaataatgctcaagaaagtttattttttcccatgaacgcaaactatttattcttttcacagaaactgattatatatagttttagaaaagaaaataaggccaggcacggtggctcatgcctgtaatcccagcactttgggaggccgaggagggtggatcacctgaggtccggtgttccagatcagcttgactgacatggtggaaccctgtctctactaaaaatacaaaaaaattagctgagcgtcatggcgggcacctgtaatcccagctaatttggaggctgaggcagaattgcttgaaccagggagacggaggttgcagtgagccaagatcacgccacaacactccaacctgggcaacagagcaagactctgtctcaaaaaaaaaaaaaaaaaaaagaaaatacagcataaattgcaggcatgaattatgtatcgaaaatacatgatttatttcgtttcttgtttttttaaggccactggctgggatcagacaccagggtcagcagagcaacaagctgctatggcctaggctcctggccggagggctatgatttcatatggtctgatatttgcacgaattcctatgctcctgattgaggccaatttagcacatagagtggaatagactactcagaagcagaggcctattttgtgagaatcgacactcataaatatggtttctttgtatgccagaatttgaattactatagacaaagtagtttatccaaccaaaagaagtcccaccagttgtctggcaatcagaagacgaagatgaagggaaacataggtcaggtctcctgataaataaccagcttttaaccagaccagtagtttactcctgttcccccgccccaccccccgcccccaatttgagctgtttggcatatgtcattaaagtgtgtatcagggactggagctgaaggtggaagcagcggacaggtctttgccaagtaacacaactatggtaatgtgaagaatggcctcacccatcaatacctcccaaacagctgggattacaaacgtgagccactgcgcccagcctcgtttttgtttttaagccataacatctccctgcgcaaactgacaggcagctcactattcgtggaagatgaattgtcagaaaaacatcaggtttgacaaacttagagcacattttggttgtacttggcttcaaagaaggagggcaggaaggggaaaacccatttatgatcacctcttcccattctgaaatgcagaagtaccgaactagcctcacagttccgcaaataagcaaagggtagcacagaacatatgttcaaaagcagtctagtagccggagcagtggcttaggcctgtagtcccagcgctttgggaagccaaggagagaagagaggatcacttgaggccaggagttcgagatcagcctgggctggtctcagtgagaccttatccctacaaaatataaaaaaattagcctggcggccgggcgcggtggcttacgcctgtaatcccagcactttgggaggccgaggcaggtgggatcacaaggtcagaagttcgagaccagcctggccaagatggtgaaaccccgtctctactaaaaataaaaaattagccgggcatggtggcaggcacctgtagtcccagctactcaggaggctgaggcaggagaattccttgaacctgggaggcggaggttgcagtgagccgagatcgtgccattgcactctagcctgggtgacaagagtgagactccatctcaaaaaaaaaaaaaaaaattagcctggcatggtgtcgtgggcttcatacatgcagttctcagggaggctgaggcaggtgggatcgcttgagcccaagtcgaggctgcagtgagccgttactgtgccactgcacaccagccagggctacacagcaagatccttcctgtcacaaaagaaagaagtgtgggaaccatgaatcctagtgatagaatcttggattctatctctagaggcgtccaagagcgagccaaagctttgtctgaacactcagtctgactaagtctagcagaatattttacaatttctgatgattcttgcactctgatacacaggaagaaagtgtgcaaggagagggcgaagccctgcattttttggaggtgctggagggcagtgtagggactgcaccctccttttttttttatttgagacagggtctcactcgtccagactagagtgcagtggcccagtctcagctcaccacaacctccgcctcccaggctcaagggattctcccgcctcagcctctcgagtagctgggattacagtcgcacgccactaccacccggctaatttttgtatttctagtagagacggggtttcaccatgttggccatgttggccaggctggtctcgaactcctaacctcaaatgatccacccgcctctgcttcccaaagtgctgggattacaggcgtgaaccaccgcgcccggccccaccctccttctttacattggctcatatggaagaccaaaggcacttggattatacatcgcagacagaagcagccaaaacctacatggcaaccagttgcgacaaatttccaaggtaaaccacaaccgctgggggcctgggtggttttcagctcaaagcgatgaccccaggaacgacaagcggccgccgctagggggcgccgccacttccctgccaggcgaccacccgcggaggcgcgcgcgctaggcctcccaccgcgcctgcgctgaggatggacactagctcgcctttcctcgacgcccagccgtccgggccggggtgaaaaactgcgtgacacgcagtgagcgtggcggccatcttcgtcttctgggcacgtcagctgagccggttagggctgaagaggagcgttgcgcaagcgcacccaagacggtcacaggtaactcccatctgacgagcgaggcgtcgccgtcgtcgccggaagtttggtgtttgcgccgcgggggaggcggcggccgcagcagaagcagctgagtgtctcctgatacccggatgtgaggcgatccgctggcgctagtctgaccctccgccaggcaaaaggaaggtacgcgagcgtccctgacggtccccgccgcctgtgtcttcacctctcttttgccagccccttcagggagcggacagttctccctcttcctgttccaccctcggtggcgtgttgcctcgcacgccccttcctactgctccggtcccagctcttcgcgcccctgggagggaggtgggaggctctaggctccaagacgccgtcgcttgaggtaggcagctaacgtgctcgcgtgtccgcgcaccacctgccgctgtttgctgggcggtcgaagttcataaggggtcgtgaccgccgacggggcagggccggagttcccagcactgccgcgagggctccgggagccccgaggtggcgcgcagccattgctagcaccggggcagcgccagtgctggtcccgcaggtagctccgggccccgtctccgccccctgcgttttctcttcccggcgcttcaccggagccagtccctcgccgcctcctggcgcaacccgctgacccggcctgagcctggaggcctctgcagtttgcggggcgcgatgtggggtcttggttttacagccttcagtttgggaggggagcgggcccaaggtcatagagtaactcatgctgcaaatgggggtctcggcacaggtagggcggctctggagtagaaatgagtgcattgagggccgcagtgaagtttatagcgatggagagaggcgaaccaaagagaattgggtcctcgatttttatcacgggttaagattattttactatgggggtttattttgcacaggcagaatgggatagcaagtccaacaattcgaagactacctcctctccctccgcctctcaatgatgcgtccgaaaatccggcgtgtgctttattttccggggcgatggggacgcagcggggaccaggggagggaggaagaggaggaggaaggagctcaagctttgcgatttgagaagtactatgaaccatgttttctgtagtcttagctgcaatgagattcctttaaacaggaatcgcagcacacagtatctagatagtattacaaaacgatatctcaataaataagcttcgcaggaaacaaaagcgctacttggtggcataag

SEQ ID NO: 1990 - DNA, 6000 bp, Homo sapiens
cctatttctctcggcttctcacacaagttataaaagctggaaggaactgcagtaaaatatcactcttcctctttcttccacatagtgtcagaggtccagagacaaaaagaatcctgtctgggcctatgatacgacagtatcaggggctgctggtgccaatcattgagagaagggcaggttctcgggcaggaagaggagacttgaaggacagaactttggcaggaagtagcagggacaccatgtccccttggcattttctcctgtgtagggagaagagggtgtcctagatggctggccctggggacaaaagttgaaaaagcctctattctagggggtaggctggggaccagttgaactctgtgcatacagctctttttttttttttttttttttgagacggagtcttactctgtcgcccaggctggagtgcagtggcgtgatctcagcccactgcaacctccacctcccaggtttaagcgattctcctgcctcagcctcctgagcagctgggattacaggcacgcgtcaccacgcccagctaatttttgtatttttagtagagacgggggtttcaccatgttggtcaggctggtctcgaactcccaaactcatgatccgcccacctccgcctcccagaatgctgggattacaggcacgagccaccgcgcctagccaggatttaactttcattggattaaggaaagcagcaggtttctcagggagactatgcctgttagatcgacagtccagtgccagcctgtactttcatggaaaataccgtaaaataatctgatttaagcaggagctaacagctgaagcttctcatgttcctgcctggaaaggcatgctaatatttcactggtctcaggatcagtgaaaactataaaaacctagaacctaaaatattctggcctttttaatgttcaccttctgtattttgcatttttctaataatagctacccactgaactacaggtactctgctagttacataatttatattgttggtaaccctcacaaccctgcaaggtaaaatattgcaaaacctaccttcatccatagataaggtaggtgaggccaccaaggaacaaagcttgtaatatccacaaactggagaccttacaaggtcgcatgtttctaggagcctaagctaattttcagacttctcagtctgctgaattatttttttgaagggccagtgattacatgtaggttgttttttcctttctttttaaaaactaacctccaatatgtctccatcaaaacagtacatgcattttgaattcatgtgtgctacaaagtttcagaatgggcacttgaaaggggcaatataaaagggaagggggagaagggggaacgtggctgaccaagtagaatcacgtttcaagttctagtcctccaggcctgctatgcatgaggaatttgtatgccaaacttcctcttctgcaaggatcctcctcctggcctcctgaatctcctagatcagctcaaatcctggctcttgcctaaggccttcccccacactgcaaataaaaaacttcttttccggtcggcctgtaatcccagcactttgggaggccgaggcaggcggatcacgaggtcaggagatcgggaccatcctggctaacacggtgaaaccccatctctactaaaaatacaaaaaattagctgggcgtgatggcgggcgcctgtagtcccagctactcgggaggctgaggcaggagaatggcgtgaacctgggaggtggagcttgcagtgagccgagattgtgccactgcactccatcctgggcgacagagcgagactccgtctcaaaaaaaaaaacaaaaaacttcttttccatattctgataatgcttatagtccagttgcgcatttgaaacttaatcagggttggctttgcattttcatttaaatgtgttttccatggttgtaactatcaaggtcacaagggctaagggccacatttctttttatccctttgtcacagatggtactgtggatgtagaagttgcttggtaaaacttgatcaatgactaagtagttgaaaaataaatgaatttggaataattcagggactaagtagattaggatggtataaataacaacggacattttaaaaagtactttaaagtttgtaaaatgttcctcaggtagtctcatttgtacctaacaataacccacagagaaaactaactcagagagggtaagtagcttgctcttgaaacccagatcctcttactccaaagcttgtattattccgtaatagttgacctcaagtatggatgtaagagtaaatctggacactattctctaccattaaacatcttcaccagcagagggcgcaagaagatgcatgggtcttcgagtcaggtttgtatactggcccaccccagctaagaggtagatgagtcggggcaaattatttaattcttctgagcctcgtctgtaaaatatcgatgataatgctctcaccaacaccacagggtggttataaagattagaaatactctgtggctggcatacagtaggtgaacaataaaccatatctcaagatccccaaaagggggtcacagaggcagtttggagattagacattgattcttgtttgatgctttaataaatatttgaaattcgtttcatacttcacacttacagtagacaaaaggttatagaaaatgaaggttataaaaaatgcatactgatggaaactttttggtattttttaatcgatgtatcatggttgtaaatattttggggggatgatagaaacatttcaatacccagcaaaattgtaagaaagcagactgaacaacctttaaggatgaaaaccttaaaaacacgaaatgccatttgccccagcatctatttaacctaagaaaataatattgggtggtagcaagatttagaaaaacaaaggaagtcatcattgctttataagagcaaaagtggaaaccacaaatttattaaatgcacaggtttaaaagtgtacagtctctccatcaaattgaacactatgtagtcattaaaataaaaattcttccatgcagaaaaatattctacatggaaagataatcacaacacagcaggcaaaaatcacaagagacaaaacagcctggctgggcgtagtggctcatgcctgtaatcccagcactttggggggccgagacgggcggatcacgaggtcaggagattgagaccatcctggctaacacggtgaaaccccgtctctactaaaaatacaaaaaaattggcggggcgtggtggcgggcgcctgtagtcccagctactcggggggggctgaggcaggagactggcatgaacccgggaggcggagcttgcagcctgggtcagacagcaggactccgtctcaaaaaaacaaaacaaaacaaaacaaaacaaaacagccgatttcacttttgtttaaaaacacacccaaggccaggtatgacagctcatacgtgtaatcccagtgctttgggaggccaccatgggaggactgcttgaggctggaagttccagaccggcccgggcaacatagtgagacttcatctctacaaaaaaattttttctttttcttttcttttttttttttttttttgagatggtgtcttgctctgtcacccaggctggagtgcagtggcacgatctcggctcactgcaacctccgcctcctgggttcaagccgttctcctgccctcctgcctcagcctccccagtagctgggattacaggcacgtaccaccatgcccagctaatttttgtatttttagtagagacagggtttcaccatgttggccaggctggtctcgaactcctgacctcgtgatctgcctgcctcggcctcctaaagtgctgggattacaggctttagccaccgtgccaggccaaatttttttaaaaaaattagccaggtgtggtgggtgccggtagtcccagctattcgcgaggctgaggcagagagaatcgcttgagctcaggagtctgcagtgagctatgatcacaccagtgcactccagcctgggtgacaggctaaaagaatatatatacatatctctctataaaatatatgaaaatacaaaacagaaatcaaaatttaagttttacgttatttccacagaagatattgttagtgataccccctttttttttgctcctctttgcttatcttatgttctgaaattaacatttatcatttttgaatgatggaaaatatattttacaggagcaccgttggagtctttcacttaacactgcctcccaaccaggccagtggtcatgtaaattaagtcaattgtcataaaagggcttggaagtttcaaggtagttagccaaaataattaaaatcctggtgaaatttcacagagctggccattgagctttgactccactgacatgaggctgctgtaaacagacaccaggctccatgttttcaaaaggcctaaaaacagcacaaaataaaatataacaacgattgttcatgtaaagggccacgtgccatctctgtcctgagcaaatgtaacctgaaaccctctctgtctggcactccgggttggcggcacctctctggacggtgtatttgctctccattactcaatttactttcctgaacttgaaatggagtggaatttcaatgtagagttacccattagctccagggctaaatttaaacctttaattaaattaatccgttgatctgaaacacattgcttctccctcaaaagtgcagcaggtttcttaggtgtcacagagcttaattcagtgtggcaattgttccttactgcatttgttaagttgcccataccgcctggggaaacccgcacacgttttcagatccctccaggtgaactcctccaccctgtccccgcccccgcccccacccccaaccaaaacaagcattcgttgtgggtggggactgcgactcctcccagattcagagctactgctctgggagggccgtcaggaacccgtatttatagaagacatggtaggtgccaaacgtgcttatgagataaacgacagggtaactgtccacattggtcccagtttatgagggagaagagatcataatctacaaaaatttgcaaggtgaccaggggaaaagagtgtaaggtcattttagcccacctgggtcttcacagaaaatggagcacatttcagagccaaagtaaaaaatttgcgttgtcctttgctaagagagagatgaaaagtgacaataccatggattggggatgcgtgagttcgttggccacatgtaagatgttcgtgcttctgggctcttatgcatcccaaggcgtgcatttatcccgggggctgcatccttggcctgggaatgaatagacccaactgcaatggttgttagcgatagctttacggtgggacagtctccataggggctgtggacttacccgtgttattatgaaaaggatctatttacttctcggggaccaacggccttgcggggtccaagtaactcgctcgcagtccaaaactctgcaacgctccacataaccgtcctgtagacccacaactctcccaggagcacagccccaggacctaacccaccgggttctgctcgctcacccaattcccagtgcgagcgcgcgggggaaacgtgctcgcctcccgcacctggcttccgcggccccgggagtcgccaactctcccagcaggcagctccgacaacccggacagccgggccgatcccccgccccaccacccgctcggctctcgcgtcctcctcttcctcctcccgtggccccttgcctcccgccgtctgcctctgcggccgccgcctgcggctttgttttcctcccaggtcgcattccccacacgtgattccgtgttattgcaaagagggctttggagcgcgagcgcggggcgcgcgcacctataaatacggacacccggccccggagcccgcgagccagcggccaggcgaccggcgggcggccagccagcgagccgaactagccgagctaggtagcgaggcgtgcgcgtg

SEQ ID NO: 1991 - DNA, 6000 bp, Homo sapiens
ccaaacttcctcttctgcaaggatcctcctcctggcctcctgaatctcctagatcagctcaaatcctggctcttgcctaaggccttcccccacactgcaaataaaaaacttcttttccggtcggcctgtaatcccagcactttgggaggccgaggcaggcggatcacgaggtcaggagatcgggaccatcctggctaacacggtgaaaccccatctctactaaaaatacaaaaaattagctgggcgtgatggcgggcgcctgtagtcccagctactcgggaggctgaggcaggagaatggcgtgaacctgggaggtggagcttgcagtgagccgagattgtgccactgcactccatcctgggcgacagagcgagactccgtctcaaaaaaaaaaacaaaaaacttcttttccatattctgataatgcttatagtccagttgcgcatttgaaacttaatcagggttggctttgcattttcatttaaatgtgttttccatggttgtaactatcaaggtcacaagggctaagggccacatttctttttatccctttgtcacagatggtactgtggatgtagaagttgcttggtaaaacttgatcaatgactaagtagttgaaaaataaatgaatttggaataattcagggactaagtagattaggatggtataaataacaacggacattttaaaaagtactttaaagtttgtaaaatgttcctcaggtagtctcatttgtacctaacaataacccacagagaaaactaactcagagagggtaagtagcttgctcttgaaacccagatcctcttactccaaagcttgtattattccgtaatagttgacctcaagtatggatgtaagagtaaatctggacactattctctaccattaaacatcttcaccagcagagggcgcaagaagatgcatgggtcttcgagtcaggtttgtatactggcccaccccagctaagaggtagatgagtcggggcaaattatttaattcttctgagcctcgtctgtaaaatatcgatgataatgctctcaccaacaccacagggtggttataaagattagaaatactctgtggctggcatacagtaggtgaacaataaaccatatctcaagatccccaaaagggggtcacagaggcagtttggagattagacattgattcttgtttgatgctttaataaatatttgaaattcgtttcatacttcacacttacagtagacaaaaggttatagaaaatgaaggttataaaaaatgcatactgatggaaactttttggtattttttaatcgatgtatcatggttgtaaatattttggggggatgatagaaacatttcaatacccagcaaaattgtaagaaagcagactgaacaacctttaaggatgaaaaccttaaaaacacgaaatgccatttgccccagcatctatttaacctaagaaaataatattgggtggtagcaagatttagaaaaacaaaggaagtcatcattgctttataagagcaaaagtggaaaccacaaatttattaaatgcacaggtttaaaagtgtacagtctctccatcaaattgaacactatgtagtcattaaaataaaaattcttccatgcagaaaaatattctacatggaaagataatcacaacacagcaggcaaaaatcacaagagacaaaacagcctggctgggcgtagtggctcatgcctgtaatcccagcactttggggggccgagacgggcggatcacgaggtcaggagattgagaccatcctggctaacacggtgaaaccccgtctctactaaaaatacaaaaaaattggcggggcgtggtggcgggcgcctgtagtcccagctactcggggggggctgaggcaggagactggcatgaacccgggaggcggagcttgcagcctgggtcagacagcaggactccgtctcaaaaaaacaaaacaaaacaaaacaaaacaaaacagccgatttcacttttgtttaaaaacacacccaaggccaggtatgacagctcatacgtgtaatcccagtgctttgggaggccaccatgggaggactgcttgaggctggaagttccagaccggcccgggcaacatagtgagacttcatctctacaaaaaaattttttctttttcttttcttttttttttttttttttgagatggtgtcttgctctgtcacccaggctggagtgcagtggcacgatctcggctcactgcaacctccgcctcctgggttcaagccgttctcctgccctcctgcctcagcctccccagtagctgggattacaggcacgtaccaccatgcccagctaatttttgtatttttagtagagacagggtttcaccatgttggccaggctggtctcgaactcctgacctcgtgatctgcctgcctcggcctcctaaagtgctgggattacaggctttagccaccgtgccaggccaaatttttttaaaaaaattagccaggtgtggtgggtgccggtagtcccagctattcgcgaggctgaggcagagagaatcgcttgagctcaggagtctgcagtgagctatgatcacaccagtgcactccagcctgggtgacaggctaaaagaatatatatacatatctctctataaaatatatgaaaatacaaaacagaaatcaaaatttaagttttacgttatttccacagaagatattgttagtgataccccctttttttttgctcctctttgcttatcttatgttctgaaattaacatttatcatttttgaatgatggaaaatatattttacaggagcaccgttggagtctttcacttaacactgcctcccaaccaggccagtggtcatgtaaattaagtcaattgtcataaaagggcttggaagtttcaaggtagttagccaaaataattaaaatcctggtgaaatttcacagagctggccattgagctttgactccactgacatgaggctgctgtaaacagacaccaggctccatgttttcaaaaggcctaaaaacagcacaaaataaaatataacaacgattgttcatgtaaagggccacgtgccatctctgtcctgagcaaatgtaacctgaaaccctctctgtctggcactccgggttggcggcacctctctggacggtgtatttgctctccattactcaatttactttcctgaacttgaaatggagtggaatttcaatgtagagttacccattagctccagggctaaatttaaacctttaattaaattaatccgttgatctgaaacacattgcttctccctcaaaagtgcagcaggtttcttaggtgtcacagagcttaattcagtgtggcaattgttccttactgcatttgttaagttgcccataccgcctggggaaacccgcacacgttttcagatccctccaggtgaactcctccaccctgtccccgcccccgcccccacccccaaccaaaacaagcattcgttgtgggtggggactgcgactcctcccagattcagagctactgctctgggagggccgtcaggaacccgtatttatagaagacatggtaggtgccaaacgtgcttatgagataaacgacagggtaactgtccacattggtcccagtttatgagggagaagagatcataatctacaaaaatttgcaaggtgaccaggggaaaagagtgtaaggtcattttagcccacctgggtcttcacagaaaatggagcacatttcagagccaaagtaaaaaatttgcgttgtcctttgctaagagagagatgaaaagtgacaataccatggattggggatgcgtgagttcgttggccacatgtaagatgttcgtgcttctgggctcttatgcatcccaaggcgtgcatttatcccgggggctgcatccttggcctgggaatgaatagacccaactgcaatggttgttagcgatagctttacggtgggacagtctccataggggctgtggacttacccgtgttattatgaaaaggatctatttacttctcggggaccaacggccttgcggggtccaagtaactcgctcgcagtccaaaactctgcaacgctccacataaccgtcctgtagacccacaactctcccaggagcacagccccaggacctaacccaccgggttctgctcgctcacccaattcccagtgcgagcgcgcgggggaaacgtgctcgcctcccgcacctggcttccgcggccccgggagtcgccaactctcccagcaggcagctccgacaacccggacagccgggccgatcccccgccccaccacccgctcggctctcgcgtcctcctcttcctcctcccgtggccccttgcctcccgccgtctgcctctgcggccgccgcctgcggctttgttttcctcccaggtcgcattccccacacgtgattccgtgttattgcaaagagggctttggagcgcgagcgcggggcgcgcgcacctataaatacggacacccggccccggagcccgcgagccagcggccaggcgaccggcgggcggccagccagcgagccgaactagccgagctaggtagcgaggcgtgcgcgtgggccggggcggcggcgcccccatccccagcaccgaggggcgagcatggcccgcccgcgggggggctggaccgccgcgcacgccgcccgatccccgcgccctacccagcccgggtcgccgccgctcgcgcccgccgcttagcgctcgggcgccgctcgcttctccgggcatcgcggaaatcccgccgcagacggacacaatggcggcggcggcggcggccgccaccacggccgcctgcagcagcggcagcgccggcaccgacgccgcgggcgccagcggattgcagcagccgccgccgcagccccagcctcagcccgcggccgccgcgccggcccagccgccgcccgaacccccccggaagccgcgcatggacccgcggcgccgccaggctgccctctccttcctcaccaacatctcgctggacggccggctgccgccgcaggacgcggagtggggcggtggcgaggagggcggcgcggccaagccgggcgccggcggcgcctgcggcgcgaggactcggttcagcttgctcgccgctgccgagcggggcggctgcatcgcgctcgccgcgccgggcacgccggctgcggggttagccgctgggtccggcccctgcctcccacagccctcgtcgctgccgcccttgattcctggcggccatgcgaccgtgtccggccccggggtggcgcgggggttcgcgagtcccctgggcgccggccgggcgtcgggggagcagtggcagccgccccggccggcgcctctcgccgcctgtgcccaactgcagctgctcgacgggtccggggccgccgggcaggaggagttggaggaggacgatgcctttatcagcgtgcaggtgccggcggccgcctttttgggctccgggacccccgggagtgggagcggcagtcggggacgcctcaactcgttcactcagggaatcctgcccatcgccttctccaggccgacttcgcagaactactgctccctggagcagccaggccagggcggcagcaccagcgccttcgagcagctgcagaggtcccggtgagtatccgggatgcgacgcgcacccaaccctgcgtcccgcccggcgctcccagcctccccgcggtctctgggctacgggacacgggttgctcccattttcccgcgccctgccggatcctgtgctccgggcccgaatcccaaaccacgagggcacccaaaagagggggcgtccccagggagtgcggggttacacgtgtttgcacgagcccagcattcgcagaggagcaccgcgcttgtgcagtgggtcgggaattgggagttgcaggagcccagtagaaagcggcgtccgagcctccccacacgagatcacaaacttcctgaaacccggtccagacccggaggcgcactcttccccgcgtggggcgagactcggccgggcgcag

SEQ ID NO: 1992 - DNA, 6000 bp, Homo sapiens
gcgagactccgtctcaaaaaaaaaaacaaaaaacttcttttccatattctgataatgcttatagtccagttgcgcatttgaaacttaatcagggttggctttgcattttcatttaaatgtgttttccatggttgtaactatcaaggtcacaagggctaagggccacatttctttttatccctttgtcacagatggtactgtggatgtagaagttgcttggtaaaacttgatcaatgactaagtagttgaaaaataaatgaatttggaataattcagggactaagtagattaggatggtataaataacaacggacattttaaaaagtactttaaagtttgtaaaatgttcctcaggtagtctcatttgtacctaacaataacccacagagaaaactaactcagagagggtaagtagcttgctcttgaaacccagatcctcttactccaaagcttgtattattccgtaatagttgacctcaagtatggatgtaagagtaaatctggacactattctctaccattaaacatcttcaccagcagagggcgcaagaagatgcatgggtcttcgagtcaggtttgtatactggcccaccccagctaagaggtagatgagtcggggcaaattatttaattcttctgagcctcgtctgtaaaatatcgatgataatgctctcaccaacaccacagggtggttataaagattagaaatactctgtggctggcatacagtaggtgaacaataaaccatatctcaagatccccaaaagggggtcacagaggcagtttggagattagacattgattcttgtttgatgctttaataaatatttgaaattcgtttcatacttcacacttacagtagacaaaaggttatagaaaatgaaggttataaaaaatgcatactgatggaaactttttggtattttttaatcgatgtatcatggttgtaaatattttggggggatgatagaaacatttcaatacccagcaaaattgtaagaaagcagactgaacaacctttaaggatgaaaaccttaaaaacacgaaatgccatttgccccagcatctatttaacctaagaaaataatattgggtggtagcaagatttagaaaaacaaaggaagtcatcattgctttataagagcaaaagtggaaaccacaaatttattaaatgcacaggtttaaaagtgtacagtctctccatcaaattgaacactatgtagtcattaaaataaaaattcttccatgcagaaaaatattctacatggaaagataatcacaacacagcaggcaaaaatcacaagagacaaaacagcctggctgggcgtagtggctcatgcctgtaatcccagcactttggggggccgagacgggcggatcacgaggtcaggagattgagaccatcctggctaacacggtgaaaccccgtctctactaaaaatacaaaaaaattggcggggcgtggtggcgggcgcctgtagtcccagctactcggggggggctgaggcaggagactggcatgaacccgggaggcggagcttgcagcctgggtcagacagcaggactccgtctcaaaaaaacaaaacaaaacaaaacaaaacaaaacagccgatttcacttttgtttaaaaacacacccaaggccaggtatgacagctcatacgtgtaatcccagtgctttgggaggccaccatgggaggactgcttgaggctggaagttccagaccggcccgggcaacatagtgagacttcatctctacaaaaaaattttttctttttcttttcttttttttttttttttttgagatggtgtcttgctctgtcacccaggctggagtgcagtggcacgatctcggctcactgcaacctccgcctcctgggttcaagccgttctcctgccctcctgcctcagcctccccagtagctgggattacaggcacgtaccaccatgcccagctaatttttgtatttttagtagagacagggtttcaccatgttggccaggctggtctcgaactcctgacctcgtgatctgcctgcctcggcctcctaaagtgctgggattacaggctttagccaccgtgccaggccaaatttttttaaaaaaattagccaggtgtggtgggtgccggtagtcccagctattcgcgaggctgaggcagagagaatcgcttgagctcaggagtctgcagtgagctatgatcacaccagtgcactccagcctgggtgacaggctaaaagaatatatatacatatctctctataaaatatatgaaaatacaaaacagaaatcaaaatttaagttttacgttatttccacagaagatattgttagtgataccccctttttttttgctcctctttgcttatcttatgttctgaaattaacatttatcatttttgaatgatggaaaatatattttacaggagcaccgttggagtctttcacttaacactgcctcccaaccaggccagtggtcatgtaaattaagtcaattgtcataaaagggcttggaagtttcaaggtagttagccaaaataattaaaatcctggtgaaatttcacagagctggccattgagctttgactccactgacatgaggctgctgtaaacagacaccaggctccatgttttcaaaaggcctaaaaacagcacaaaataaaatataacaacgattgttcatgtaaagggccacgtgccatctctgtcctgagcaaatgtaacctgaaaccctctctgtctggcactccgggttggcggcacctctctggacggtgtatttgctctccattactcaatttactttcctgaacttgaaatggagtggaatttcaatgtagagttacccattagctccagggctaaatttaaacctttaattaaattaatccgttgatctgaaacacattgcttctccctcaaaagtgcagcaggtttcttaggtgtcacagagcttaattcagtgtggcaattgttccttactgcatttgttaagttgcccataccgcctggggaaacccgcacacgttttcagatccctccaggtgaactcctccaccctgtccccgcccccgcccccacccccaaccaaaacaagcattcgttgtgggtggggactgcgactcctcccagattcagagctactgctctgggagggccgtcaggaacccgtatttatagaagacatggtaggtgccaaacgtgcttatgagataaacgacagggtaactgtccacattggtcccagtttatgagggagaagagatcataatctacaaaaatttgcaaggtgaccaggggaaaagagtgtaaggtcattttagcccacctgggtcttcacagaaaatggagcacatttcagagccaaagtaaaaaatttgcgttgtcctttgctaagagagagatgaaaagtgacaataccatggattggggatgcgtgagttcgttggccacatgtaagatgttcgtgcttctgggctcttatgcatcccaaggcgtgcatttatcccgggggctgcatccttggcctgggaatgaatagacccaactgcaatggttgttagcgatagctttacggtgggacagtctccataggggctgtggacttacccgtgttattatgaaaaggatctatttacttctcggggaccaacggccttgcggggtccaagtaactcgctcgcagtccaaaactctgcaacgctccacataaccgtcctgtagacccacaactctcccaggagcacagccccaggacctaacccaccgggttctgctcgctcacccaattcccagtgcgagcgcgcgggggaaacgtgctcgcctcccgcacctggcttccgcggccccgggagtcgccaactctcccagcaggcagctccgacaacccggacagccgggccgatcccccgccccaccacccgctcggctctcgcgtcctcctcttcctcctcccgtggccccttgcctcccgccgtctgcctctgcggccgccgcctgcggctttgttttcctcccaggtcgcattccccacacgtgattccgtgttattgcaaagagggctttggagcgcgagcgcggggcgcgcgcacctataaatacggacacccggccccggagcccgcgagccagcggccaggcgaccggcgggcggccagccagcgagccgaactagccgagctaggtagcgaggcgtgcgcgtgggccggggcggcggcgcccccatccccagcaccgaggggcgagcatggcccgcccgcgggggggctggaccgccgcgcacgccgcccgatccccgcgccctacccagcccgggtcgccgccgctcgcgcccgccgcttagcgctcgggcgccgctcgcttctccgggcatcgcggaaatcccgccgcagacggacacaatggcggcggcggcggcggccgccaccacggccgcctgcagcagcggcagcgccggcaccgacgccgcgggcgccagcggattgcagcagccgccgccgcagccccagcctcagcccgcggccgccgcgccggcccagccgccgcccgaacccccccggaagccgcgcatggacccgcggcgccgccaggctgccctctccttcctcaccaacatctcgctggacggccggctgccgccgcaggacgcggagtggggcggtggcgaggagggcggcgcggccaagccgggcgccggcggcgcctgcggcgcgaggactcggttcagcttgctcgccgctgccgagcggggcggctgcatcgcgctcgccgcgccgggcacgccggctgcggggttagccgctgggtccggcccctgcctcccacagccctcgtcgctgccgcccttgattcctggcggccatgcgaccgtgtccggccccggggtggcgcgggggttcgcgagtcccctgggcgccggccgggcgtcgggggagcagtggcagccgccccggccggcgcctctcgccgcctgtgcccaactgcagctgctcgacgggtccggggccgccgggcaggaggagttggaggaggacgatgcctttatcagcgtgcaggtgccggcggccgcctttttgggctccgggacccccgggagtgggagcggcagtcggggacgcctcaactcgttcactcagggaatcctgcccatcgccttctccaggccgacttcgcagaactactgctccctggagcagccaggccagggcggcagcaccagcgccttcgagcagctgcagaggtcccggtgagtatccgggatgcgacgcgcacccaaccctgcgtcccgcccggcgctcccagcctccccgcggtctctgggctacgggacacgggttgctcccattttcccgcgccctgccggatcctgtgctccgggcccgaatcccaaaccacgagggcacccaaaagagggggcgtccccagggagtgcggggttacacgtgtttgcacgagcccagcattcgcagaggagcaccgcgcttgtgcagtgggtcgggaattgggagttgcaggagcccagtagaaagcggcgtccgagcctccccacacgagatcacaaacttcctgaaacccggtccagacccggaggcgcactcttccccgcgtggggcgagactcggccgggcgcagagtggagcagtgcaggccggcagctgagcggcgcgtgtgagcctgaacttgtagcagacacgcgtgaccctccggagaagttcttgcctgcgctccaagtcttcttgcggcccggggaaacttggctttttccatttgctttcctgagcaatggaaagtccttcttacattgcctccaactaggcctaggggggtggggaacaaagaggaaatagggcttgagggatttttttcctattccaagatgaatttgcttgagttcgttaaacgcttgttttacttgtttgttagctgaagttatctggcggcattaggcgtcttagcaaaaacatgaaacgctggacgtttgcttattgttcaggaaataga

SEQ ID NO: 1993 - DNA, 6000 bp, Homo sapiens
gccgtgtgttctagggtcctgagatgccgatgcacttgatctgttgcaggaagaaggccagggtggttggagcatagtgaactcggggagccaagggggctgacctgagaatcgggcggatgcctcataacgctaagagctctcattgtctttattagaagccgctggggagcacagtgccctggcctacgtttttttttttttttttttgagaggcagagtctcgctctgttgcccaggctggagtgcagtggcgcgatctcggctcactgcaagctctgcctcctgggttcacgcccttctcctgcctcagcctcccgagtagctgggactacaggcacccgccaccacgcccggctaatttttgtattttttagtagagacggggtttcactgtgttaggcaggatggtctcgatctcttgacctcatgatccgcctgcctcggcctcccaaagtgctgggattacatgcgtgagccactgtgccgggcctccctggcctacgttttaaggtcccgctaactgccatggattgaaggaggacagacatggatgtgagacctctggcagcctcttgcctttaggcgagagcttcctgctgagacacacagtagcctggacagaggtagagatggtgaagggtgggtggatggcaggtgcgtcttggaggtagagctgatagaacttgtagggaacttgaatgttccctgccattggtggagcttttgtctaattggagagaagctcttgagtaatccaccgacagatggaagactgcaggcctggggtgagtcacagagcggggacagccttgatcctgttggcctgtgataagtgatggtggattggactgcactgtggcaggttgaggaaggcttgcttcgggaggtgactgctgaactaaggtctaagagtggacaggtatcaaggacttgacaagggctagaaggattggggcagacaggaagagcagctggtgcagaccagggccagaagggctcatgcaggcaggaggagcagcgggtttgaagaaacgagagtgctgatgctgtgggccaggcaggacatgggggccacttgcaccacagtggtagcgaagcgggtggagagaagtgaacggactcaacagagatgaaaggcacaatggagatggattagatacggagcagggggagtggaaggcattgaggagactccggggtttcaggcctatggactgattgggtagcagtgccatctctgagacaggagtattagcttgatccagtgttatgagtttaaaaatgctaccaagctaggcatggtggcctgtgtctataatcttagctatctggaggctgaggtgggagaattgcctgagcccaggagtccagcctgggcaacatagtgaaaccctgtctttaaaaaaaattaatgaatgagctaaaatgctacttggcagaaaaattgtgtaactaaagatgaccctatttcttctcattgcctatttctccccctaatccttgccgttactgtcctaatggcttgaggtaatatatctgtagggtcttaagtaacttgttgattgaatatttacgtatggagattttcctttttctcccaaggtggagaatgatatttatggttagataccatctcaagtttataatcgtttggtctaattttttttttttttttttgagacggtctcactctatttcccaggctagagtgcagtggcaagatctcggctcactgcaacctctgcctcctgggttcaggcgattcttatgcctcagcctcccgagtagctgggattacaggcacctgccatcatgcccggctaatttttgtatttttggtagagatggggtttcaccatgttggccaggatggtctcaaacccctgacctcaagtgatccgcctggctcggcctcccaaagtgctgggattataggctcgagccaccatgccaggccttggtctaaaatttttttattttttatcttttttgagacagagtttcgctcttgttgcccaggctggagtgcaatggcgtgatcttggctcactacaacctccacctcccgggttcaaatgactctcctgcctcagcctcccgagtagctgggattacaggcgcccaccaccacgccctgctgttttttgtatttttagtagagacagggtttcaccatgttggccaggctggttttgaactcctgaccttgtgatccgcctaccttggcctcctgaagtgctgggattacaggcgtgagccactacgcctggctggtctaaaatttttaatgttacttttttttttccctcccaggctggagtgtagcggcataaccttggctcactgcagcctcgacctcctggactcaagcaatcctcccacctcagccacccaaatagctgggcctacgggcatgcactaccacacctggctaatttttatattttttttgtagagatgagatttcaccatctttcccaggctgatctcaaactcctgggctcaagccatctgcctgcctcagcctcccaatgtgctaggattacaggcatgtgccactatgaccagcaatattaccttttaagattaattttgaacacaacaatttaaaaaaaataggctggggctgggtgcagtggctcatgcctgtaatcccggcactttgggaggctgaggcagacagatcacttgaggtcagaagtgctagaccaggctgaccaacatggtgaaaccctgtctctactagaaatataaatagtaaccaggcgtggtgacacatacctgtaatcccagctactcgggaggctgaggcaggagaatcgcttgaacccgggaggtggaggttgcagtgagcagagatcgcaccactgcactccagcctgggcaacagagcaagactccatctcaaaaaacaaaaaataggccaggcaccatggctgatgcctgtagtcccaacactttgagaggctgaggcgggcagatcacttgagactaggagtttgagaccagcctggccaacatggcaaaaccccatctctactaaaaatataaaaattagctgagtgtgatagcacacacctgtaatctcagccacctaggacgcggaagcacaagaattgcttgtaaccaggaggcagaggttccagtgacccgaagtcacaccacccactccagcctgggtgacagaacaagactgtctcaaaaaaaaattgtagaaatgtcccaaatcagatttcatttattcaatttcagttgaacacatatagtcttctaattaaaaaaaaaatctagagcaagatcattagctttttcaaacaatttctagttcaacttgcacatgtttgtatctgattgccaagtgctgaagtctgagtgatctcacatgtgaagaagatgccttctggaaacctcataatcatgtgccgcggtaactaaacaagcacccggtgtgctgtccatttgttcttgctcggcaagtcaaattaaggctgaggtgcagtctccacatacagcagcagttatgtctttctcccattttattggtggtttttcataatagcgtgcctgtttaacttgatcatctaccgagccatagggaaattgcacatcccacatctgccgattccttaatcttcttgagcctttgttatcatctgtaaagagggggagacgatatttaacaatcgggtgcctcgtagtgtgactgcgaagagcaaatctgagatctctgtaaggcacttacagtacctagaacatagttctcagtaaatatctaatgggactcttgtatcccatatactctgttggtgccgtacagattttgtaggggctgatgtcaccatgtcagcaagggatttgaactttagagaattgagttttctcaccaagtcatgtagagcagggatcccttctaacggaagcccatcctctcccactctgctctcttgccttttgacacgtgtgacattttatctaaacaaattttgtgaccttcctgaacaaaacaggttgttttaggatgggccagtgtttctggacacctgtactgttcaacacttgcactgtctaagaacatacgctgatattcatgtcatttacccatccagcccctgttggtgggaagctgctatgtgtgtacagaatgactaaaccagacttttttatttgaccctgtttgctacaaacgtaattgaataattggggcctggcagatcggaagcaataggaacaatatatttcaatccagtactctgtgagcagcagcatttcacagagccagaaataatttagcctgtagagcttattaagaagtgcaatgttcgttatgcgtaacttcagttctgttagagccaagaaaataaaagtcaaggctgaaatataaggaaatgaataagatacatggaggctggtgagatctggaataaaaaaaatatttacataggagttcagctttgattttatattgtcacaaattggtaccagatgcctgcatttcagacagactcctgagctgatcccagagtgtgagttgggaaacaaatcactttgccatttggaaggctgattgatattttaggagtttctttttgttttcaaagggaaaataatgcatattatagacctagcaaacagaacttttgtaaatggcaattaacagaagatgcccaagtgaggaagtctccagtttctttttataaccctggcaaaagtaatggaggtgacattttattagcattggcatctcccgcttacaatgggagctagttcagccttgttgagccgtgtccagagctggtagcttcatttccattttccttcaacctcagggagaaacacaagggtatttctgtctggggcggcaggacctcatgtggtctccacgtggcaggatcctagaatcacggggtggcagtacatattttcccctatggctttaagaaaatggcttttcattttgagtcttaggtttggtctcaacagtgcttgcttagcctccaggccatttttcttcctggtgtttgaatgactcataaaatgagtttggagtggtctgaagcctctgcctccttccttgaatgctttctaagaggggctgccatgcaagaatatatgctgattttcccatgtaagttgtcagaggatcgcctgggtgacccagagagctgagtctgtttttttggctcccccctttggatgctgacggtctttgttggaaattgatctctgaggctcagcctggaaaagcgggatgtcagtcctgatgtgggccagcagcgggggctggagggtggtgtgaatggcatgaggtcatctggaacagagggggggctccatggagggtcctccagcccccaagaccagccttggtatttcctacaggggctgggccataggctctcacatggataagaaggaacctcggaggccctgggaggtgagcctgccgtgtgcttctgagctccatagaccttggatggagggacgagagcccttgtctctgttctctgggttgatgctggccaaaggctgcttggctgtgaaagggagggagacctggaggcccagcgggcaccaagattgtgtgtttcctgtttcgcttcaggaccctggacgtcagtgcctgtgctttgtcctcctatagtagctgcctctactcggagggagtgaattttcattatacaacttttagctaatatagtcaaatctcattacccccagtagtttgttttataaagttgctgcaagcactgaattaggaaatactgatccattgctccggaggcaaatacatgggtagctatgttcctgtgagcctctggtcacacgtttccgtcatctgatcaatgtataccttgtcctaggtgcatttccatttaaagacacctaatttaatatatattattgactcttcattgacagcggcattgtaacacattcctgaataaggcttcttgaacatgttttttctctgtaaggcacactgcagcctgcttctgc

SEQ ID NO: 1994 - DNA, 6000 bp, Homo sapiens
cattacaatatcctagatctgcatagcacttcagagcttacagcatccatcagtcctttatctcttttaagcacatgaagtgttgggagatgcaggaagcaagtttagttgacataatctctgccctttggagaaagaaacccaaaacttattgaaaagcatgattttatttttctcacattgatatcagtgttttttccctttgtttatgaactgaattttactcacaaagctttatttcaacattcccacgaacatgacaagtaaattatttggtaacgcataagcagataatcatgggaaaaacataggacaatttgataccactaaaatatttcatttatacacataccttcactcctcaaggagagaatgaccaacaatgtcatcaaaattagcaaatttatttgtgttaatgtaaccttacttacctaatggttggtgtgttccctagggtatcatacagatgatctttcctgaatgctgtgtcacagaagagtttggatgatcaaactgcactctaacctggagtagactaaccttggctaaatcataagataaccctggcaggcagagagagagaatttgtcacctttaagtgtttttctacataatattgtataatgataacaacaacattaatgtttcccaaagactctacatgtaacagagtaccttccttgaactggtaacctgttgcttatcctctactatagctagactattttcagtctagctttatccctaaccctcctatgcgaaatggatccctgtggcaggcattactcagaatcaccaagattcctagaaagtacgatctagaatcttggtgattcctagaaacataaacatagcccttaaagttaggcaatgaccatgtgactttccttgacaagagaaatgtgagaagtgacctgtatcacttctggatgaaagcacttgaggtttggtgtgcagttctccacatccttcctctgccatggtgctcatggaaatgtcacaggaatgaaggtggctagaacaatgagtcactgtgatagcagcactggaaattttgcatgagaaggaaatttacttttgttgtattaagccactgatattttgatggcatttgttacagcagcataatttagcctaccctgactgatacaatctctcactagctcagtcaccatttatgtagcatcccacaactgcatatgtgactgttacaccagtaggtagtatatacatatacatgagttgactccagtcactgttgagagcaatgtctcaaataaatacctaggagcagcaggaaggtagttgggataaatcacactgggttccacaccattgccaggtccctggattagcactgagggctccccactgcaaataaccatcttgatttatcaccaaggaggtatcagttttatgggaggagaaaggggtttaatttagaacacactaaaatctagtgggtagccacattgacaaatggaatagaatagagaacacagaaataaagcaacatatttatagccaactgatctttgaaaaagctgacaagaacttacactgggaaaggtcaccctcttaaattaatggtgctgagaaaattggatagccacatgcagaagagtgaaactggaccccctatctctcaacatatacaaaaataaactaaaaatggattaaaaacttaaaggtaagacaccaaattacaaaaatactagaagaaaattagggaaaactctcctagacattggtctaggtaaagaatttataactaagacctcaataacacagacaacagaaacaaaaatagacaaatgtaatttaattaagctaaaaaatttctgcacagcaaaagaaataacaaaatgaaaagacaacctgttgaatgagagaaaatatttgccaaatattcatataacggggactaatatctagaatacataaggaactcaaacaactcaacaggaaaaaacaacccattaaaaagtgggcaaaggacatcagtagacctttctcaaaagaagactacaaataaccaacaggcttatggaaaaaatgtccaacattattaataatcaaagaaactcatatcaaaaccacaatgagatatcatccatcataccccagccagaatggctattattaaagagacaaaaaaataacaaatgttggctgggatgtgcagaagagaactctttaatacactgttagtgggaatataaagttgtatagccactgtataaaacagcatggcaatttctcaagaaaactataaataggattaccatctgatccagcaatcctgctattgggcatctacccaaaggaaaatacatcaatatatcagagatacctgaactgccatgtttattgcagcactattcacaatttcaaagatagggaatcaacataagtatctatcaacagatgaaaagataaagaaaatgtagtgtatatacagaatggaatatgattcatccctaaaaaagaatgaaattgtgttatttgcagcaaatggatgaaactggagattatcataagtgaaataagccaggcacaaaatgatgtagtatgttctcacatattgtgggagctaagaaatctgaacacatggaagtagagagtggaaatacagacaaagaaactgagtagtgtgagtgtagtgagggggaggaggatgaagagaaggaggttaaagtgtacaaacatagagtaagagagaaagagtaaatttaatgtgtgatagggaataagatgactatgcttaaaaatatatatacatattatactcaggtgatggacactgtaaataccctgacttggtcactatccattatatacctgggaaaatctttcgggtaccccatacatttacacaaataaaaatatagttcaagtggaaaaataaataaaattttaaaagctcgtgaaaatggaaattcctagcaactaagggaaaggcagaaataaggcttgcaaatgggttaagaatgtgggtacggattcagaagtaatccgctcacacttgaaagatgaacataagacacacataaaatttctaaagaaaatggcatagtgggaaaaaaggcaagaaattagtctgaggaaacactcatatttggaggacagagagagaaggagaagtaaggaaggaagatatgagaactatgatgacaacagccattcattttgagagctaagaataccatatcttcattaataaattcatttaaatttaaatttcaaggtttttaactgaggataaaaaatgtactaaaccttaacaatccatgtactgtctcagatattaaaatagattacccatgtgacaagcagctggacattatctgtaatagaaagcaaaatgattttttaattcaatgtctcagaactaatttatcatgatttaaaggagaagcagaactttttgaacacatacgatctgttccacattagagtcatttatttattcatcaaacttatcctatacatctggcacatgctaggcactacagggcacagtccttgttcttgggcaggctacctcacccttgtgcccatttcacacattgctccccctgcagccatgctgcacttggtgccagctttccccctgcaaggatgacctctacagtgacttagctagcattttctgaaccctaggtatgtgtgccaggcactacactaagtgccttatatggactttctcacttaatcttcaagacaaccctatgaggtggaaattagtatcatccctattttacagtatgtgaggcttaaatgttgagaaacttgcctaagatcatatagcttgcaagtggtgtagtcaggactcaaaataggctggctaatgccaaagcggcgatcaacacctctctactgaaagtgtggtcctcaaactagcagcaatgccattaactgggagtttgctagaaatgcagaatctcaggcctaactctcgacacgctcaaatttggcttcaacaatatccccaggtgatccctcttaaactttgagaagcactgtgctaaatcactccactacgaagacttggctttaacgaacgctgggggagacatggacaatctttcccctgagtagcaatgtgtagggcacaggagggaaggtatataatgcgttttccaagggctaacagaaggattcagacaaatccttgctgtttcaaacactagagatcactgcgatcagcaccggtcgggaccacttccaaaagcagcagatcttgagctgggtcttgaagccagaacattttctcatttcattaaaaatagctgctgttccaaatggacaagcgcccacatcagtagacttctggagttcgcttctccagcctgcactccattttccaaatagaacccaaatatcaacagcatcaacaagcagatttgaaaccccccaaaaacacgctattattaaattgttaattgtattagaattgcctagtttaattagtaatattcatgacaaaactagtttgccccttatcatcaatcgtgctccaggtaggagtacaaacactgggtgtaaaaagcagatgcaccccagttggtgtgcaagcccccgtttgcaggtaattaattcacagtgtggcggcgccttttcaagccccctctgcaagccgcgccggcctcctccctctcgagcggggtcaaaccacttagtttatttcacccgctggcactttcttccctgtcacgaattcagcctggcttcctttggcctgagacagcgtcttcaggcgggtcggctcggacctgcccagtggggcgcccacctgcacccgcacccgcacccgcacccgcgggaaggggcggcgctggccggactctctcgggtggactcccggagcggcggcggcggcggcggtggcagactgcgagtcacgtgcgacagaggaggcggagcacggcggccgggtgggtggagaaaacaaagcccccagctgtcagcagaggaaggaggcgacagcgccggagcaggtgagtcaagtgcatttaaagcggtaccgccctggcgcaccccgacaccccctgcactgaagcagtccctcccaggccaggggctggctgcgcctcctcctgccgctgaggtctgcagcccgcggggctcggagcaaccggaaccgggggtccagagtctagcaagaagttgtgcaagggtcggctaggcggtctccgggtgtgcaccccgccgctctcccgcgggccacatctctggttcggtgccccagctctgtgcaccccaggaaagtggagggagggagttggggctgccacgctggcagaagcgaagtggactggttctgaggggtgaggctggggctgtccagggtaggaacacggcgttggtgaaggaggggggctcgcgactgcgcgaccgcggcgcacgaccctccaggctctagctggggcgccggcactgagagagctgggggctctggcaggggctgcgcgcttgggggcagatcaggaagtgcagcgcgctggcgctcgcgcgcttgggagcatcccctggaccccgggcacttccccttcggcagccaccactctcccactccgacgccggccaccatccgcgctcccgggactcaggagccgggtgggtgcaaaaggaagcgggttgttattctgcgcccaagcatctcttctgcagggagccccgggagcgcagggcgagggctactcagcgacttcgcactcggcttagtgggaaattcttcggtctacccttagaagggctatgcggaagccagaaatcccacaaagagccaggagaggggtggacgcggaaagcggtcccctctgaacctggggcgctcgataaagctgattttcagaccccaaaagggctagtgggtttggtcactcctccagtgacttcgtcaatacagtgccaagggcagagccgtaacctcggagaaggggcgctgcagccatttgatcaggagaagcctttgtcttaacccccaagcccctcctg

SEQ ID NO: 1995 - DNA, 6000 bp, Homo sapiens
ggattagcactgagggctccccactgcaaataaccatcttgatttatcaccaaggaggtatcagttttatgggaggagaaaggggtttaatttagaacacactaaaatctagtgggtagccacattgacaaatggaatagaatagagaacacagaaataaagcaacatatttatagccaactgatctttgaaaaagctgacaagaacttacactgggaaaggtcaccctcttaaattaatggtgctgagaaaattggatagccacatgcagaagagtgaaactggaccccctatctctcaacatatacaaaaataaactaaaaatggattaaaaacttaaaggtaagacaccaaattacaaaaatactagaagaaaattagggaaaactctcctagacattggtctaggtaaagaatttataactaagacctcaataacacagacaacagaaacaaaaatagacaaatgtaatttaattaagctaaaaaatttctgcacagcaaaagaaataacaaaatgaaaagacaacctgttgaatgagagaaaatatttgccaaatattcatataacggggactaatatctagaatacataaggaactcaaacaactcaacaggaaaaaacaacccattaaaaagtgggcaaaggacatcagtagacctttctcaaaagaagactacaaataaccaacaggcttatggaaaaaatgtccaacattattaataatcaaagaaactcatatcaaaaccacaatgagatatcatccatcataccccagccagaatggctattattaaagagacaaaaaaataacaaatgttggctgggatgtgcagaagagaactctttaatacactgttagtgggaatataaagttgtatagccactgtataaaacagcatggcaatttctcaagaaaactataaataggattaccatctgatccagcaatcctgctattgggcatctacccaaaggaaaatacatcaatatatcagagatacctgaactgccatgtttattgcagcactattcacaatttcaaagatagggaatcaacataagtatctatcaacagatgaaaagataaagaaaatgtagtgtatatacagaatggaatatgattcatccctaaaaaagaatgaaattgtgttatttgcagcaaatggatgaaactggagattatcataagtgaaataagccaggcacaaaatgatgtagtatgttctcacatattgtgggagctaagaaatctgaacacatggaagtagagagtggaaatacagacaaagaaactgagtagtgtgagtgtagtgagggggaggaggatgaagagaaggaggttaaagtgtacaaacatagagtaagagagaaagagtaaatttaatgtgtgatagggaataagatgactatgcttaaaaatatatatacatattatactcaggtgatggacactgtaaataccctgacttggtcactatccattatatacctgggaaaatctttcgggtaccccatacatttacacaaataaaaatatagttcaagtggaaaaataaataaaattttaaaagctcgtgaaaatggaaattcctagcaactaagggaaaggcagaaataaggcttgcaaatgggttaagaatgtgggtacggattcagaagtaatccgctcacacttgaaagatgaacataagacacacataaaatttctaaagaaaatggcatagtgggaaaaaaggcaagaaattagtctgaggaaacactcatatttggaggacagagagagaaggagaagtaaggaaggaagatatgagaactatgatgacaacagccattcattttgagagctaagaataccatatcttcattaataaattcatttaaatttaaatttcaaggtttttaactgaggataaaaaatgtactaaaccttaacaatccatgtactgtctcagatattaaaatagattacccatgtgacaagcagctggacattatctgtaatagaaagcaaaatgattttttaattcaatgtctcagaactaatttatcatgatttaaaggagaagcagaactttttgaacacatacgatctgttccacattagagtcatttatttattcatcaaacttatcctatacatctggcacatgctaggcactacagggcacagtccttgttcttgggcaggctacctcacccttgtgcccatttcacacattgctccccctgcagccatgctgcacttggtgccagctttccccctgcaaggatgacctctacagtgacttagctagcattttctgaaccctaggtatgtgtgccaggcactacactaagtgccttatatggactttctcacttaatcttcaagacaaccctatgaggtggaaattagtatcatccctattttacagtatgtgaggcttaaatgttgagaaacttgcctaagatcatatagcttgcaagtggtgtagtcaggactcaaaataggctggctaatgccaaagcggcgatcaacacctctctactgaaagtgtggtcctcaaactagcagcaatgccattaactgggagtttgctagaaatgcagaatctcaggcctaactctcgacacgctcaaatttggcttcaacaatatccccaggtgatccctcttaaactttgagaagcactgtgctaaatcactccactacgaagacttggctttaacgaacgctgggggagacatggacaatctttcccctgagtagcaatgtgtagggcacaggagggaaggtatataatgcgttttccaagggctaacagaaggattcagacaaatccttgctgtttcaaacactagagatcactgcgatcagcaccggtcgggaccacttccaaaagcagcagatcttgagctgggtcttgaagccagaacattttctcatttcattaaaaatagctgctgttccaaatggacaagcgcccacatcagtagacttctggagttcgcttctccagcctgcactccattttccaaatagaacccaaatatcaacagcatcaacaagcagatttgaaaccccccaaaaacacgctattattaaattgttaattgtattagaattgcctagtttaattagtaatattcatgacaaaactagtttgccccttatcatcaatcgtgctccaggtaggagtacaaacactgggtgtaaaaagcagatgcaccccagttggtgtgcaagcccccgtttgcaggtaattaattcacagtgtggcggcgccttttcaagccccctctgcaagccgcgccggcctcctccctctcgagcggggtcaaaccacttagtttatttcacccgctggcactttcttccctgtcacgaattcagcctggcttcctttggcctgagacagcgtcttcaggcgggtcggctcggacctgcccagtggggcgcccacctgcacccgcacccgcacccgcacccgcgggaaggggcggcgctggccggactctctcgggtggactcccggagcggcggcggcggcggcggtggcagactgcgagtcacgtgcgacagaggaggcggagcacggcggccgggtgggtggagaaaacaaagcccccagctgtcagcagaggaaggaggcgacagcgccggagcaggtgagtcaagtgcatttaaagcggtaccgccctggcgcaccccgacaccccctgcactgaagcagtccctcccaggccaggggctggctgcgcctcctcctgccgctgaggtctgcagcccgcggggctcggagcaaccggaaccgggggtccagagtctagcaagaagttgtgcaagggtcggctaggcggtctccgggtgtgcaccccgccgctctcccgcgggccacatctctggttcggtgccccagctctgtgcaccccaggaaagtggagggagggagttggggctgccacgctggcagaagcgaagtggactggttctgaggggtgaggctggggctgtccagggtaggaacacggcgttggtgaaggaggggggctcgcgactgcgcgaccgcggcgcacgaccctccaggctctagctggggcgccggcactgagagagctgggggctctggcaggggctgcgcgcttgggggcagatcaggaagtgcagcgcgctggcgctcgcgcgcttgggagcatcccctggaccccgggcacttccccttcggcagccaccactctcccactccgacgccggccaccatccgcgctcccgggactcaggagccgggtgggtgcaaaaggaagcgggttgttattctgcgcccaagcatctcttctgcagggagccccgggagcgcagggcgagggctactcagcgacttcgcactcggcttagtgggaaattcttcggtctacccttagaagggctatgcggaagccagaaatcccacaaagagccaggagaggggtggacgcggaaagcggtcccctctgaacctggggcgctcgataaagctgattttcagaccccaaaagggctagtgggtttggtcactcctccagtgacttcgtcaatacagtgccaagggcagagccgtaacctcggagaaggggcgctgcagccatttgatcaggagaagcctttgtcttaacccccaagcccctcctgctagtcctcgctgggtcagtagcgctgggagtaattaatattacgaacattagcctttccttcacctccgcaccagccaacactgctgtcccctccctgattgtcttctctatcacttgttcacatctccttttccaaaaaaagaagaacaaaaggaaaatagtgtagacccgctaggcaggaagaggtcactaaaaatactatcgtgctgtcaatgtagaatgaagggttaagcgctcaaacccgcgcccgcgcgcaccgaaacggaagaacttccttgattagcatagtatcgaccctggggccgcgctgcgaggcggaggttcggtcccagctggggtgaagtgtgcagaccggttgcgattgtggtcagacgcagcacctacttctaatctgaggacccgcgatttacacttttgctgaataggacactgtggaatgaaacagaacagagatcaaaaggtaatctgaagaatggcaacatttcccctgcttctcctgaacgctaaatttggccaaatttttatcaagcaaaaaggggtatggctcttggttagccagtgtcccctctggaaatgaaatgcttccttactttgctttcgttcttttctgccaaactgattaaagacatcagttaggggtaagataagaggtccgggagctcaccgagtgattggtagataagcttaactggtaaattttccttgcgtgggtagagctatgcttcttcaaagcactggttctcaaattttgctgcatagtggaatcatctggggagctttgagaactcctgatgtcctgatcacatcccaaactatttaaatcaggttgtttgggagtgagaaataggcacagtatttaaaagcaaaaacaactcctggtaacttcattgtgcagccaagttggggaaactctacagcaaaggaagagttcagcggccagcagcagcaggcattgcaagacaagatgccactttaactacttgggtgggtgagagaaaagacgctgaaactggagtgccgatgactaacaccctggggcggggaactgtcatctagcagcctagctggtggtgacacctaccacaacatttttcccttccctggctagggtctgattggaaaaatcgaagcttacttcaatgcctggtttctgcactgttgttaagggagacggatagaaacttccattcctgtgatgactcatgtgtagcagtcagtaggaaaacccagcagaaacatactccagcagcctggtgagtcagcaggctgcacagcgatcccagtgaataggaagtaattacagcgagtagtttgttgacacgcacaaactgcactcctttgaaagc

SEQ ID NO: 1996 - DNA, 6000 bp, Homo sapiens
tccttagcttggccataagacctttctgcaccttcatccttgccccatctcctaccactgtgtttgccgtccatactaaacagcctgctgtttccgagagatgttataaccttccctacctctgtatgtaggaatagttgcatgaaaagccctttatcttccctctacactgccattcctcttttaaatgacaatatagcctaatggataagcatgtgaacttttgggctaagaaaacctaatatccaatcctgaatgagttgcttctctttgagcttaatgttttctcattagggttgttgtgagaatcaaatcaaatgatatttgttgaataaatgaattgattatatattcattgagtgcctactatctgccaggtcctgttctaggaactgcagatagagcggtgaacaaaactcctgaagcccttgctctaaggggtctcacattctgtctggtgcatagaaaatgaactataaagaaaaaggttactattattattactcatccaagattttaggtgtacttttcggacctacttccaagtttccattctgacttaggtgctcaccttcgatggtcccatcccaccctatgttgcaccattgctgtagcacttgtgttgtaatcataattgacaattatttttacccttgctcacctacaacactgagagttccttgaagtgaaagcctgaggcttttttttttttaccagctcctagtatacaaggaagccagttttaagtttcaaatggatgaatgaatgttttaggatatgcctaacatgttacttaaaaattacatttaccactaaagagcatttgctgtatagccactgggttaagtgctttaaatacattatataatttaatctccatctccacagcagcactatggagaaaccagcattattaccctactttatcgatgaggaaactaaatgttagagatacaaagtaacttgccaaggtcatagaacctgcatctggtgaagtcaatcccaggccccaggccccctctttaatgctgatgcttggtgacaggagttattttccaataggcagttggaggtgaagggcaatggtcagcacatgctttattttagatatgccagcacatgctttattttagatatgcctgtgtacataagacaaaacctaaatccacagtcatacgtacaaacacattttagcttattttttttttcccttaggatgacctgggtaattctccctaccctgctgggtagtggggaaccggaaatagtcttaaacttgctagttcacagtattacagcctcttccattttagaccatctttggatggatggcttcatctcttgggtgactattcgatctctatatatctttcctttccccagcccctctgcaagatggtgtctgtaggaatatgtgagtggggcttataggagcacaacagggttgggagagtaggggcctcctggtctcatgctggttcttgggcttgtaatatctgagtctgctgaggagtcactggtctgatctcatccatgggcactctgctggtggtctatgctgacccctacagctgtagtatctctctctctacagatgtggcccttgcccctgtgtagattcctcagagctagctatttctcctatttgggctctgccttaaatgttccatcctgtggacccacttaaatatcacttcacctctgctgtaaagacactccctcctgacaccctctaccaccaccaccatcacaaactcagccctctgatagcaacatctcctccacttcctgattatccccttacaggacggacagaaacttctagatatcttctacatggcatgctagcaaaagaagagtctgagagtgaaatttaagccaaccctctccttaaccatactaagctactgattttagtctttactgtgatgaagctacaccttgcttggtgttggggagaccctctttatggcagtggtttcctagagtatcaaatgggaaatgatgcaaaaggaagtcccttaggtttaggctttgccttcagcctatccaatgtctcccttctgggatttgagcctggagacctgaagctgggaggcccttccttgctctgccttcatccattctttctaccctcacttggggctggaaagagtgaattcttccctcatccttcctgaattttctgtacttttcctacatcgtaccattccgcttcccaaagtggaatttgccctcccttttccctagggctcagctggaaaatggcttccaggtaacctgatttatgaggagaggaatgaaaacacatctgtttaatattttcaaattattacccctgttacccctgcatctcagagggtaatcactggtctctggagttctgtgggtccctttatagtagtgtggctcagagcagtcttagaggaagatttacgcggcccttggggcccttcacctgactcacagcccctccctttttagaccatcagcccaaattcttggccatcatcccatcccttccttcatgagcagactagaaacaaagtgggtgtgttctctccacaaaattagttggtatgatcaatgaactatgcattcaaattctgacaaatttagtccccacaatgacacaaattatgttttacatactacttaaatatgggatcatggaaaagtgatctgtactaaagaacccagattgagaacatactctgaggacattaaatatttgatttgtagactgtgcctttcaatttcagactgtccccccaaaaaggggaagttttgtgaaaggaagcaaattagtaaggaaattgacagcagcaggtcaagtaacagaaacagtaagaggaagcatgggtctttgcaagaatgactacactctcatgcccctttagctcatagtgcaatgtgaagcttggtgtgtatctttgatacttagatattcatctgtgtaccttgtaagtcttaggtcagaattggatctgattgtataagaaaaaaaatcttatgtaaagtgagatgtggacgaaggaatcaacttgtgcactgtggactaactggagaagcaaaagataaaattattaaaataatagcccaagaggaaagtataaaataggaaggaaaataagtagggccccttgtttgagattatccttaccatctgggttgtaaaacatttgattctaattccagaaacttgataccagaaataacttattaccagggacatatgctgaagaattgtcaggaatgacaaagtgtttacttgtttttaatatctgtatcacaaaatgataaagctgataaaccatacagtgatgtgaaggagtgagtcatagcttaatactttatgacacatatatttatgctgtatcttttacaccccaattcttcccttttcaccctataaaaggtcagagaccactgctgataagcaaagaatccttcaaaatctctcctggctgggcgtggtggctcatgcctgtaatcctagcactttggggcgggtggactgcctgagctcaggagttcaagaccagcctgagcaactcggtgaaaccctgtctctactaaaatacaaaaattagctgggtgtggcggcgtgcgcctgttatcccacctactcaggaggctgaggcaggagaattactagaacccaggaggcggaggttgcagtgagctgagattgcgccactgcactccagcctgggtgacagagcgagactctgcctctaaaaaataataataaaaaaaaaatctctcctctctggaggacagtactgaacatatgcagggtcttttcagtttataatctaatccgtagactgcacagtgctagcaattctgttcacagttatcttttcacaacagtcatcttggaagtacttgattcttaccttgatttataatatttattgagctcacattacagatcattactgtccagtcacattgataaaaccatgtcacttggaagctccagttcaccactcctagctgtgtgaccttaagcagtttacttaatcttactagtttactcatctttaaaatgggaataataatagtatctgtcacatagccaatatatttgaaagcggtattgcaaggatatagaacagcttgaatgttaagcactttcaaatactaagtgaggtgatcacttttgtaattcaaatggaaatagaataaatgtcaatgaattaatgatctgtatcaggaggcagcataaagaatttgaattggagggttttgggtaactggtaaaatggtggttatctttttttaaaagaaaaaccctctttggggattcctttgtacagatgatctcttaatttgccatctttaatcctcacattattaaaggctacattgattagaaggaaatacagcttccttgtaggtttttagctttttggcttgtttttggggagatggttgctgctatttggagaaagggagaaaggcagaaattttaaccttagtctgataccttttctacaagctggccaccaggtcctttttaggtttttctgaaacctgaccaagtttaattgtcatggcataaaaacttggtattgaaggagttaaagggtctcccacacccctttgcatgaatcgttcttttgtgtacacagctgcagtggcagcacgggtcggaaaggaaatggttagaggaagagctggttttcagacaaggcgagtctgcgaggggggctgcagggtggcctggggttttacatgccagatgtaggcctgccccggtgcctgcctggagctgctggcgtggtcacgccgcgaccctgtgcgaattgaggcgaggtgatgagttagcgggttgccatggcaacaggctggccacgtgaccagggtgctgctgccggcgctctgacgtcagctgccagagggcggggccgcaggagggcggggcgcgagcgagagctgggagaaggcagtgagcgagcaggcggcaggcacggtccgtgcggagcaggcgagcgagcgggaagacgcagccaccttcctcaccagccagcccacagcggtttgttccccttctcgggagtgcgccaatgcctgggccgacccaaaccctgtccccaaatggcgagaacaacaacgacatcatccaggataataacgggaccatcattcctttccggaagcacacagtgcgcggggagcgttcctacaggtaatggggctggcacgagagcagcgccggggaccgccgtgagggcgcgcggaaatccagcccgttatataatggagcagacactgcctgcgacccctgctgcaggcatgcatttgtgaaggcggttgtgattatttggtatctgtttccatgtgtcatgttgggtttgcattgaggctccgcgactgcagatggaaagcattttgtgaataggtttgctgccttcgaggggtctccctccatctctttccttccacactgataaaaatgcatgctgttttcccccgctgtccaaagggagacaggcagtagcacttcctttcctccttcccttttagattttaaaggagccattaggtagcagtgccaaaaggcagaaaacgggagggtggggagaaaaacgtttgcgcttaacctggagagtgtgcaggaaagatggaatcctctagattaagctgcagtctgtgatgttaaaccgccagattgatggagctttgtaagaattctgctcgctgattggtgcagggattgacagcagaggtgatagtgtcagacattcaccaaaattttctccatagaaccctaggtttattagaaagagactggactgcaaaggacttgaaaaaaactgggcgctgttatgcattttctaaggagtttatggccaccgcttgggtgggggagcctttccttcttatttacagtaggaaggtgattcctggtcttttgctgaggtctgttttgaggatgggactgatcttggtcattgtattgtgagccttttgattaatgagttggcctgt

SEQ ID NO: 1997 - DNA, 6000 bp, Homo sapiens
acattgatctgggcaaagattttttgggtaagaccttaaaagcacagctaacaaaagcaaaaatagacaaataggattatatcgaacaaaaaaactccttcacagcaaaggaaacagtcagcagaatgaaaagacaacctacagaatggaagaaaatatgtgcaaactattcatctggcaaggggctaatataaggaactcaactcagtagaaaaaagaactaaataaaaaatgggcaaaagacttggttagacatttctcaaaagaaaacatacaaatggccacaggtataggagaaaatgttcaacgtcactaatcatcaaggaaatacagtgggaaccacagtgagacatcacctcaccccgattagaatggctattatcaaaaagaggccaggcgcagtggctcatgcctgtaatcccagcactttgggaggctgaggtgggcagatcacttgaggtcggtagttcaagaccagcctggctaacatggtaaaaccccatctcttctacaaatacaaaaattacctgggcatgctggcgggtgcctgtagtcccagttactggggagattgaggcatgagaatcacttgaacctgggaggtggacgttgcagtgagccgagatcatgacactgcactccaggttaggagacagagcaagaccctgtctcaaaaaaaaaaaaaaaaaaaaaaaaaaaggaatggctattatcaaaaaggcaaaaaaaattgttggcatggatttggagaaaggagaactctcatacactgttggtagaaatgtgaattagtacagccattataaaaaacaatatggaggcgcctcaaaacactaaaaatagaactaccgtatgatccagcaatcccacgactggatatatagccaaaggaaattaaatcagtatgcccaagagatatctgcactcatgtttattgtagcactgttgacaataaccaagaaatggaatcaaccttagtgtccatcagtgtgattaatagatgtttaaaaagtggtataaatacacaacgaaatactgtttagtcatataaaaaaatgaaatcttgtcatttgtggccacatggatgaacgtggaggacgttatgttcggtgaaataagccaggcacagaaagacaaatactgcatgatcttcctcatgtggaatctgacagagttgatctcatagaaatagagagtagaataatgatttccagagactggaaaggggaaagcagagggaggaatggagagagattggtcagtgggtacaaagttacagttaggtaggaggaataagctctggcattctgttatacagtatggtgactatggttaacaatattgtgttgtatatttcatattccccttgctctcaaatcccaggagtgtaccctatttagagctaacatctccctgacttatattgacctttctcaagacaagagtttttcaaatcatagcattatttataattgagaaaaattggaaaacaagcacaaggttaaataagcaatggtgaaataccaagtaaatattttgcagccacttgggaaaaaaatagcgactttgaatgttctcaccacaaagaaatgataaatgtgtgaggtgatggatatgccaaataccctgatttgatcattacacaatgtatatatgtattaaaagatcacacttgtaccccataatgtatataattatttatcaaaaacaaaatacaaattaataagttacctgtttttgaaagctattatttttatatgccatgaataacaaattcaaaaatataatggaaagaataaatggcatgataaaatttaggaaaattttgagaataagaggaggggaaattattctatagatagtaatacatgttatagagttttaaataagaatgtggaactgccatggagacaaaaaaggcaatttaaaatctagaaagagatctaagtacatgtattaggaaggcaatagatagtaaaaatagtgcttctcattggtggggaacgaatagattattaagttgtgatgttcaacacctagctaactttatcagttagtggtttaggttgaaaatagtagaagttaatcctggcaggcttaagtagaagaacaatctataggaaaaatgttgggtagctcagagtcaatggaaagccgagctcagaagatggacaggaaccaaaggatgctaaggagctgggaacacagcctcccttgtgtcacaagaataggatggcactgtgctgcttttgctgctcaggactctagaccccaccactctgccaccacaactaaactctaatggtccctgtgtgtttatatcatttcctcaactcagatactgaggcaggattcaaacacagagcctaggtcatgggccttcatccttattgttgtgagggaaagggatgcctggccactttcagcttctgtggtgggaggcagggcactatagcatctccccaggtagtaggtgtccaaatcctggagccaaaaatgacagatttccaccaacatttggaatgactaaaattagaaccatactttatatcatagacaaaaataaattccacatggattcagaatttaaatgtaaaacttgagaccataaaagtacttgacagaaatatgcatatttatgtattcttggttcgagaaagttgataagcaagatataaaaataagaaagccattaaaaatattgatagagcatattaagtgactcagaaagagaattatgatctgttgagtttcagaaagtttacattaaaaatgggtataatgtgattacatttttaaaacaggatcacatttttaagaaaatacacacacacacacacacacacacacacacacacacacgcacacacacactcctttccaaagaggattagaatggcatataccagaatatttcgagtggttctctggatgatgacactagagatgatttttccttccttccctcactatatggaagagggttttttttttttttcaaaagctgttatttctttttaaatctgaaacatgaggaatttggttggttggtttgtaagagtatatagtatctgggtctccatagataaattttatgctaaactctacaaaagcgaaaataacttctaagaccaggtaatgaggcagttgtgtttcaacaatcccatccatataaaaataatgttaaagtggcaattggaatttgctccatctggcggtccttcaaaagaaagaactggatagtgggtgatgactcaaagaataccctccagatcatgatgtttctctttcctcccccagtgtctttttttttcctttgatttgttttattttgtcttctctttaagagaacccatctgcttgactaggaacttactagttagtattcagggtatgtcatctaaaggacaccagatgcagagactctagagatattcgttatggcctatgttttatcactttacgctcttacctacaaaataggagttgccccagcatttcatgttttaacaacccttagattcctgatgtcttgttctctcttatctcagattgctgtctcagtaaaggatgcctaacctttatttcacatgagagacagagcagttcttgcttcctaaagtgagtcacccaagtagaaggactggctcttcacagaagtcttggtagtgtaaaggatgaggggaggcacttcatgttccagaaagactgatcatgagcacatcatagagagagaccaagagatctggagatagcaaagaaagaatgaacctaaaaatggtgacttgttcctattcttgccacttggttttctttcttgtaaaagaaaaggaatcattctggcttccagcttattttcctaaatgccattagcctatactagtaagaagatatgaatcagtaaacacagcttgccagaatttcccagttgtagtggtcatgttctaagagctcttcatatattttttcaaaagtcccctttttctatgatcatttccccagggggctcattggacatttctgtcatgtttcttagtcataaagaacatgactctgaacttctatagctttcagtatccatgtcttcatacttcatgttaatatggaaaccccattgctctggactggaattaaattagtattaacttggcttataacaaaatttaacaattaaatttaccaatttaatacttaataattaataagtataagtaataggtaataagtataagtaataatagttaataagtataagtaatacttaatacttaataagtaatacttaataagtaatacttagtaatacttaatacttaaattggtattaattgacttgtagttttcacctgtgtgggggttctgtagttttcacctgtgtggtattttgtaaataccacagctatagatagaaaacagcttgagcatatgtgtattttttgagctacacatttcatgagaacttttgtagttctctcatgttttcctctctttttcctcttaagtttattttgatgacttggagcaggtggtagccaggtggaagaaaatgtatatttcttttctctggtagaagctagaaggagctccttttatcctggtttccttggctttatagtgtgaggttctgttggttggttgtggaacctggtgatattctgatgcatggagtacaatacacggagtttagggttgggaagtggcaggtgctgtattgttgaggtacagtcccttccctctagctcccagatcctgtggacaaggagatataagcgcattggtaagaaggacacactctgctctgagtgatgatggtgcctgtaaggacaatccccttccagcctagcagtcctctaccacatctgggtacagtgagactcactccagtactgttcttgtttctttccaggagcggcctattgccaattcatggacatgctcttccctggctgcattagtttgaagaaagtaaaatttcaagcaaagctggaacatgaatatattcacaattttaaacttctgcaagcatcatttaagcgaatgaacgttgataaggtaggagacttgtacctccataaaatgtgttgttttttcttaaaattgtttttgtgcataaatgcaaaagtccaggagcataccaatgggatatatcttgatatcccaacagtaggctggggtctgtacctagcataaagcatcaccctaagttcttgtatttttatgaggttttcatttcagattttctaaacttgtagccagtagactaaaaactaacagggctcacaaatgttaaagtgttattagttaaatttagcattgcagatgagaaacttttaatgtttgccagatgccactgtggttctttgtattttgttcttttggagaaacatcatgtcatggcagaaacagcatggttttgaatcccagcttcatgacttgagcaagttatttaaattctgagtctcagtttacccatctgtacaatgggactaaaaaccccttattcatggttatgaagttgacatgagaagcagtgtccggtatagtgtgtgcgctcagattctcaatgtccataatttgccctttttttctcccatgaattatacttttgtcctggagtggtgcaaatggcctggagtactttttctctcaataagggattattgctaaaacagtctctttctgcatgtttactgctatttaaatacatacttaatctatattccttatttaggatatatctcttagcatgaatgagcttggaaagaaatgaattttgaataagggaaaagagataaaccagcaggggagaaatggaaaactgttctttgcataaacagaggtaataaataggctatggaaatgaaaaataaaatatcaggttataaaagacagagattaaaggaaagtttgataaactatgtattttgtaagctaaggcaattaatatcttcttgacattcttatcaatatattaagaaaatcctgacttctcattgtctt

SEQ ID NO: 1998 - DNA, 6000 bp, Homo sapiens
gaaggagctccttttatcctggtttccttggctttatagtgtgaggttctgttggttggttgtggaacctggtgatattctgatgcatggagtacaatacacggagtttagggttgggaagtggcaggtgctgtattgttgaggtacagtcccttccctctagctcccagatcctgtggacaaggagatataagcgcattggtaagaaggacacactctgctctgagtgatgatggtgcctgtaaggacaatccccttccagcctagcagtcctctaccacatctgggtacagtgagactcactccagtactgttcttgtttctttccaggagcggcctattgccaattcatggacatgctcttccctggctgcattagtttgaagaaagtaaaatttcaagcaaagctggaacatgaatatattcacaattttaaacttctgcaagcatcatttaagcgaatgaacgttgataaggtaggagacttgtacctccataaaatgtgttgttttttcttaaaattgtttttgtgcataaatgcaaaagtccaggagcataccaatgggatatatcttgatatcccaacagtaggctggggtctgtacctagcataaagcatcaccctaagttcttgtatttttatgaggttttcatttcagattttctaaacttgtagccagtagactaaaaactaacagggctcacaaatgttaaagtgttattagttaaatttagcattgcagatgagaaacttttaatgtttgccagatgccactgtggttctttgtattttgttcttttggagaaacatcatgtcatggcagaaacagcatggttttgaatcccagcttcatgacttgagcaagttatttaaattctgagtctcagtttacccatctgtacaatgggactaaaaaccccttattcatggttatgaagttgacatgagaagcagtgtccggtatagtgtgtgcgctcagattctcaatgtccataatttgccctttttttctcccatgaattatacttttgtcctggagtggtgcaaatggcctggagtactttttctctcaataagggattattgctaaaacagtctctttctgcatgtttactgctatttaaatacatacttaatctatattccttatttaggatatatctcttagcatgaatgagcttggaaagaaatgaattttgaataagggaaaagagataaaccagcaggggagaaatggaaaactgttctttgcataaacagaggtaataaataggctatggaaatgaaaaataaaatatcaggttataaaagacagagattaaaggaaagtttgataaactatgtattttgtaagctaaggcaattaatatcttcttgacattcttatcaatatattaagaaaatcctgacttctcattgtcttggaatttttatttcaaaacatacattctctttaacatcttagccctttggattatttccaactttatgtcctttgtcatggttaatttccaattagctctttccatatgtatttaaaactagggatatataggttctccttacttttataatacctcttgtgtctttttcattcatttctctatacatgcttctagattagaaagaaaagaaacaccttttcatatgtttattgatggaacttgtcatacatcaaattagtgggctccatatctctctagaagtatatacacacagaatggatgagcagttgttaagaatgttgaagaaaaaaattattgcagtggaaggagactggccatgatggcctttgttagcctttctagctttagtatgcagtgatgtgatccaaaagtacggtgagagacagcattaagtaccctcattcatgtgtgtcatagcctgatggcacaatggaaagttctatgcttttgcttgccacctaggattttgaacttttgccctgaagctttcatgttgatagagaatgcagaattaagtccacagaagtaaatgccttcttttaacagctaatgtaccaccagtgtctaaaactatttataaatgttcatgtctggcaatagacaaaatatagtagtttgttagttaaaagctttttatgctctaaaaagcctctaaaaagttgatttctaacaatcaatatcagcataaacaaaaattttaaactcagaagacataaaagtgattaaataatacaattaaaagtcaattgaggctgagcacagtggctcacacctgtaatcccaacactttgggaggccaaggcgggagggtcacttgaggccaggagttccagaccagcctggtcaacattgtgagaccccatctctacaaaatttttttttaattgccaggtgcagtggcacatacgtgtaggctcagctactcaggaggctgaggcaggaggatctcttaagcctaggagttagaggctgcagtgaggtatggttgtaccactgcactccagcctgggcaacagagtgagactctgtctctgaaataaaaaataaaaattttaaagcaattgagttcacatgtggcaggaattcttccttgtaagcagacaattcactgaagtttgggggaagtgagagaagagcaacatatcaccaccaaagtctattacccaaagaatcttcatgaaaaatatggtatcttccaaaagattcccttctctttattttgctttgtacttggtttagtttctattttagctgcataaaaaacatttgtgcaaaatttattgctaattatttagtttaatgcgtgcttcagttgcttttttcttccaaattttcattgatatgtaaggtctttctacattttctaaagtggtcctattgatacattttaggatatcaatgatgtgtagctcccacagtggcaaagccttgttcaaagtttaatttctatagcttccattcatattgtcacatagcaaagctgtgagctgtgtgcttgtctgaatcacatgcttacacactcacacacattcacacactcacacacacaatctgactcacactctagctttgtaactatcttgtgattcacattcagctagtattcccacccaaagatgtaaaaggtaagaatccagtgataatataattcacatagctagatacctttccattttctttaaaaaaacagcaaattacaccagtgagaatggctattactaaaaagtcaaaaaataacagttgctggtgaggttgtagagaaaagggaatgcttatacactgttggtaggagtataaattagttcattgtggaaagcaatgtggcgattcctcaaagagctaaaaacaactaccattcaacccagcaatcccattattgggtatatacccaaaagagtagaaatcgttctaccttaaagacatatgcatgtgaatgttcattgcagcactattcacaatagcaaagacatggaatcaacctaaatgcccatcaatgacaaattggataaagaaaatgtgacacatatacaccatggaatactaggaagccataaaaagtatctattttattgatttaaatcttattcatctccactctctagtaactataatctttatatgagtgtatctcaacacaactgggctacatattacaaagaaatttaaaaagtttatcagccaggcacagtggctcacacctgtaatcccagcactttgggaggccgaggcgggtggatcacctgaggtcaggagttcaagtccagtctggccaacatgtgaaaccccgtctctactaataaacaaaaattagccagacatggtggtgcatgcctgtaatcccagctactcgggaggctgaagcaggagaattgcttgaacccaggaggcggaggttgcagtcagccgagatcgtgccattgcactccatcctgggcgacaagagtgaaactccgtctcaaaataaataaaataaaaataaaaagcttatcagtcttgaaatagcacaacattccaggcgtctgtttttccagagagacgttttgaggataaatgtactatgagtgggaccagcccctcttgacaactaaggatattccttttgtctggcttgttcagaagtactaaatattccaagaaaatcaataatgatgttttggtttagttcttttttttctatttttaatttttgtatgtacatagtaggtgtgtatatttatggggtacctgaggcattttgatacaggcatgcaatatgaaagaagcacatcgtggagaatcagttatccattccctcaagcatttaccctttgagttacaaacaatccaagtacactctttaagttattttaaaatgtacaattaagttactattgactataatcaccctgttgtgctatcaaatagtaggttttattcattctttctaacttttttgtacccaatcaccatccccaactccccctttccagccactagtaactgtccttctactctccatgcctatgaattcgcttgttttgatttttagatcccacaaataagtgaaaatgtgtgatgtttgtatttccatgcctggcttatttcacttagcataatgatctccagtttcatccatgttgttgcaaatgactgcgactcattctttttatgactgaatagtactccattgtgtatatgtaccacattttctttatccattcatctgttgatggacacttaggttgcttccaaatcttagctattataaacagtgctgccacaaacttacaagtgcagatatctttttgagatactgatttcctttcttttgggtatatacccaaacgtgaggtttgtaactcacatagtgattttttattgcaggtaattccagtggagaagctagtgaaaggacgtttccaggacaacctggattttattcaatggtttaagaaattctatgatgctaactacgatgggaaggagtatgatcctgtagaggcacgacaagggcaagatgcaattcctcctcctgaccctggtgaacagatcttcaacctgccaaaaaagtctcaccatgcaaactcccccacagcaggtattgtcacaatgagattgcgggagttgctttcatctttgataatggctcagacccttctgttatttactgtgtgtttctgactgattcttctcaacagtcaatattttaatgccttcggatgatttctactgttgtctgtttcaccacatttatcttcctgtgacccatttgtcattagtctaaccatcttcatttaaactattaaaaaggcagagctatttgcattgtatcactgaagctggcagtgaaaataatgctcccaggatagatttctttttccttttagtttttcgagaaatttcaagtagcctgtttagattttgactgaagtatttttactgcttaattgctggcagtacagaccagcatatgaactgaactctgttgttaaatatggatcatcgtctctaacccttcaaaggaaattcgtgaactgtacatcctacctcctctgtaggcagtggcaatttttatgcagtaacattcagcaataccctatttatccagctttgtccaaaagtgaagtcgttgaggaaaaatatctggaacattaaaacttttaaaacttctgtggataaaaaaagaaaaaaccactttctaaaatatattataaacatccttgccataaacagcagaccttaccaagcagaatgtgttcttataaaattgggtcattattagaaacacagttgggtactgcacaattaagcatgaaatcatccaaaatcatgtttccatctcaattgtggaacccagtgttcaaacttgttaaatcagtaacctgaattttgtaaataaaacaaatttcttatttgtgcccaaactacaatctgaatgaagtagaaatggttaacaggaccacataggtggtaagagctttgaaatcacagttttgcttactgttaaacagcatttttatcatcttatttctggatttatggctgtattccagg

SEQ ID NO: 1999 - DNA, 6000 bp, Homo sapiens
atgccctctgtctctctctcctgctctggcatagtgagtaagacgtgccttgcttccccttcaccttcaaccatgattgtaagtttcctgaggcctcctcagctacgtggaactgtgagtcaattaaacttcttttctcttttttttttttttttttgagacggagtcttgctctgtctcccaggctagagtgcagttgcgcgatctcagcatactgcaagctccacctcccaggttcatgccattctcctgcctcagcctcccaagcagctgggactacaggcgcccgccaccatgcccggctaattttttgtatttttagtagagacgggatttcaccgtgttagccaggatggtcttgatcgcctgaccttgtgatccgcccgcctcggcctcccaaagtgctgggattacaggcttgagccatcatgcggggcctaaacctcttttctttatacccagtctcaggtagttcgttatagcagtttgagaacggactaatacaaagtggaattaaacaacacactcctaataaccaacaggtaaagatgaaatcaaacacattagaaaatactttgatatgaatgaaaatgtaggtacaatgcaacaaaacttatgaaatacattgcaaatggtatgtggagggaaatttgtacttgtaaattcctattttaagaaagaagaagaatctcaaatcaataacctaactttccattttaagacactgaaaaaagaagagcagactaaaccaaaagcaagccgaaggaattaaataataaaaattagagtgggccaggagtggctgctcacacctataaatcgcagcactttgggagggtgaggcagggtcagaagtttaaggccagcctgagcaacacggtgaaacactgtctctagtaaaaatacaaaattagtgacagagcaagactccgttaccaaaaaaaaaaaaaaaaaaagaagtaaattccctcaaattgacaaagggtgtctacaaaaatcccacagctaacattacacttaatggtgaagactggattctctcttgtctaggattagggacaagacaaggagtctgtatttgccaattctatccaacatcatattggaggttctagccagggcaatttcttctcatttgcctcctcaagtgacaaacaggtggcacgaagaatgaatagtttcaatagtttcatttgtattcctcatgattaaaaatctccacacagccaggcacgtggtgtgcacctataatcccagctacttggtaggctgaggtgggaggatcacttgaacccaggagttcaagaccagcctgagcaaaataggaagactctgtctctccactataaaaaacaaaaacaacaacaaaacttcatctaaaagttttatgtcctttcccaattcctgcaaatatttccaaaagttccaatctcatgtgctgtaaagaactgtgctttgcagaaataaaaactgcacctaaaaaatgatttggattatttttaactcaaaggtcattcaagtccagcgagctatagatggcattactactcagtttttagaatcgcaaatggaggaagctgaaactctttaccaatacacatcaatgtacacttgttataaagttccacatatttttcattttctgctcaacactttcactgtataaaagaaggaaaaacttagaaaagagaagtaatgatgcatagagctatcagatctcaatggtggcaatgctcttctagatacctagacataaaaattgtgttaaaattttgcatacattagttagaacatttgttatttaatatgtatcaccctgaaaggtatttaaggacagacataaataattttactttgaaatccttagatttttggttacagtatatgatagacaaaaaagaaagctcttataaaatgagatttttctgggctccaagtccctttctctgcactgtattttaataattacaaaaataaaatcatttaaaaataagacaattttaaaagcacatatatgggagaatatggctataaaggagtggcacaggggaggtttttggggtgatggaactgttctgcatcttgattgtgtgatttcagattgtgagagtggttctacactctaagtgtattaaaatggtacacaaaaataaaaagtcaattttactgtatgttaatttttaattaattaattaattaatttttttttgttgttgagagagtctcactctgttgcccaggctggagtgcagtggtgtgatatctgctcacttcagcctccacctcccgggttcaagaatttctcccgcctcagcctcccaagtagctgggattacaggcacataccaccacacctggctaatttttgtatttttagtagagacggggttttaccatcttggccaggcttgtctcaaactcctggtctcaagtgatccgcccaccttggcctcccaaagtgctgggattacaggcgtgagccactgcacctggccctgctgtatattaacttttaaaagaaaactggaaaaaagcacatatgcaatagaatcaaatataaactgcactatattcaaaatatcatatgtaacaaataccatacatctgattaaatatagggcaaatgcaggcctcacttcctctctttggtgtattctcgtatctaaaaagatttttgtcaatctttacttttgtggtttgtattatcaaaacaataggcatcttgaatgcactttttctttttttctttttttttttttgagacggagtcttgctctgtcgcccaggctggagtgcagtggtgcgatctcggctcactgcaagctccgcctcctgggatcacgccattctccggcctcagccttccgagcagctggaactacaggcgcccgccaccacgcccggctaatttttgtatttttagtagagacggtgtttcaccgtgttagccaggatggtcttgatctcctgaccttgtgatccgcccgcctcggcctcccaaagtgctgggattacaggcgtaagccaccgtgcccggccttgaatgcactttttcaaactatatatgcccagcagaaaattctaatgcaatctcctgatacgtagtcatagagtaatttcgtccaagtctcacatttcatggccaccacctcaggtgtcctgataggtccgtatgactaaatcatggagaccggaaacagaaaaaacagataggtaagtaaaaaaccacaaggcatcttgtgtgtcagactaacaagtttagactcttttaaggcttactgttttgctatcagagtaccaataagatatttagtataataacatttattacttagagaattactactggccaggcagggtggctcatgcctctaatcctaccactttgggaggctgaggcaggcggatcacctgaagtcaggagttcgagaccagcctggccaatattgtgaaaccctgtctttactaaaacacaaaaattagccgggtgtggtggtgcaggcctgtagtcccagctacttgggaggctgaggcatgagaatcacttgaacccaggagatggaggttgcagtgagctgagatcacaccactgcactccagcctgggcgacagagcaagattgtctaaaatatatacacacacacacacacacacacacacacacacacacacacacatacatatacatatatataaacataaaacaataaagttactactataacagagtggaagaaaatctgggaaaaataaaggagcaaaacaagtagtctacagtaaattaatcctgtatactttagtgttataaaatttggttacctctatttattctcgttcaaaactctggacttaatctcaccttctgactcgtattcacttgctttctgcttcaagtcctctattaccaggtagacatccctgtcccggaccctgttgcgttctgaaaggtgatgtaaaatctctgtggtccgtgggttcacctcatactgtggaataggatgatctccaaatattttttttaaccacgcagcaacctaaccattaaaagaaagacaaatattataagccttgtttactgtaatggctcgatgagaatatgacaaagaagtgatcaaaagcaaactaaatgctttctgtgactattttggagtcctacttcacaacctcacttgtctttagggagatactagatatcaggaaataaaaagtgagcaagtacacaaagaaacgtacaatactgaaaattaccagagaacaatccgttcttttccaaatctgcaaaagcggtacaggctaacaatttgcctcgcttgaaaaaccttaaagcttaatagaccataataatgcgaacgcattattagaccgtgcatggtctgaaaaaagcaattgtccctcgatcaccagaagccccgccgcgccgggaggctcccagtgttgggatgcagggcgcggaagcagttcagatgtggaagccgccgggctgagcagcgaaccggaaggcgggtttggcttcataagtcccactccagagtctgtggacacgggctgctcaacgcctctcccgggccagatccaaacaaggggaggcccgggcaggaagggaaaggccttcaggagagtctaagcacggggggcttgcagatagtgacggcggcactaaaagacggatgtgtggaataggggagagaaaagtagacgtggcgcgcacaggagacccgctgtcggcgcgggggtgtcaaaaacgcgttttccaggaggccaacgatccccattcccgccccatcacctgcgtttctctctcctcctgcggctccatagctgcggctcccgccactttactaggaactcctagcgggagatgcgccccgctcactccctaggccccgcccacacgccgttggcacccgcccctcgccgggcccgggatttctgggagttgtggttttacctgagactcctggccgttgagcccctgtgcaaggctggtcgaaggctctggcattgcaagcctcgcttcgttgccacttcccagctcttcccgccttccgcggtataatcaacactacgagagatagagccgcctagaaccaggttgttttttctttcttttatttttatttcttgtttgaatcacttgtcgttaaaaaaaagtacttgaaacgtttggttcttgcttagcaagatgtttgtgtttcttccacattgattgcatccactcagaatttatattctaccctggcaatatgagctgaggcaatcttaacttgatccgttagttcccccaacctaaaaactagggacattttttttttttgagacagagtctcgctttgtcgcccaggctggagtgcagtggcatgatctcggctcactgcaacctctgcctcctgggttcaagcgattcttctgtctcagcctcccaagtagctgggactacgggcaagcgccaccacgcctggctaatttttgtgtttttagtagagacggggtttcaccatattggccaggctggtctcgaactcctaacctcatgatccgcccacctcggcctcccaaagtgctgggattacaggcgtgagccagcgcgcccagcttttttttttttttttttttttttgagatggagtctctgttgttcaggctggagggcagtggcacgatctcggctctcggctctcagctcactgccacctctgcttcccgggttcaagcgattctcctgcctcagccttccgagtagctgggattacaggtgtgcatcaccacgcccagctaattttttgtatcttagtaaagatgggatctcatcaggttggccagcttggtctcgaactcctgacttcaggtgatccgcccgccttggcctcccaaagtgctgggattacaggcactgcgcccgaccttttcttttctttttgagatggagtgtttctctgtcgcttaggctggagtgcagagtgacatgatcttggctcactgcgacctccaacccccgtcccc

SEQ ID NO: 2000 - DNA, 6000 bp, Homo sapiens
tgtcatagtggacacttattaacgttgccttcacttttcttttttttttatttatttattttattttatttaagacagggtctcactctgttgcccaggaaagagtgcagtgggtttatcaccattcattgcagcctggaactcctgggctggagcaatcctctgacctcagcctgtgcccctgtggtcccaccaccatgcctggctaatttttttgtaaagacggcggtggtgggcagggcgtggggggaggtctctctatgttgcccaggctggtctcgaactcctggcttcaagtgatccttcctcctcagcctctgcgctgggcccgcttttcaccgtttggagaagcattttcagttccatcccccaaatcctggcttacacctagaacctgaattttggtgaggcaaataaatatccgggctacaagggtcatctcctgaaacatggcttgtaaacacgtgattagccatccttttctctagtatcctactcttttcaaggtaagccatgggaaaatagagcagcagttctcctgggaatcaggggtacaaaaaggctgtccaagccaggcgcagtggctcacgcctgtaatcccagcactttgggaggctgaggcgggtggatcacctgaggtcaggagttcgagaccagcttggccaacatggcaaaaccccatctctactaaaaatacaaaaattagcccggcatgggggcgggcacctgtaatcccagctactggggaggctgaggcaggagaattgctttaacccgggaggcagaagttgcagtgagccccagattgcaccactgtcctccagcctgggcaataaaagtgaaactccatctaaaaaaaaaaaaaaaaaaaaagaaagaaaaaaagaaaagaaaaagaaaaaggctgtccaagtaaaataaaatacagagacaaatctataaatttaaaacatttgggaagcaataattgccattcagggcatacacacaaacagggtggtctttggtacgtcagaagaacaaacagatggttagaggttttatttttgtaaaagagaaatatagccaggaacagtggctcatgcctgtaatcccaacacgttgggaagccaagatgagaggttcacttgagcccaggagtttgggagtgcagtgagctgtgatcacaccggaacactccagcctgggcaacaaagcaagaccctatatcaaaacaaacaacaaaaaaagagaactgttgtatattgttctttaagaaagttcattgtcactagtaaggttttggggagctggcaagttttgattggcaagtaatggcaactaggtaaaacgatccttagagtcactgcaggttgtttttagcagctaattagataaaactggtttaggtcagccgggcacggtggctcacgcctgtaatcccagcgctttgggaggccgaggcgggtggatcacctgaggtcaggagttcaagaccagcctgaccaacatgatgaaaccccgtctctgctaaaaatacaaaaattggctgggtatgttggcgggtgcctgtaatcccagctacttgggaggctgaggcaggagaatcacatgaacctggaggcagaggttgcagtgagccaaaatcatgccattgcattccagcctgggcgacagagtgagactccatctcaaaacaaacaaacaaaaaaactggtttaggttatagcgggcagtttcagcagccaggcttacagataattacatttttggagcaatgttatgtgccctgagtgcttttttttccctttacctcttgacactgttttagttggggatgacaagaatgacccaatcaactttcacaagctaacaggaaaaaatatcgtttctaaaaacaacaaggccgggcatggtggctcacgcatgtaatcctagcacattgggaggccaaggcaggcagatcgcctgaggtcaggagttcaagaccagcctggccaacatggcaaaaccccgtctctactaaaaaatcaaaaattagctgggggtggtggtgcacacctgtaaccccagctactcaggaggctgaggaaggagaatcgcttgaatccaggaggtgaaggttgcagtgagccaggtggaggttgcagtgagccaagattgcgcctctgcacttcagtatgcgcgacaggagtgagactatctcaaaacaacaacaacaataacaacaaaattagccggcatggtggctcacacctgtaatcccagcactttgggaggctgaagcaggttgatcacttgaagtcaggagttcaagatgagtctggccaacatatcgagatccctgcaccccctgccccatctttagctgggcatggtggcacatgcctgtaatcccagctatttaggaggctgaggcacgagaatcacttaaacctgggagatggaggttgcagtgaccactgcactccagcttgggcaacacagtgagattctgtctgaaaaaaaaaaaaaggccgggcatggtggctcatgcctgtaatcccagcacgttgggaggctgaggtgggcggatcacgaggtcaggagatcgagaccatcctggctaacatggtgaaaccctgtctctactaaaagtacaaaaaattagccgggtgtggtggcgggcacctgtagtcccagctactcgggaggctgaggcaggagaatggcgtgaacccgggaggcggagcttgcagtaagccgagattgctcaactgcactccagcctaggcaacagcacaagactccctctcaaaaaaaaaaaaaaattgcagggatattttgtaaaatttgtagtgataaaagtggacaaaagacataaagataactttttttgccccatactgaagggctgcaccagtttatctgaaatttggttacagagcagagatatatttagtttttgtttttttttgttttttgtggtggattctcactctgtcgcccaggctggagtgcagtgtctcaatctcagctcactgcaaactctgcctccagggttcaagtgattctcttgcctcagcctcccaagtggctgggattacaggcacgtgccaccatgcctggctaatttttgtatttttagtagagatggggttttgccatgttggtcaggctggtcttgaactccggacctcaggtgatccacctgcctcggcctcccaaagtgctgagaatataggtgtgaggcaccgcatccagccagagcagagatatgtttgaagcaaaaagaataagcaagacaggctgggtgtggtgcctcatgcttgtaatcccagcactttgagaggcccaagtgggagcatcacttggggccaggagttcaaaaacagcctgggcaacatagtgagaccctctttctacaaaaaatacaaaaagttagctgggtgtggtggtgcacgcctatagtcccagctactaaggaggctgaagcgggaggattgcttgagcccaggagttcaaggttgcagtgaactgtgatcaccactatactccagcttggacgaaagagcaagaccctgtctctaaaaataaaataaaataaataataaataagcttggcttgctagtaagtttcctttgaaaagaaaatcattttaggctgggtgtgttggctcacacctgtaatcctagctctttgagaggccgaggcaggcagatcacttgaggtcaggagtttgagaccagcctgatcaacgtggtgaaaccccccgttctactaaaaataaaaaaattatccctgcatgctagcacaagcctgtaatcccagctactagagaggatgagacaggagaattgcttgagcctggggacgggggttggaggtcgcagtgagccaagatcatgtcactctgcactccagcctaagcgacagagaaacactccatctcaaaaagaaaagaaaaggtcgggcgcagtgcctgtaatcccagcactttgggaggccaaggcgggcggatcacctgaagtcaggagttcgagaccaagctggccaacctgatgagatcccatctttactaagatacaaaaaattagctgggcgtggtgatgcacacctgtaatcccagctactcggaaggctgaggcaggagaatcgcttgaacccgggaagcagaggtggcagtgagctgagagccgagagccgagatcgtgccactgccctccagcctgaacaacagagactccatctcaaaaaaaaaaaaaaaaaaaaaaaagctgggcgcgctggctcacgcctgtaatcccagcactttgggaggccgaggtgggcggatcatgaggttaggagttcgagaccagcctggccaatatggtgaaaccccgtctctactaaaaacacaaaaattagccaggcgtggtggcgcttgcccgtagtcccagctacttgggaggctgagacagaagaatcgcttgaacccaggaggcagaggttgcagtgagccgagatcatgccactgcactccagcctgggcgacaaagcgagactctgtctcaaaaaaaaaaaatgtccctagtttttaggttgggggaactaacggatcaagttaagattgcctcagctcatattgccagggtagaatataaattctgagtggatgcaatcaatgtggaagaaacacaaacatcttgctaagcaagaaccaaacgtttcaagtacttttttttaacgacaagtgattcaaacaagaaataaaaataaaagaaagaaaaaacaacctggttctaggcggctctatctctcgtagtgttgattataccgcggaaggcgggaagagctgggaagtggcaacgaagcgaggcttgcaatgccagagccttcgaccagccttgcacaggggctcaacggccaggagtctcaggtaaaaccacaactcccagaaatcccgggcccggcgaggggcgggtgccaacggcgtgtgggcggggcctagggagtgagcggggcgcatctcccgctaggagttcctagtaaagtggcgggagccgcagctatggagccgcaggaggagagagaaacgcaggtgatggggcgggaatggggatcgttggcctcctggaaaacgcgtttttgacacccccgcgccgacagcgggtctcctgtgcgcgccacgtctacttttctctcccctattccacacatccgtcttttagtgccgccgtcactatctgcaagccccccgtgcttagactctcctgaaggcctttcccttcctgcccgggcctccccttgtttggatctggcccgggagaggcgttgagcagcccgtgtccacagactctggagtgggacttatgaagccaaacccgccttccggttcgctgctcagcccggcggcttccacatctgaactgcttccgcgccctgcatcccaacactgggagcctcccggcgcggcggggcttctggtgatcgagggacaattgcttttttcagaccatgcacggtctaataatgcgttcgcattattatggtctattaagctttaaggtttttcaagcgaggcaaattgttagcctgtaccgcttttgcagatttggaaaagaacggattgttctctggtaattttcagtattgtacgtttctttgtgtacttgctcactttttatttcctgatatctagtatctccctaaagacaagtgaggttgtgaagtaggactccaaaatagtcacagaaagcatttagtttgcttttgatcacttctttgtcatattctcatcgagccattacagtaaacaaggcttataatatttgtctttcttttaatggttaggttgctgcgtggttaaaaaaaatatttggagatcatcctattccacagtatgaggtgaacccacggaccacagagattttacatcacctttcagaacgcaacagggtccgggacagggatgtctacctggtaatagaggacttgaagcagaaagcaagtgaatacgagtcagaaggtgagattaagtccagagttttgaacgagaa

SEQ ID NO: 2001 - DNA, 6000 bp, Homo sapiens
cctgtagcctgtgagacactttcaaactttccaaacttttccttagtgtccctcatactgttccctctacttgagccactcttcctctgttcttcaaccaatttaatttttactcccacatgaaacctttcctgattccccagatgagagtaggtccccttgttagacccttcacagaggaaaatcacttatttgtgtaagcatgtatttaatatctctctctcttattagactatgagctctgtgaaagcagggactatgtctgacaaaagataaaaacatctactttaaatatcttatcaggaaactgcatttcattttctttgataatatttagaatatcttctgaatctatgcttatatcacctttttattgataatattaattttttctttctcttttccttaaccaggcttctgaggagtttacctatttcattgttctttttaaacaccagattttgggtttatttattctttttactatttttagcaacaccactacattctcctattagttctaatagttcttctaaaagaactagagtctgaaggtttttagttgtgcaattacagcatttacaatgaaacaatttctttcttccttttccatatttgtatctactatttcattttcatgtcttactgctttattttagtctctaaaacaatattaataatagtggtgataggaggcatctctgttgtattcctgaatttggtggctttagtacagctccactttgtgtgctgtttgctgtgttgtttttagtagttagcatttattgttccttgaaggaccagtaaggttggatgaaatccagaagcgtcctgggagtcacacgaaaaaataactatttcaggagaaaggagtgattgactacatcaaatgatggataggtcaagtaagataaagcctgagaactgatcattagatttaaaaacatagaggtctgtgatgaccttgaccagagcatggagtgatgattggaatgggttagacagaggatgcggggagaggaggtagagaccgggagaggaggcaagttctgttttgccaggagatgttgtaaaggggagaagagagttgaggcagcagctggaggagaatggggtcaaaagagtatttttgttttgttttgttttttaaagatgggagacattaaactatatttgaaagttactgcttaggacccagcattaaggtaaaactggtgatcaaacagagagaggcatgttatagagagatgtgcttacaaaagtgagaggagcgagatcttgtacacaagtggagggtgacttttttttttttttcttgagacagaatcttgctctgttgcccaggctggagtacagtggtgggatctcagctcactgcaacctccgcctcccaggctcaaacgattctcctgcctcagcctcctgagtaactgggactatagatgtgcgccaccacgcctggctaattttttatattttagtagagacatgttgcccatgtcgcctaggctggtcttgaactgctgagctcaggcaatctgcccacctcggcctcccaaagtgctaggattacaggtgtgagccactgggcccaggcagaaagaggcctcatgcagtattcagccctcttgcccttctgccttatgccatatgaggacacagcattcctcccctccagaggatgcagccatgaagcgccatcttggaagcagatacctgaccctcaccagagaccaatcctgccattgccttgatcttggattcccagcctccagaactgagggaaatacatttccgttcattataaattacccagtcttaggtattctgttataacagcacaaacatattaagacaaggagggaaggcagactatgagagacagggacagatgctggtaagtgggccactgtagtcgcctattgtttctttttctccacagacgtatagctttcctaggtgattctcataagcgtgcaagtgtggaatcactcgtctatagctagaaccaagcaacttacacagcttatcacttccttcaatcaagttgatcctacatcttggatctcatctctcttgtgatgaggaaagccgtttccagaagaaagaatgaagaaagtgtgatttcaaattcctaggccctagatcccactctatgagaacagcccaggctggtctcaacttcatagctggacaggctggacctatgagaaaagagagggaggaaaggaaagggagagggagagggagagggagggaggaacagaaagagagagaaagaggtagataaatagagacaaggagaaaaaacgtcagtcctctcccaagaaagaagcaacccaagaggaagaagggcacctggctgctcagggtatcccctcatctagaagccatggtatagtgggttcctcaaacatggccagtgcttacccccggaagagaggccacatgcaaagtcattggccccgatgccaactcctcctgggaacagaaagggtggggtcaggaatctgtttaatcacctaagttgcttccctcctctacctagatctgagtcaaaaacaggtgccatgggagacaaatttagccagcacaatatttttgaaaagtataccgaaataccctaagcaaggcagacagggcacttttttgctctgtgcagcaccccttgcccccatatcctccagggctactgtagatgtgggcacccctggcctagctaccgagttacagcttctggtgtctagtcacaggcagtaaggaaatgctggctcatttttttttcctcccagaaaaaaagtcttcaaacagaatgacctggtgaacttcccaactccagaattctgtgcagttattttctagtgactgacaccgacttcagccagctgtttctttagaagtcttccctatggagtaaaaataagaaataacttgtttcctgatagcagcaaggagaacagaacaccactttacctgacagtggagagccccagacagatactcgcttcctgttcattcccctgccatcgtacggtaatgggcactgatattaaacatgcatatttcacagtctcttgtcccgcgatttggaggatggccattcactatgtatgaaccactcactcatgctcatcacacagagaaaattacattttcccagttgccaaatggaagagataaattatctcacgtggacaagcacattgctctcaagagcagcttccagacctaagataaacagattaaaaaaaaaaaacaaaaacacgctggagggggactctgagctttccaggtgttgatgggggtcagtctcttcattcggactcgccagatcctcactttgcagttagtgggcttaaagtggcgggacatttgcccttctgtttcttttggattaaatgagcagccttggggcctcttattcttccttcatagaagagatgttataaaaatgaataaatcaacacaaaacatttcatatttatgcctacttgctgaattgatactacttgtaatgaaaatcaaggaagcaaaatgttaaaatgttctctttggggaagacacattggaatgtcttaccacagatatacacacactcgcttgttacacactccttccttatccctaactattctctgaggttaatgaaggtcctgataactgcagtctctaacttagcatatcatcctaaacctactacctgcacacataggagtcgcagcgcaactatgtactaatggcagccaacactcattacccttcataccaccatcactgtgcaaacccttagtgcattttccaatatgatcccacaatccttcatttttatgttttgcccacgctaaaattcgacagcgaattcttgcaacaattattaagcgtctggaattgtattagggtctgggggtagaggtgggggacgaagcgggaataactgcagtacacagcagaccctatgaaagtgccaaaacgcaggtctcactcggaaggctttgggagttgggagaggagaaggctcatgggcagctaaagccaccagtgacctcattatgcaatatttaggttatcagacttttctatgcctagaaaagcagcgcctcaaccattccaacgggacgcaccgcgttcagtgacgaccctcatcggtgcccacagctctgggctcgctgaaggcaccacagaagcaccagttattaccagtgttagggtccagtggcttcttctgtccctttcctctggatcccaaagtgttggttctcttttgttagttttattccggtcatgccaatgagcacagattcacagcccaggcggcccgctcggaatcccaggccggctggggaccggtgcacttgggctccgcgccccctcgaccctcggcccagtgccccttcccgcgcgcgcgggtctccccggttccagagcccaccggtccccgccggctccttctccccacccaccctcccaccgggcccccggcggctgcagccgcgcggggctggcggggcggcgaccgggctcaggcagatccccgcttcccgccttctcggcgccccctccctcccggacggagcccgaggatcccccacccacggcgggcgtgaggaagggcttctgagtgactggagctctaccgcgtgtgccccgggaaggccaggctacccgggacggggctcggctccccaggtgagctcgtctccgcgggactgggtccgggaaggccccaggaccgcgcggctgagcggcctggaggctgcgggagggcagagcagggcgcgcgggagactgccgcccccgggcgcccagggcccggctccccagcgccaccgccgcagcaggtgggggcccagtgggcgggggcggggcccggctctgggcggagccgaggcggcggcggcgcaggctggggccggggccggggcgggagccggagcccgagctggagcagcgagccgggctgtcggggcgaccgcgggagctcgccgtgcgccgtggctgggaccggcctggccgagcgcgccggcgccgcggccgcagacaaagggcggctcgcgcccgggccgccacgctctcgggctctgcctcggtaagtggctcccctccgctggctttctcctcccgccgcctgcgcctctcggagttcggcgggctccggagaagcggggaagagatgagacttccccgcccgcactgcctccccaccttaccctaacaataagccccccaggccaagccactgccaaactagcgagtttccgagcggcgggggtctcccgcgggacccgcccggctgccctgggtgagctcctcgcctgcagaccgcgcgccggtgctgtcctggacccgtttgggatgggaggttgccgctgggctcctcgcgttgtgtttaggggaggaggacgcaggggccgggcgccgctaggggaccccacccccggggacagtccggagcgcttggggtcgccgaggggcagttcacactgcgagttcagattcggatcgcagtcccgattatcctcccctccagcctctccctttctcgttgaagggttaatacagcgtcctctcccctcgccacccgacagaggcgcctacactggcggtaggtagcccctgggagagggggagtggggggaccccgccgctttcgccgctgggcgacccagagccccagcctgccggagagggcagcggctcgggtttgacatcccagctgggtcccgggccggctccctgagcctcctcccgggttgctctctatcaggaaagcaatcggaagtcaggccggcttttgcttttgttctgccagctactctacggaatcgtaggtgaagccggggtgggcggatgccccgggagggggctgtggcgggagttccaggtgcgtccccgaaatgaccattggaggcggcggctgtttcccgcccctgggtggggaatggattccgatcgctaatcgataccctggagccagcagtgggtcagcagcgtcccgacaga

SEQ ID NO: 2002 - DNA, 6000 bp, Homo sapiens
tatttttagcaacaccactacattctcctattagttctaatagttcttctaaaagaactagagtctgaaggtttttagttgtgcaattacagcatttacaatgaaacaatttctttcttccttttccatatttgtatctactatttcattttcatgtcttactgctttattttagtctctaaaacaatattaataatagtggtgataggaggcatctctgttgtattcctgaatttggtggctttagtacagctccactttgtgtgctgtttgctgtgttgtttttagtagttagcatttattgttccttgaaggaccagtaaggttggatgaaatccagaagcgtcctgggagtcacacgaaaaaataactatttcaggagaaaggagtgattgactacatcaaatgatggataggtcaagtaagataaagcctgagaactgatcattagatttaaaaacatagaggtctgtgatgaccttgaccagagcatggagtgatgattggaatgggttagacagaggatgcggggagaggaggtagagaccgggagaggaggcaagttctgttttgccaggagatgttgtaaaggggagaagagagttgaggcagcagctggaggagaatggggtcaaaagagtatttttgttttgttttgttttttaaagatgggagacattaaactatatttgaaagttactgcttaggacccagcattaaggtaaaactggtgatcaaacagagagaggcatgttatagagagatgtgcttacaaaagtgagaggagcgagatcttgtacacaagtggagggtgacttttttttttttttcttgagacagaatcttgctctgttgcccaggctggagtacagtggtgggatctcagctcactgcaacctccgcctcccaggctcaaacgattctcctgcctcagcctcctgagtaactgggactatagatgtgcgccaccacgcctggctaattttttatattttagtagagacatgttgcccatgtcgcctaggctggtcttgaactgctgagctcaggcaatctgcccacctcggcctcccaaagtgctaggattacaggtgtgagccactgggcccaggcagaaagaggcctcatgcagtattcagccctcttgcccttctgccttatgccatatgaggacacagcattcctcccctccagaggatgcagccatgaagcgccatcttggaagcagatacctgaccctcaccagagaccaatcctgccattgccttgatcttggattcccagcctccagaactgagggaaatacatttccgttcattataaattacccagtcttaggtattctgttataacagcacaaacatattaagacaaggagggaaggcagactatgagagacagggacagatgctggtaagtgggccactgtagtcgcctattgtttctttttctccacagacgtatagctttcctaggtgattctcataagcgtgcaagtgtggaatcactcgtctatagctagaaccaagcaacttacacagcttatcacttccttcaatcaagttgatcctacatcttggatctcatctctcttgtgatgaggaaagccgtttccagaagaaagaatgaagaaagtgtgatttcaaattcctaggccctagatcccactctatgagaacagcccaggctggtctcaacttcatagctggacaggctggacctatgagaaaagagagggaggaaaggaaagggagagggagagggagagggagggaggaacagaaagagagagaaagaggtagataaatagagacaaggagaaaaaacgtcagtcctctcccaagaaagaagcaacccaagaggaagaagggcacctggctgctcagggtatcccctcatctagaagccatggtatagtgggttcctcaaacatggccagtgcttacccccggaagagaggccacatgcaaagtcattggccccgatgccaactcctcctgggaacagaaagggtggggtcaggaatctgtttaatcacctaagttgcttccctcctctacctagatctgagtcaaaaacaggtgccatgggagacaaatttagccagcacaatatttttgaaaagtataccgaaataccctaagcaaggcagacagggcacttttttgctctgtgcagcaccccttgcccccatatcctccagggctactgtagatgtgggcacccctggcctagctaccgagttacagcttctggtgtctagtcacaggcagtaaggaaatgctggctcatttttttttcctcccagaaaaaaagtcttcaaacagaatgacctggtgaacttcccaactccagaattctgtgcagttattttctagtgactgacaccgacttcagccagctgtttctttagaagtcttccctatggagtaaaaataagaaataacttgtttcctgatagcagcaaggagaacagaacaccactttacctgacagtggagagccccagacagatactcgcttcctgttcattcccctgccatcgtacggtaatgggcactgatattaaacatgcatatttcacagtctcttgtcccgcgatttggaggatggccattcactatgtatgaaccactcactcatgctcatcacacagagaaaattacattttcccagttgccaaatggaagagataaattatctcacgtggacaagcacattgctctcaagagcagcttccagacctaagataaacagattaaaaaaaaaaaacaaaaacacgctggagggggactctgagctttccaggtgttgatgggggtcagtctcttcattcggactcgccagatcctcactttgcagttagtgggcttaaagtggcgggacatttgcccttctgtttcttttggattaaatgagcagccttggggcctcttattcttccttcatagaagagatgttataaaaatgaataaatcaacacaaaacatttcatatttatgcctacttgctgaattgatactacttgtaatgaaaatcaaggaagcaaaatgttaaaatgttctctttggggaagacacattggaatgtcttaccacagatatacacacactcgcttgttacacactccttccttatccctaactattctctgaggttaatgaaggtcctgataactgcagtctctaacttagcatatcatcctaaacctactacctgcacacataggagtcgcagcgcaactatgtactaatggcagccaacactcattacccttcataccaccatcactgtgcaaacccttagtgcattttccaatatgatcccacaatccttcatttttatgttttgcccacgctaaaattcgacagcgaattcttgcaacaattattaagcgtctggaattgtattagggtctgggggtagaggtgggggacgaagcgggaataactgcagtacacagcagaccctatgaaagtgccaaaacgcaggtctcactcggaaggctttgggagttgggagaggagaaggctcatgggcagctaaagccaccagtgacctcattatgcaatatttaggttatcagacttttctatgcctagaaaagcagcgcctcaaccattccaacgggacgcaccgcgttcagtgacgaccctcatcggtgcccacagctctgggctcgctgaaggcaccacagaagcaccagttattaccagtgttagggtccagtggcttcttctgtccctttcctctggatcccaaagtgttggttctcttttgttagttttattccggtcatgccaatgagcacagattcacagcccaggcggcccgctcggaatcccaggccggctggggaccggtgcacttgggctccgcgccccctcgaccctcggcccagtgccccttcccgcgcgcgcgggtctccccggttccagagcccaccggtccccgccggctccttctccccacccaccctcccaccgggcccccggcggctgcagccgcgcggggctggcggggcggcgaccgggctcaggcagatccccgcttcccgccttctcggcgccccctccctcccggacggagcccgaggatcccccacccacggcgggcgtgaggaagggcttctgagtgactggagctctaccgcgtgtgccccgggaaggccaggctacccgggacggggctcggctccccaggtgagctcgtctccgcgggactgggtccgggaaggccccaggaccgcgcggctgagcggcctggaggctgcgggagggcagagcagggcgcgcgggagactgccgcccccgggcgcccagggcccggctccccagcgccaccgccgcagcaggtgggggcccagtgggcgggggcggggcccggctctgggcggagccgaggcggcggcggcgcaggctggggccggggccggggcgggagccggagcccgagctggagcagcgagccgggctgtcggggcgaccgcgggagctcgccgtgcgccgtggctgggaccggcctggccgagcgcgccggcgccgcggccgcagacaaagggcggctcgcgcccgggccgccacgctctcgggctctgcctcggtaagtggctcccctccgctggctttctcctcccgccgcctgcgcctctcggagttcggcgggctccggagaagcggggaagagatgagacttccccgcccgcactgcctccccaccttaccctaacaataagccccccaggccaagccactgccaaactagcgagtttccgagcggcgggggtctcccgcgggacccgcccggctgccctgggtgagctcctcgcctgcagaccgcgcgccggtgctgtcctggacccgtttgggatgggaggttgccgctgggctcctcgcgttgtgtttaggggaggaggacgcaggggccgggcgccgctaggggaccccacccccggggacagtccggagcgcttggggtcgccgaggggcagttcacactgcgagttcagattcggatcgcagtcccgattatcctcccctccagcctctccctttctcgttgaagggttaatacagcgtcctctcccctcgccacccgacagaggcgcctacactggcggtaggtagcccctgggagagggggagtggggggaccccgccgctttcgccgctgggcgacccagagccccagcctgccggagagggcagcggctcgggtttgacatcccagctgggtcccgggccggctccctgagcctcctcccgggttgctctctatcaggaaagcaatcggaagtcaggccggcttttgcttttgttctgccagctactctacggaatcgtaggtgaagccggggtgggcggatgccccgggagggggctgtggcgggagttccaggtgcgtccccgaaatgaccattggaggcggcggctgtttcccgcccctgggtggggaatggattccgatcgctaatcgataccctggagccagcagtgggtcagcagcgtcccgacagagcgcagcggccgcgtactgtcacgcgcctctccagcactctcgaaagcactacctcgagacgtgcatttccattcatggatctgtgcctgggggttgattaatgtcacccctgcctgggttgaggagtgtccacaactgctcagtagccatttactgggaggttactgtgtgcaaggcagctatcttaaataaccttaatgtaaaatatacttattgagcacctactatgtgaaaagcaggtatactgcagacttttcaattgaatggatatgtattgagcacctaccccgtgcgaaggtgaagcgtcatgacgttctcaatgtaacagatatttattgagtacctactatgttcaagatagctatgctatgaccttattgtaatatgtatttactgagcacctactaaatactaaaggcttttttgctgaagggttgcccagtgtacttttggggtacggatagaaacaagggagagaaaata

SEQ ID NO: 2003 - DNA, 6000 bp, Homo sapiens
gcagttccaccatcttcatcatgtcctctttaccatctctccagcaggcttctgttaagatgcaagtggggttgcggagcaaggcacatcagccataccacagaattgcagaactagaagggactttaggccagattaggtagcttttggagagctgggccctgagggcatcaaatttgcatatgagctgaaccaagcctcacctcctaggtagctccctaggaggccaggcctgggatagtgtcgccttgaggggcaacaggaagactgagtccaagaggaaggagacagtgcagtgcaggaggagccagaaaagggccgggtcccaacacacttcaggacctgcttgtgaatgagctagaggatgttcccacggagtctagagcagaggtccacgaactacagcccacaagcctaatctggcccagcacctatttttgtaaataaagttttactgaaatgcagccatgctcatttgttcaggtatattgtctgtggctgcttttgtgctataaaggcagaattaagttgtgttgagtggtttcaacagaggctgtatgtcctacaaacatggaaatatttgttatctggctcgttatagaaaaagtttgccaatgcctggtctagaggactccattcacatagaccacagtgactcattaggatcatgagccttggagtcagactgactgcgatgtgaatggtgccacctagaactgtgcagtgcatagcatgctcagctggaaatagcggctcctcgggagaagggcttcctgtaagtttcagagtgttcaggagaggggaagaaagcagtgtctgtgaaatgtcagcaccttgctggggagatagttcctgtggaaagtcgaaagcatgaggttcgggaggatctgagcagatggggaggtaagtctaaatttagactttccaaagctgatttgtaaaccaaagccccaggaatcccagaaagggacagttggcacacgccatctcatctctggtttgcctccgcatgttaaaaggctggatgagtgagagaataattaattggcctcaactaagctgttacctgagagtcagtgagaaagcagttgagagctgaaactccattgttcagagtcctgagggtagaactttctattcctgtgttttattacgatgcccagccatggaatcgtggggaccttggctgctcttgtgagagttccatgcattcctcttgctgggtgtcattcaagcacgattgaacgagtgacctttccatctcagacagtgaatgccacctccctgggtttgaaatcacacctgtgattcggagcagctctgaaccaccacctttgagctgagaatggttgggctttgccctgagaagctgcaccacaccaagagctgccataaccactcccctgcccaggtggacacatccagatgccagtctgctcctccccagggccagtgggcccacacctctcagcatatcatgcaagaaatggaccactaaccttagacttcttaggcggtggatgccttgtaatcagcccacctagggagaaaggcaaagggcttacaatgcaaattacagaggaattggaaagaattgctctgtaaagaaacaggaaagaaagaaacagaaaatgaagaggcttgagaagagaggcataataataaactcaaatgggaacagagaaatggtcagacaagaggctgcctgattagagcactgaaactctaagagaggcagcatctaagcagaatatgttactaagaggattgaagttcagaaatattagttggtctgaatggttagggcttgttgtgagatgcgccctttgaacaatttccatggcaagtatcacaagggacagtgaccacctaggaaacgtgggcatcaccactgtgtagacataatgaacggtactcagctccttccagtcaacggatattttctatgctctactttgtgccctgtaagctacttgtgaagcttacagtctagttgggagatggacatgtacaaaaagttaaataacagcccaggctaatgtatggtaaatgccaaacacagcgtacacatgagtgccacaggagtttagaaaagggagacatgtcattgagaaccaggatggatgctttaggaaagaagtgagactttggattctgaatgataggatttcaacaaatgggggtggtggggaagcaggagaatatttcaggaactgggaagatacaagcaaaaaagccaggcagcaaagagtctatttagcagcccacaagaaaggtggagtggctggaattgaggcttgccacgttgacatcgtacctggcccctaagctgacagcatattgggaagaccactgaaaaagagacacacacacgggatacagtccctcccatgcatgagagggaaagagttttaaaaataaataaagcacctcttaattattcgctgattatctgcattgcagctgatctcaagcaaatcctgcattcagcttgcttgtgatgtcatcccctctgcttaggtgctcattcctctctctgtttacaacccagcagaagctggaaaggaagaaggcttaagcatgtctcttcctaaaaaaaataatgatatgcaattgcctctttttgctatgcccttgggagtcagaccaggcttgtggggagaaagagaagcttcagtgtagttgccattacatgacttgggcagcaggagtcaaggagggagagaatggagagctgtggaggctctttgattcccctgagttaggtatccaggccaacttcgctagcacaggccatagaatctggttcactgggtgctcccagcactgtctcttagtggctgggcatcctcaaacagagtgaatggtattcatttatccattcatcagatggatattgaccctatgtatgctgaaagcactaagctggtgctctccaagccttggtatcctcacctgtaaagttagaactggaatcagaatcgatgtttctcagtggaagtgctgttggcattcaggggtggaggggtggatgtcagtggatgtgctctgggcatttgggcatggaggtgggaatgctcggtagaatggttagcaaatccggccctacccattaaataccagtaatgactcccagtcaaataaggtgaggagggcagtaccatctccagataaggaccacgggccttgttttcttagatttcttcccaatctgaaattctgtaagtctatggttgttttgttcctggacccagtaaaaacatgcagaacagaattaccgaagatctgacaaattatcagaatcttgagtacatcttattcaaatgtaagggaatgtttaactaaacagcaacaataggtaacatctgttaagcaattactatgttctagacccttggcaaatttccttcattagaagtctttacaggcgatctgattgtttactatttcagatcatctgtgtcccctaatttgcccccttaatttcagagcattgagttgactatcgtttttgcttcatttatctttgcagagttgtgcgaagttcagatagcaaagtgtctctataggaggccctgcgatatgagaataaagcagcagtctgccaagttcatgcctttgtgttggatacagtcttctttctttgtgtgtctgtggtctttatgaacttagaaaacctgccagtctcttagacgctatgatattaccttacttcagagatctgaatttacatgtctagttttgcagggtttttcctccccacttagttcctatacctgtaatttgagtcaacagccaccagagggcagggacagtgaagtttagatttgacccattgctttgaagagcgaggtcacattgtcaaaaagaatacagctcaccatgccagttttgatatagcactgggaactctgcaccctggtttctgggcaaagagagtccttttattataggtggcaacattatttccttgtaatttggtacatgggcttcttcaacttacgtggaaagcaagagatacaaatgtcattacatcttagtccctgtgaaagcctcttaaaatgttcaaagacatttgtaaaagaaggaagaaaaggaacccaagtgcaaaaacacgagtatcgatcctttgttttctgtctgcaactcattgctttctactctcacccttcctagctagcgctgatgtgtgtgtttggagagcataaaacaaattaattttccgaaggtcagaagggataattctccaccgtaatttgcacatgttaaacttgggggagcaggcactgacataagaggcacagcatctgatggtcttatcaaatcaatccatcttctgtctcttccaggggagtgctacgcacagcaggagggtggctgggcagtgcaaagccccggaatcccctgagcaagcagtgtttcagctggctggacagatcaaataacacttgggctggttaacaaaagacgcaagtgggaaggtgttggaagccggagtgtggaaatttacccaacgttatttctttgacagggaaggagacttggtctgaaagatgccacattcctgcagcctctcttggtgcagtggaatacagtcttgggcgaggtggcgtggatgagctggtgaaagaggatgctgcccacatccaaaggctccagaggatcctggcctggcagctgagctcccctgcatttggaacctcaggcgtaacttggtgtagagctcatgaaaggtgcttgtgtttctccagcttttttcaccagtgcttaccagactggctcaggttttggaatctaaggtgagctggtagaaacaggagaggtagaaagaagcccctggatgcctccagaattcattgatgggatccctgcatactgcttggaacacagaaagaggctgtgacacagctgagctttggagcatcttaaggagctcagctcagcaaacaactcttgcatttcagccagaaagagcctcttgtaacaaagtattcaaaggggagagtttctgcatcttttactttgcagtccactatggtagaaaacttgacattccatagataatgatactgggttttctttccaagatgccagctttaaaagaaatatgagccattctaagctttaagaagggttcaggaaacacaggaattagtagacagccctcccaatgcaggttaagacgacagcctgcgcccccaactagcacagctcagcgagcatgaccatatgccattctcgtctccagagagctggtggcagtgacctcactaggagaaaacacatccctcagccgtgggacttgacagaatgaggtgcgcgagggaggccgctagccgagacttggcctttcctgactgcccctgtgttacctgggcagctccagatcactgagcccacaatggctgagaagggtgactgcatcgccagtgtctatgggtatgacctcggtgggcgctttgttgacttccaacccctgggcttcggtgtcaatggtttggtgctgtcggccgtggacagccgggcctgccggaaggtcgctgtgaagaagattgccctgagcgatgcccgcagcatgaagcacgcgctccgagagatcaagatcattcggcgcctggaccacgacaacatcgtcaaagtgtacgaggtgctcggtcccaagggcactgacctgcagggtgagctgttcaagttcagcgtggcgtacatcgtccaggagtacatggagaccgacctggcacgcctgctggagcagggcacgctggcagaagagcatgccaagctgttcatgtaccagctgctccgcgggctcaagtacatccactccgccaacgtgctgcacagggacctgaagcccgccaacatcttcatcagcacagaggacctcgtgctcaagattggggatttcgggttggcaaggatcgttgatcagcattactcccacaaggtatgtctggctggaatggcggatactggtggtccacagaatccccaagaata

SEQ ID NO: 2004 - DNA, 6000 bp, Homo sapiens
gccaaaatcaatatatcagtaggactgtgttccctacagaggctccagtgaacatctggtttttttccttctccaaccttcagaggctgcctgcattccttggctcatgaacccttccagtaatggcatcactgtgccctgacctctgcttttgccctcacatcccttcctccaactctggctttctgtctctctcttccattttctaaggcccctgtgatttcactgggcacattgggtaatcaaagataatcgcctcatcttatgatcttaactttataacatttgcaaatcccttttatcatgtaaagtcacattttcacaggttttgccgattcggatgtaggtattttgaggtagggggtggagggtatttttctgcctaccacaggttcttcatggggatctgatggaagcaccaagatttcttttaaattagtcccttcattgaaactcatactcttccacagtctgaggggaaaaggattactcccagcagtgcctccatgagggacgcaaagcttctccttcaaacaagccccagaaaatgtcttcttcactctgattggctgagggctcagttttgaatttctcatcgtgatcagaaagacaggctactctgcgtgactaaagtgattcaggatccattacctcaattttgtagttgagaaatgtggagcagtagtaccctcagagcaaactgtaagacctgttattagaataagttagaagagattaggaggaagacaagcaagcaaacaaaaaacaaaaacaaaagcccacaaatatcacctaaaatataccacttcaccccatgattgtaaattagcccatgtcaaatgaccacatcatatttatatttgtatattctatatagatagcacatagcctaagtctaatataataattggctttcttaaatgactaaatggtgaactattatattgtcacattcatgtgatttgatctgcaacgtaataaaattcatagctttataataccttttgactaggtgttattggttttgcaaatatatttctcaaatatgttttagaaagtattgaaagtcagattatgatattgggagaacaaaaatagattcagataattaattttcagaataaaaataagacaagaatgcagttccaaaatggatgttctgaaaggaattgtacacttttaatttgtcttattttcttggcctaatctcagaaaatcaatgctcctcatacacccccacccctaatacacacataactaagagtatatgtgatttgaaaaaactgaaagtgcagattaatgcaccttctgaactcaaaagtgtgtctggacatctgtatattctatcaccagattaaacctcagaaggggtctttcaaaacgtcttaaatactatgtgaagagtatcagctatgctaaactatttgctgtggcccgcatttctctcctgtttctgcctgatcttttgatattctttttttgtttttgttttcctagtaagaggctatgtggcaagtgggcctgatacctctgagaggagagatgaggagacgcagtgtctctcaagtataaatcactgaactgtgagtcagaaaatagcaaagttgtttctaagagaatactctaaaatcaagctgagtcatctaagatgaaggaaagagtattggggaagagaatacaagcaactttcagaagctagctgtggaaccaaatgagtatctaagaggaagagaagtcaatggtcttttgtagaagcccattagtcagtggactgatggcttggattactcagtacaggggtcaagggccatagtgaagagtaacttgatcactagaacagctatgtgaggctgaaggagatctgagtggtatttggttttctgtttctgtattaatttgctgaggataatgctttccatcttcatctgtatccctgtgaaggacatgatttcattcctttttatggctgcatagtattccgtggtgtatatacaccacattttctttatccggtctattattgatgagcatttaggatgattccatgtctttgctattatgaatagtgctgcaatgaacatatgtgtgcatgtacctttataatagaatgatttacattcttttgggtgtatatccagtaacaagattgctgggtcaaatggtatttctgcctctaagtctttgaggaataaccacaatgtcttccacaatgttctcacttataagtgggagcaaaatgatgagaacacatggacacatggcgagggaacaaaacacactgggatctctcagagggaggggctgaggggagggaaagcattaggaagaatagctaatggatgctgagcttcatacctaggcgatgggatgatctgtgcagcaaaccaccatggcacacatttagctctgtaacaaacctgcatatcctgcacatgtaccatgaacttaaaataaatttgaagaaaaatccagatctgagcaacatggaccatttttggtttcctaccctccctcccacttgttgaagacatcctattactgatatgggaaatacaggacttcattagtcttgagaagaagttgcaactcttccctcatacctactatcttatgcaatggttctttacatcattttggcagggaggcaggcttgaactcaccttatacatttactgaaagctaaagattcccttcccagttaaacagcatgttcacacaagccaatcacttttcataaaatttcaggatattcacaaacttcctgaattttgttggtggagacttcctgggaagattcatggactgagttaagaacccttgctgtagaacccagtcctgaaccactagaggcttcacctcagctaatggaagttttgagtgtttcaagaaatttgggggtaaccaaagagtttcatccaattctaaagaatccatccatgtaagctatttcagaaggttttgctttagtgaacacaggcacttcatattttaacttttccaggacaggaaggaatgggcatgactagggatctaaaacactgttgtccagttccagcatcataggagtttccctgatgatgattttatcctggatttttcatgctttccctcacgcctttcttcttaaatagatgttcacattctctctgctcacagcctggtgagcatgggagggtgacaagaacaggtggggaagaatctagtaaggaatggtctgaatccacagctgaacatctccttaaacgacagaattttaccagaatgacatttctattcattatccttcccggccaaattaattggtttgtaagttcacttattctgcagaaacgtattggcatgtgcagaattccaagttctatgctagcatctgtgaggagtgcaaaaatggatggcatacaacctctctcttctcaaaggagcttgagttcccgcagcagagacaagttatgcaaaggaactcagcttaaaacagtttcctgaaagggctttactgttcacccttcctaagtttcctgctgtgtgtgtgcttgtgtgtgtgtgcacacacacgcgtgtgtatggttgcttcactttatctgccagggactggagaaatgtctctcttgttttcccagagcaccccctccattacgtgaaccatcatatttatcacgatactttataattatccatttagcttctctcctgacggatcacaaaccccttgaggatagagactgagtctcactggatgtcccaactatttcctgggagccaacagaacacctggaacatgataagtgcttttaaatatgttaaagaaaacaattgcgagagaagagagaacacagacgacatgagacgtcctacaaaaggaggccccttagctattatgtcaggaaataactctggcctttgtcctgtccgctgtgtgtttcaggatctcgatttccctcccgtcctagaagggagttggatcaggtgattctttccaaatgaaaaattgtattttaaataatgccaagggcagagaaggaagtaaacatcctggccacctcctccgccttaaacgcccgcctaggttttacagtcaaataccaataatttcctgaaggctgagtgtcaaacacggtcgctgcaaaacctccagacgctcaggatgttcgcaggctccattgacaaaagtgacttcccacgctttgcccacagagggcatccctgcgcattgatacgcagaccaggcaaatgcagctcctggaagcctcctcggtccgctcttttttccctaagccatagtctgtctgcccccacccccttcccgtggaatctttgcctgatccagttcgtttccctccggtctccacattttcccttccagccctccacttctccggatcaatgtgtagtacggttccaactcccagctcgcacaccgctggcggacaccccagtaacaagtgagagcgctccaccccgcagtcccccccgcctctcctccctgggtcccctcggctctcggaagaaaaaccaacagcatctccagctctcgcgcggaattgtctcttcaactttacccaaccgacgacaaggaaccagcctcaaccttttaatgcacagcccggccacaggattgccttccatctcctcttggtccctcctggatgtggtttattgatgacttgcgagcccctcagagagctgtcttccctcctctggctccctccgtttccttgagttagttttctaaggttttaccggggctcgggatctcttggaccgaatggaactttttgctgcctgcttttgctgctgattctgtcagtggacaaggaaaaaggcttcgaaggcagcagaggcgcaggggaggtggagaaagaggtggaggaagaggacgaggaggaggaggaagccgaaggggctcggcgcgtgtgtgtgcatgtgtgcatgcgtgtgtgagtgcatgtgtgtgagtgctgccgctgcccgcgacccctggccccgaaggtgttggctgaaatatggagaatagtcttagatgtgtttgggtacccaagctggcttttgtactcttcggagcttccttgttcagcgcgcatcttcaagtaaccggtaagtggctctttcctttcttctcgtcgcacccccttccgtaccccacttcccttctcatttcatttggcgagtagtagaattggggtgggggatagcaagagatttggcgcttgcgctgcccccatttgcgcaccgatgataaaagatagaagagtttttttcttccctgggggcggatgatggtgggggggtggtacaaggggcgccccttcgctgttttaaaatctgatgcttcacgcatttttgcttctgcaaatacttgggttggtttggagagccggcgggctggggcaggtgctggggatatcgttgaaaggaactgggctgggtccttaaagccccagaaacctaccaagtggggaggattggggcaacaggagcaggcgaggaggacatccaggggctttgaggaagtctgcgcagaatgtagatggtggggctgagtcgttggtgtgtgaatacatctccttttggtttggatttttggacttggtgattgagaatagggaaagggacagctaatatgttttggtacttccaaggaggggatcctggtactgaaggaggcacagagttgccaaggaggaggggaggtgtgtttaatattgttttattttttaacggtgaatgtagttcgcaagctgagtctccatatagctccaggacacctccaaactccaagtgattgatattccagagaaccggcgccctgaccctggcacttgcctagctcagtttctaattaaaaatggcaaaactgtttggggattggatctggctagtgcaggagaaagagggacctggaggctggctgatcaggactgctgtaatctccgaatacggagctggcggcttcgacggccaaaagaatagaaaagagcaaaatgactcatgataaggtccact

SEQ ID NO: 2005 - DNA, 6000 bp, Homo sapiens
gtgaactctgatgtcagactccgttgtgtaagtttcttaatggatgagatttgggaactttccagtctatttctccacaatatattatagttgtcttaagtaattttatggcagagttcaaaggatttctttctttatgaagcaaggcttggaaatgtaactatttgagggttcaaggggatggccattggacatcttaaaaataaaaccaaacaaaataaacttctccattaggttttcacctggatgaaatcctcaccattgtaattctaatatgaaattctctgcagcattgtaaaatcggaagtttagttttgattctcaaaatgagttcttctgttgccttcccatgacctccttccatgcattttccaggaggtctacactttgaatgaactctgagtacctaattccagactacaactttttgagccacaggctccgaagttatttctacttcttgtcttcttcagttttatcatctctgtcttcctctcttcatacattaaatcagcgtagttgatttaagattaatccttggatgaagtcattttataaaattattttatattaagaaattatatactggtgggcaaaatctctccaaatggaaccagtacactaagagaaagggttgagggggtttatctaaattgatgtcaatgtaatgtattcgtgggacatttcttagtcctgtgtgcaatacaaggaagttaaaggtagccttgcctaatgacacggtatttttcagtgccgcttcgccagccggaaatcttccacaacacgcagcgctcctgcctgggcctcactgggttccgagctggccgctgagctggttctgcccactcagtctgacaggctgcggtcggctcgtgctacgacccctgatcccacgcccaccataggcgtgccaggcatggagcggtgaggggtgtgtgagtgagtgagtgcggaatccagccaccaccgcacagagccaggtgcgccagctgctgcagtgcggcaggcagctttaggtgccggcacaggcgctggttccctgtgaggcggcagctggaccaggcatactgcaagcaaattctgccttcgatgctggtgtctggactgggggaacacggtgacacccaaaaaacttagagacgccaacaaccacagagccccaaaagggtgttacagcatgtcaccgtttgtttgttcccgtagcccagcaaacaagggtgtgtcagagctctggctccgggagtcccaaggtctgcacctccagaagggttgcagctcttctctccttcctgccatatgcagcacagtgaacggggcaaggggtgggcaggagtgtgtttcggctcctttgtgttacagctcattcagtcctgctgcactactctggcccacagctcttgggctggcccggccccactgcagcttcttgtcgtcttgggtggccactcgggcagcagtggagggctggagggctacagtgttacagctccttttgcacctgatgttcaatgggtcccaggttcttgtcctgcatccaagaagaatgaggttgcttggataactggagagtgagcaaggtggagaaaagttttactgagtgacagaacatctctgggcggagaggcgatctgcagtgggtagtccccaggtgtggctgagtctggagtttttataggctcagaatgtgggaggtgcagcctgtaggtagccatggaaaaggcaatatttgattggttaaaaagcattattcaggctggacccattggctcatgcctgtaatctcagcacttcgggaggctgaggcaggtggaacaactgaggtcaggagtttgagaccagcctggccaaatatggccaacatggccatctctactaaaaatacaaaaattagccaggtgtggtggcgcatgcctgtaatcccagttactggggaagctgaggcaggagagtcacctgaggcggaggttgcagtgagccaagatcgcatcactgcactccagcctgggagacagagccagactccatcgcccaaaaaaaagaaaaaaaaaagaattattcagaaagaaccaatcaggaaagaacaggcaaacaggaacagaagttctcactctggtcacagactccattcagaaccagcagcccagttttcaggctttaggcttttttcggcttgaaggttgggtttcactggggacccacccctgtctgcctgggaatttgtctgcctcctgccactgtcactaacatgagctgaaacttagaaaaggagaccaatagaatcatatctactatttctcaattaacttgattcaccaggatccatcttttctataaaactaatcactaatgcaagttacttaaagcagtgaggtgcctatatcccaaagccatatattcaaaatataattgttataaagagtacaaaaagctcaaattgccattgaactgcaagggtaattgtgttaaagttgatctatgtactcacagcactgaaaactgtcataatctccttgtttcagactaagtggattatttatgtgtgataatgggcacatatgctcattaacatgctgtcataaacagctgtgttaaatgtattatgtgttctgtgacataaataaggtgcttaacatgaggttgtgtttaaaatataggccccaggaagaacaaaaaagcaatacatgctttctaatatagttgcctgctcttgaatttcaaatttatttcttctttattaatgctacttgtatggaaattgtgggtattactctagcgaaatatcttggcattcaaggacattagaacttctttctgctgtctcatccttagtgtttctcaagccaggtttgctagcttgtgtttcttttctggtagaggaagagatcacgtagacatgggaaaggtattttcagcaaaatcagccttaagtgattcagcaagcttagagcagggttcatttgacagatgctctcaattcaatcttgttctaaaagcctccaaactagatgttgaacttagagatcatctagttcaacttcttaatttttgcagatgaaggaactgagtttctgagggcttaaaagacctttctgagtcatgaattttgaagtgataaaaccaagacctaaggctagatatccagacagccaattcaatgtacttcccactagaagaacaggatgtactataattgggttgactacaccaaaaggatctgtggggagaaggagcttatttgaaaataaagacaccaggctgctgtcatctgggatctttatcaatatccatctataatagagttatgtgctcaccattattttacaatttatattaattcaagcaaagttccagatgctttctgagtgagtggccaaggtgaaaggaatgaatatatgacagtgagcgacacaagacatcattgggcagaataacagacttcaaacgtaagttttagaaaaattgagtatgcaggaacgaagcaaataaaaccagggagaaaccgtaagaagctgttctgctttctcttcactgtaaaatggggtgtacaaagatagaaatagttctgtccatcaggaccagtatgagttaaccccttatgagaatatggattacctgcaatttagatgcctgccttttaaatgacagaagattggaatgattttacaaagtacaacgaaaagtgttcccattacagaaaaatgaaggaagctaatgaagtcaaggttgctatcgtggaaaaaaaaaatgaagactaaaacataatttaggtggtattttttaagaaatgaaatgccatttcaaacaaataaagggctcttaaagaaaatgtccatctcttctgcattttcacacaaggtgtttcaggagaaaatgggattaaacatcagcaagaaaattcagttagactcttaaaatgattaaatattgaaaacaagataccgagggacattgtagaatctctagccccaaagattgttcaaaatgaaattgaaagtaatttgacttgaatgatttaagtatacacctgtctgagcaaatggtggagccaatgacctcctgaaaccttgtcaaggtctttgactcaacatgtgagtattctgtcaaatgctatactgccagcttcaaaaacaatatactttaactgattatacttgcttcctcccctcaagattcttaaatgaatttctattacccttggttgattctttatgttcatttacgtttatgaaacaaattcaactgtaatatttatttagatttccaagcccatgagaaacatttggatgaaaattaagacccttcagggatttgtgattttaggtagtagctttattgacttgcttctgccagtgggatttacctattttaaaacccacctgagctttgtcctaaataactttgcccatgctgttcagagttgacttttattcttatagaaccctgtatcagattggattttttaaaaatttcaatggatgccataatcagaatgaagagatagaaatagtctccccaaaagtcttagctaccacactaataactattgctactttaaaatatctaattttatttggaaaatattagttttttctgtctaaattttcatgtactgactgatatgtggtaataagcatgccaggatttatatgaatttgtaatttctcataatattaacttttggagccaattgttttcttaattatgattacctcgactgggtacttttttgcttatttaacataatatccttgattttagtttttatttattcttggacattgttcaaagccctcagcttttgtgaaaagctttgtaaagaaaagacagggaatctaagcctgagatttatttgaatacatgaacatatttccctgtgctctcttgttccaggttttcaaattaaagctttcacagcactgcgcttcctctcagaaccttctgatgccgtcacaatgcggggaggaaatgtcctcctcgactgctccgcggagtccgaccgaggagttccagtgatcaagtggaagaaagatggcattcatctggccttgggaatggatgaaaggaagcagcaactttcaaatgggtctctgctgatacaaaacatacttcattccagacaccacaagccagatgagggactttaccaatgtgaggcatctttaggagattctggctcaattattagtcggacagcaaaagttgcagtagcaggtaggtggattcttccttctcttcctcctcctccttcctctcttcttcttattcatttttggggatgagaaaataatttttgtagaaataatgtacattttaaaaatcttttaaattttaagttgacaagtaattatatatttttatgaagtacaatgtcatgttttgatgtatgtatacatcgtggagtgattatatcaagctaattaacatatctgtcaccacatacttctctcttttctgtggtgagaacatttaaaatctactcttttagcaattttgatatatacgttgctgtgcaatagatattaaaagcttatttcttctctctcactgaaaccttgtgccctttgacaaacatctttccattccttaccacgccccatcttcccaagcctctggtaaccattctgctctctagttctatgagtctgacttttttataatagattctacctgtaagtgagatcatgcagtatttttctttcagtgcctggcatgtttcccttagcataatatcctgtaggttcatctatgttatcacaaataacaggatttactctttttaaaggctgaatagtattccattgtgtgtgtgtatgtatatcatatatacacacacacacatatatatatatatctcatattttctttacccattcgtgattgattccacatcttggctgttgtgaataatgctgcaattaacatggagtatagatatctcttatataccctcatttcaattcctttggatatatacccataagtaggattgttgtatcatat

SEQ ID NO: 2006 - DNA, 6000 bp, Homo sapiens
ctcggcctcccaaagtgctgggattacaggcatgagccactgcacccggctgagaagttattttttaagcagttttctttctttctttctttctttcttttttttgagatggagtctcactctctcacccatgctggagtgcagtggcatgatcttggctcactgcaatctctgcctcccgggttcaagcaattctcctgtttcagcctcctgagtagctgggactacaggtccccgccaccacgcctggctaatttttgtatttttagtagagacggggttccaccatattggtcagcctggtcttgaattcctgacctcaggtgatctgcccacctctgcctcccaaagtgctgggattacagccgtgagccactgcgctcggcctcatttttcttttatgcaaactatatggactacttgtttttattctctctagtcagctcattttatttatggattaatttccatttcaggttggggccatggtttactcttccatctgacctattagttatcaatatcctcagttaatagtctcattctacccacattttcaataaaaagtttactagctgggaagatttgatacacacacatgattttttttttcttttcttttctttttttttttgagacagggtatcagtctgtcacccaggctgcagtgcagtggtgtgatcacagctcactacagcctccacctcctgggctcaagtgatcgtcctatctcagccttcagagtagatgggactacaggcacacaccaccatgccccgctaatttttgtattttttgtggagatagagttttgtcatgttgtgcaggctggtctcaaactcttggcctcaagcaatacacccaccgcagcctcccaaagtgctgagattacaggcatgagcaaccacacctggccgatacatacctatattaaacattagtatgttcatgttagaataatgtaccttttgaatttcataaacttggagaatatttatattgatgatggatgaaagaactttcttggatggatgaagagagtaacgctgtgaaacaaccagcaggtggcgaaaactggcaatcaaaagctttttgtttggtggcctggggaatgaagacggaaagaaaacacaggccattcagactcttgatacaatctccattccctgcatcttgttttttttctcttcctggtgccacgctacttgtagaatccaaccaggtaaagctgccaaaagggtcatccattggctcttacaagtagaaaacatcttggaaagtgaaaagtccactgtgcatatgtttgtaaggttgttggaaggtctcaggcatagatctaggattcaaatccagttactcctgcctcaggctggtgttccctcccccacctcagcattgcccaaagacgagtagtcaatgtcacatacttcctgggaatacttgcccttatgctttaaaatggaatctaataaacatggaatctgaacgcaggaatggtttcactctttcatttgaaagagtatctagaacattcccagggaaaatataacccctagccaaagactgcaatacagacctgtctcaagactgattatagccaagatgccacataaggaatcagtctgggaaaatccatagagtgaggctctgtgggagcaaaggaagacgaaaatcagtcagcttttctttctctggaagtaggggatccgtttccttctggctgccccctttgcagaagtacagtttcttttgcaggtttgtcctatcatttcctcactcatatgctgagtattaggagcttgaagcctttcaattcctcttaggtaattttggggctttaaaatacgctttcaagatttctaaaccatactgttgtgcaattggtatgaatttatgtgagaacatttattctaggtcaatctatacccagtgtctatccagaccaaaacacctcccacgcgcataaaagggactctgtcccaaccatcagaagggcaagaaggaggatctcctttcatcccctcttgcctggataagaaatttgtacccaggcccccattcctatgtgagagaagttggcttgttgggctgatgggatacaataaatgaagaaataaaataaaaacacccaagagagatggcagtgcgtatagtcccagctattcatgaggctgaggtgggagaatccttcgagcccagaagttcgagtccagcctgggcaacatagcaaaagccatctcttaaaaaaaaaaaaaaaaggccaactaagtaaaaattaaaaaaatcataatttggtgtgcttttctggctttttaaagaatgttttgattttagagtaggaatgagacaaaataaagatgtcaggcagggcacagtggctcatgtctgtaatcccagcactttgggaggctgaggcaggcggataacgaggtcaggagttcgagaccagcctggccagtatggcgaaaccccgtctctactaaaaatacaaaaattagcagagcgtagtggcgtgcacgtgtaatcccagctactcaggaggctgaggcagaattgcttgagcctgggaggcagaggttgcagtgagctgagatcgcaccactgcacaccagcctccaagatacaacagagcaagactctgtctcaaaaaaaaaaaaaaagtcatagcatatttgtacacattgtagtactcatttgtcatctttcttgaccccaataatccagtgtccctatatatttgcactcgagccctattaagtaagccgctgtgcttctagaagacctttttcttttcttggtgctttgtcaaagactcttggagataaaaatacacacgtgcaacttgtttgtcctcttgtccttttttgctaggggctattcatgctgattaatttaaaactgtctgcttgcgcgtacacacgtctgcgagtgtgaatgtgtatgtgtgtatctatgtacctcatttgagaaagtgcggccaactaggattggctacgaggcaaaggtggagacctttaggagcccacccaccccagcgttaggacggtgggcctgaaagttactatatggaagtcctcatcgtgtagcactaaaccagtgtaaaaggtgttagggacagagggaaaacattgacttaaactgtcgtaaagcccttgataaaccccttccctggagcgctgagttctgcatggcctgggccacggactaggtgttcaggtggacacgggcggggatgcgcgtgcgtgtgtagtgcgcggacacctaggaagctacttgaaagtaaacaccacgctcggggcgtccctagacattgcttaaaacgtgcagagtcacctgtcttcacagcagggcagcgctgaggtcccactgctgggggcggtggggggcggcattggcctgggtcttcccccggcggccgagcgccggtaacacaacgtgtgtgtgtgtaggcgcgtgtacacactctcatacacggctagaaagggtccaggcgacacacacactcccacatacacggctagaaaaggtccaggcgagacacacacacacacacacacacacacacacactccacacacactcacacggccagaaagggtccaggcggttcccggcgcttttccagcccttgttttcatggcgcaccctcccgccagccgcccccctccgcactccgtcgtccgcccggcccggccgcgtgcggttccccgggagcccccaccccgtcgcggaccccagcgaccaccaagtccgcacgcggcctgccgcaggcctgagcagaaggccccgcgcacacccaccgcgccgcggccgcgcgggaggcctgtgccgcccgcgccacccactggccgggccccgcgggcgcagcggagcgggcgggtggccggcccggacgcgccctccccggccgcggccccgcgcgccatgtgcccccggcgggacgcgccactcccgggcctgccgcggcgcctttaacccgggccagggagcggggcggagggggcggtcgggtggctcagaggagggctctttctttcttctttttttgaatgaaccgtgtgacgttacgcacaggaaaccggtcgggctgtgcagagaatgaagtaagaggacaggcaccacagccccgctcccgcccccttcctcccgcgcccgcccctccgcgccgcctgcccgcccgcccgccgcgctcccgcccgccgctctccgtggccccgccgcgctgccgccgccgccgctgccagcgaaggtgccggggctccgggccctccctgccggcggccgtcagcgctcggagcgggctgcgcggcgggagctccgggaggcggccgtagccagcgccgccgcgcaggaccaggaggaggagaaagggtgcgcagcccggaggcggggtgcgccggtggggtgcagcggaagagggggtccaggggggagaacttcgtagcagtcatcctttttaggaaaagagggaaaaaataaaaccctcccccaccacctccttctccccacccctcgccgcaccacacacagcgcgggcttctagcgctcggcaccggcgggccaggcgcgtcctgccttcatttatccagcagcttttcggaaaatgcatttgctgttcggagtttaatcagaagaggattcctgcctccgtccccggctccttcatcgtcccctctcccctgtctctctcctggggaggcgtgaagcggtcccgtggatagagattcatgcctgtgcccgcgcgtgtgtgcgcgcgtgtaaattgccgagaaggggaaaacatcacaggacttctgcgaataccggactgaaaattgtaattcatctgccgccgccgctgccttttttttttctcgagctcttgagatctccggttgggattcctgcggattgacatttctgtgaagcagaagtctgggaatcgatctggaaatcctcctaatttttactccctctccccgcgactcctgattcattgggaagtttcaaatcagctataactggagagtgctgaagattgatgggatcgttgccttatgcatttgttttggttttacaaaaaggaaacttgacagaggatcatgctgtacttaaaaaatacaagtaagttctctgcacaggaaattggtttaatgtaactttcaatggaaacctttgagattttttacttaaagtgcattcgagtaaatttaatttccaggcagcttaatacattctttttagccgtgttacttgtagtgtgtatgccctgctttcactcagtgtgtacagggaaacgcacctgattttttacttattagtttgttttttctttaacctttcagcatcacagaggaagtagactgatattaacaatacttactaataataacgtgcctcatgaaataaagatccgaaaggaattggaataaaaatttcctgcatctcatgccaagggggaaacaccagaatcaagtgttccgcgtgattgaagacaccccctcgtccaagaatgcaaagcacatccaataaaatagctggattataactcctcttctttctctgggggccgtggggtgggagctggggcgagaggtgccgttggcccccgttgcttttcctctgggaaggatggcgcacgctgggagaacagggtacgataaccgggagatagtgatgaagtacatccattataagctgtcgcagaggggctacgagtgggatgcgggagatgtgggcgccgcgcccccgggggccgcccccgcaccgggcatcttctcctcccagcccgggcacacgccccatccagccgcatcccgggacccggtcgccaggacctcgccgctgcagaccccggctgcccccggcgccgccgcggggcctgcgctcagcccggtgccacctgtggtccacctgaccctccgccaggccggcgacgacttctcccgccgctaccgccgcgacttcgccgagatgtccagccagctgcacctgacgcccttcaccgcgcggggacgcttt

SEQ ID NO: 2007 - DNA, 6000 bp, Homo sapiens
gcccactattaaacttgtacagcagaatgatttatttgtagctcattgcctagcttcaaatattattgcttaattattccgattttttttgtcttgtttttaggtttaggttccacttaagttaggtgagttaagttaggtggatttctaagttaaaccaaggcttaacttagaaaccaagagagtttcctggttatgacaagaatgactttcaggcacagagtggatgacttggatgtgatcacttaaggcagaagacaggctctgaagcaaaagtgattgggaaaaaaaaaaagcatgactggggcttatataatgcttgctggcaatgtatgcaaaccatttgaaagagcatggcactacctaccacacaaatttataatgtataagattcttgaaattggaaactggcattttggattgctaatctaagcctatgagaagttattattattattattattattattattattattatttttgtgagacagagtcttgctctgtttccaggctggagtgcagtggcgcgatcttggctccctgcaacctctgacttcctggttcaagtgattctcctgcctagcctctcgagtagctgggattacaggcacttgccaccatgcccagctaatttttgtagttttagtaaagacagggtttcaccatgttggccaggatggtctcgatctcctgacctcgtgatccatccacctcggcctcccaaagtgctgggattacaggcatgagccactgcacccggctgagaagttattttttaagcagttttctttctttctttctttctttcttttttttgagatggagtctcactctctcacccatgctggagtgcagtggcatgatcttggctcactgcaatctctgcctcccgggttcaagcaattctcctgtttcagcctcctgagtagctgggactacaggtccccgccaccacgcctggctaatttttgtatttttagtagagacggggttccaccatattggtcagcctggtcttgaattcctgacctcaggtgatctgcccacctctgcctcccaaagtgctgggattacagccgtgagccactgcgctcggcctcatttttcttttatgcaaactatatggactacttgtttttattctctctagtcagctcattttatttatggattaatttccatttcaggttggggccatggtttactcttccatctgacctattagttatcaatatcctcagttaatagtctcattctacccacattttcaataaaaagtttactagctgggaagatttgatacacacacatgattttttttttcttttcttttctttttttttttgagacagggtatcagtctgtcacccaggctgcagtgcagtggtgtgatcacagctcactacagcctccacctcctgggctcaagtgatcgtcctatctcagccttcagagtagatgggactacaggcacacaccaccatgccccgctaatttttgtattttttgtggagatagagttttgtcatgttgtgcaggctggtctcaaactcttggcctcaagcaatacacccaccgcagcctcccaaagtgctgagattacaggcatgagcaaccacacctggccgatacatacctatattaaacattagtatgttcatgttagaataatgtaccttttgaatttcataaacttggagaatatttatattgatgatggatgaaagaactttcttggatggatgaagagagtaacgctgtgaaacaaccagcaggtggcgaaaactggcaatcaaaagctttttgtttggtggcctggggaatgaagacggaaagaaaacacaggccattcagactcttgatacaatctccattccctgcatcttgttttttttctcttcctggtgccacgctacttgtagaatccaaccaggtaaagctgccaaaagggtcatccattggctcttacaagtagaaaacatcttggaaagtgaaaagtccactgtgcatatgtttgtaaggttgttggaaggtctcaggcatagatctaggattcaaatccagttactcctgcctcaggctggtgttccctcccccacctcagcattgcccaaagacgagtagtcaatgtcacatacttcctgggaatacttgcccttatgctttaaaatggaatctaataaacatggaatctgaacgcaggaatggtttcactctttcatttgaaagagtatctagaacattcccagggaaaatataacccctagccaaagactgcaatacagacctgtctcaagactgattatagccaagatgccacataaggaatcagtctgggaaaatccatagagtgaggctctgtgggagcaaaggaagacgaaaatcagtcagcttttctttctctggaagtaggggatccgtttccttctggctgccccctttgcagaagtacagtttcttttgcaggtttgtcctatcatttcctcactcatatgctgagtattaggagcttgaagcctttcaattcctcttaggtaattttggggctttaaaatacgctttcaagatttctaaaccatactgttgtgcaattggtatgaatttatgtgagaacatttattctaggtcaatctatacccagtgtctatccagaccaaaacacctcccacgcgcataaaagggactctgtcccaaccatcagaagggcaagaaggaggatctcctttcatcccctcttgcctggataagaaatttgtacccaggcccccattcctatgtgagagaagttggcttgttgggctgatgggatacaataaatgaagaaataaaataaaaacacccaagagagatggcagtgcgtatagtcccagctattcatgaggctgaggtgggagaatccttcgagcccagaagttcgagtccagcctgggcaacatagcaaaagccatctcttaaaaaaaaaaaaaaaaggccaactaagtaaaaattaaaaaaatcataatttggtgtgcttttctggctttttaaagaatgttttgattttagagtaggaatgagacaaaataaagatgtcaggcagggcacagtggctcatgtctgtaatcccagcactttgggaggctgaggcaggcggataacgaggtcaggagttcgagaccagcctggccagtatggcgaaaccccgtctctactaaaaatacaaaaattagcagagcgtagtggcgtgcacgtgtaatcccagctactcaggaggctgaggcagaattgcttgagcctgggaggcagaggttgcagtgagctgagatcgcaccactgcacaccagcctccaagatacaacagagcaagactctgtctcaaaaaaaaaaaaaaagtcatagcatatttgtacacattgtagtactcatttgtcatctttcttgaccccaataatccagtgtccctatatatttgcactcgagccctattaagtaagccgctgtgcttctagaagacctttttcttttcttggtgctttgtcaaagactcttggagataaaaatacacacgtgcaacttgtttgtcctcttgtccttttttgctaggggctattcatgctgattaatttaaaactgtctgcttgcgcgtacacacgtctgcgagtgtgaatgtgtatgtgtgtatctatgtacctcatttgagaaagtgcggccaactaggattggctacgaggcaaaggtggagacctttaggagcccacccaccccagcgttaggacggtgggcctgaaagttactatatggaagtcctcatcgtgtagcactaaaccagtgtaaaaggtgttagggacagagggaaaacattgacttaaactgtcgtaaagcccttgataaaccccttccctggagcgctgagttctgcatggcctgggccacggactaggtgttcaggtggacacgggcggggatgcgcgtgcgtgtgtagtgcgcggacacctaggaagctacttgaaagtaaacaccacgctcggggcgtccctagacattgcttaaaacgtgcagagtcacctgtcttcacagcagggcagcgctgaggtcccactgctgggggcggtggggggcggcattggcctgggtcttcccccggcggccgagcgccggtaacacaacgtgtgtgtgtgtaggcgcgtgtacacactctcatacacggctagaaagggtccaggcgacacacacactcccacatacacggctagaaaaggtccaggcgagacacacacacacacacacacacacacacacactccacacacactcacacggccagaaagggtccaggcggttcccggcgcttttccagcccttgttttcatggcgcaccctcccgccagccgcccccctccgcactccgtcgtccgcccggcccggccgcgtgcggttccccgggagcccccaccccgtcgcggaccccagcgaccaccaagtccgcacgcggcctgccgcaggcctgagcagaaggccccgcgcacacccaccgcgccgcggccgcgcgggaggcctgtgccgcccgcgccacccactggccgggccccgcgggcgcagcggagcgggcgggtggccggcccggacgcgccctccccggccgcggccccgcgcgccatgtgcccccggcgggacgcgccactcccgggcctgccgcggcgcctttaacccgggccagggagcggggcggagggggcggtcgggtggctcagaggagggctctttctttcttctttttttgaatgaaccgtgtgacgttacgcacaggaaaccggtcgggctgtgcagagaatgaagtaagaggacaggcaccacagccccgctcccgcccccttcctcccgcgcccgcccctccgcgccgcctgcccgcccgcccgccgcgctcccgcccgccgctctccgtggccccgccgcgctgccgccgccgccgctgccagcgaaggtgccggggctccgggccctccctgccggcggccgtcagcgctcggagcgggctgcgcggcgggagctccgggaggcggccgtagccagcgccgccgcgcaggaccaggaggaggagaaagggtgcgcagcccggaggcggggtgcgccggtggggtgcagcggaagagggggtccaggggggagaacttcgtagcagtcatcctttttaggaaaagagggaaaaaataaaaccctcccccaccacctccttctccccacccctcgccgcaccacacacagcgcgggcttctagcgctcggcaccggcgggccaggcgcgtcctgccttcatttatccagcagcttttcggaaaatgcatttgctgttcggagtttaatcagaagaggattcctgcctccgtccccggctccttcatcgtcccctctcccctgtctctctcctggggaggcgtgaagcggtcccgtggatagagattcatgcctgtgcccgcgcgtgtgtgcgcgcgtgtaaattgccgagaaggggaaaacatcacaggacttctgcgaataccggactgaaaattgtaattcatctgccgccgccgctgccttttttttttctcgagctcttgagatctccggttgggattcctgcggattgacatttctgtgaagcagaagtctgggaatcgatctggaaatcctcctaatttttactccctctccccgcgactcctgattcattgggaagtttcaaatcagctataactggagagtgctgaagattgatgggatcgttgccttatgcatttgttttggttttacaaaaaggaaacttgacagaggatcatgctgtacttaaaaaatacaagtaagttctctgcacaggaaattggtttaatgtaactttcaatggaaacctttgagattttttacttaaagtgcattcgagtaaatttaatttccaggcagcttaatacattctttttagccgtgttacttgtagtgtgtatgccctgctttcactcagtgtgtacagggaaacgcacctgat

SEQ ID NO: 2008 - DNA, 6000 bp, Homo sapiens
gaaattaacaccagtgggttgttcatgctaactttagtcatttaaaaagaatttgcaagacaaaatcccaaaccaattccttacctagtgataggagcccaagctgaaaagtgctctccacagatgcagcagcagacaggctgccttccttgatggaagtgagtggaaattccaggaaaaaaggagatttttttttttttaaacagcaaataaacctctgacccccaactgaaaaacactggaagatcagggatccctggaaaaaagaggtccgagacttcagcaaattgtcctaccagtttaggctacaaggtgcccagaccagtaccaagcaccaataggagagctgctgcaggctgggccaccttcgcccaggttcccttagtggttaccacatgtcagtcgaaaaaaatgatgagaccagtctcattccaggaggcttatctgccaaagataaggactcgtgcctgggagacaggtctacgcctttctccaaagattattttgagggctccaaatttaaaggggaaagggtgggatattgagaagtacacaaatttcacataagaggagggtagggaaaaatagtcattcatgcctttggttcagtgaatctgcatttttttttttttttttttttttttacataagatgacagacaaatggggcagaggaatctgcattattacataaggtaacatagacaaaacataacaaaagggcaggggaacaatcagatatgcatttgtatctggtaggcagggggatgactgcacctgtaaagacaagctatcgatttacattaccatggcgaaattttaacaggaacaccttagggcagaaatcttggagctcaccaggaatttccttgtgggcaaaatatgggggaggcgtgtaggttatcatcttgcagccctcttatttaggaaccaaaaggggaggcaggtttgcctgacccagttcccagcttaacttttccctttggcttaatgagtttggggtcacaagatttattttcctttcacagtatgtaagccctgggtctgggaaggccctgggcctgggggtgatggttgggaaaccaccaccttgtctcaccactgccagagacacagatgtggcttctgtacataagtccctattaaatgtttctctctaaagaactagatttgccagtccctttctttggcgtctcagcttcctctgactttggggcagatttgtataggcctggccactgaggaacagtcactaaccattaggaaaaggcaaatgaaaaccaccttatcattttatacctaccagtatgaccataatacaaggctgtgaaaggaaagtatcttgggtcccttcaacctgcctcccattctagtcagtcatccctctgctcactgagacagatgcacagctgactgtctcctttggaaaggctgatcagaaactcacaagaatgcaactgttcatctctcacatatctgtgacctggaagcccccttcccgctttgagtcttcctgtccttgcttcaagttgtcccgcctttccagactgaaccaatgttcttcttacatatattgattgatgtctcatgcctccctaaaatgtataaaactaagctgtgccccgaccacctcgggcacatatcatcaggacctcctgaggcagtgtcatggatgcatcctcaaccttggaaaaataaactttctaaattaattgagacctgtctcagatttttggggttcacgaggtacataaataacaagcatgggcaagaatgtggaaaaactgaaaccctcacacattcctggtgagaatgtaaaatggtgtagccaatttggaaaacaatttagcaatacttaaaaatgttaaacagttaccacatgaaaacttaagtccacacaaaagcttgtacatgaatgttcatagcagcattactcataatagtaaaaaaatgcaaacaacccaaatgtcaatcaactgatggataaaatgtagtatatccatataatggaatagtttctaattttttgttttatttaatgaaatattcatcagcaattaaaaagaactagctgttgatgtctgctacaatatggaccttgagaacattatgttaaatgaaagcagtcacaaacgactccatattttgtgtttccatctatatgaaatgtctagaataggtaaatctatagaggcagaaaatagattagtgattgccaggggctgagggaatgggagggaaatgggaaatgactgttaatgggtataggttttcttttcggggtgataacattctcctaaaattagattgtggtattggttccacaacactgaaaaaccatctcaccttcaattggtgaattttatagtatatggattagatctcaacaaaagtttttttttttttttttttttgagacggagtctggctctgtcgcccaggctggagtgcagtggtacaatctcggctcactgcaagctccgcctcccgggttcacgccattctcctgcctcagcctcccgagtagctgggactacaggcgcccgccaccgcgcccggctaattttttttttgtatttttagtagagacggggtttcaccgtgttagccaggatggtctcgatctcctgacctcgtgatccgcccgcctcggcctcccaaagtgctgggattacaggcgtgagccaccgcgcccggccaaaagtttttattaaagaaaagatttatctggagatggatagtggtgatggttgcataatatgaatgtacttaatgtccttaaaaattaaggcgataaatcttgttataagtaacacaataaaaaatgagtttcaataaattatttggggacatttgagtcttatgccttagcttggaacaactctcctgtgaataaaatgcttgtgatgtgttaagcaactgtgtttgtatctgaaatgagtgactaccaaaatgacggtaaggaattttttagaaggcaatagcctgaccttagtaagggctcagatttctccagtgtgtacctggtgccaatgaagtacaggagattttgttttatcatcccatctcatggatgaggaaactgaagtttgttgagataacttatgcaaggcacagatgaacctgaacacgcctttatgtaactaaaaccctcactgttaaccactatgcttatattctgtgcctctgctttactcaattataaaatgaaagagatttagatgatctctaatatcctaccaacctgaaattgtttcattacaataaagcatttcgtatataattgggaaatattctgtattatgtaaaaagcttaatctggcagtgagctgcacttgtgattctagtatttaaattgtgggtgcatattatcaaagcaccttatggtgctgtgtcccagaggaaaccaaacatggaacccatttcaatccccatgccagcaggctcttcagactgtagttctcaccatgccacagcccatctgagagacaccacagcatctgcatagtgatttgttgttgtttttgagatggagtctcactctgtcacccaggctggagtgaagtggtgcgatctcagctcactgcaacctccaccccctgggttcaagcgattctcctgcctcagcctccctagtagctgggattataggcgggcgccaccatgcccgggtaattttttgtatttttagtagagacggggtttcaccatgttggccagactggtcttgaactcccgaccataggcgatccgccggcctcggcctcccaaagtgctgggattacaggcgtgagccaccgcgcccgggcgtgatttgttttaaatttgtcatctaaaggaccaccaggatagctagatagtagacaagagttttactatcaatatcagtttgcaaaccagggagtctccagcatgaacccaaagtgctctctcagaagaacagaggttagaggttttattttaaaaagagaaatattaacttatttctctttgagaaagttcactggcactagtaagggtttggggagctctgactggtgagcgaagccagggggccagatcagtcctggaggtggaagttatgctgaagctatggaataaaactggctttaggtcgggcgcggtggcttcttcctgtaatttcagcgctttgggaggccgaggcgggcagatcacttgaggtcaggagttcaagaccagcctggccaacatggttaaaccccgtctctactaagtacaaaaaaacactagccgggctggcgccttgtagtcccagcttatggggaggcggaggcaggagaagcgcttgaccccgggaggcggaggctgcagtgggccaagatcacgtcactgcacgtctcaaaaaaaaattttttttctttataaaaagacaaattaaaaaacctggtttcaggttacaacaggcagctcagcagccggcctgatggtgacattcctcaaggacggcctgcccagtgcttcctccctaccccgctgctcgactctgctgtggttgggtatggcaacaacgacacatttttatgatcaagtttcacaaatgacacacatgaactgtcttagtaacacacagaaacaagcaccagaaaggaagaaaacgagccgcagtgccgggcattccgggcctttctggacgtccccatccgtggctggaggacagcccgggcggcggcgggcggcctcggggcgggagcgtgggggcagggcacggcgagcccggggcttctcaggaccaccaggccgcctggacgctggggaggaacccccactccgacagctgctatgacggaaccaacggcgctccacggtgcccaggtcgccgccgctccacccggccaactacacgttcgcgcggcgcctatacgcacatgccgtcagcacgcacggcgctagcgcgcgcgcatgccgtcagcacgcacggcgtcggtgcgtgcgcgcccagacgttctgccgggtggcagtcccagcggagtttgcgtgtgcgggcgggaccggatttcgtccgtgggcccgggggcggcgggggccggggagtgaggggccggctgagcccacctcgctgggccctccctggcgccccgccttgggcggcggcgagcgcgcgggccgccatgtcgtacatgctcccgcacctgcacaacggctggcaggtggaccaggccatcctctcggaggaggaccgcgtggtcgtcatccgcttcggccacgactgggatcctacgtgcatgaagatggacgaggtcctgtacagcatcgccgagaaggtagcgcgccggactctcccgctctgcgggctgtgcttccgcatctgccccgcgcctctgccctgccggcgtcgcctgggggcgcgagctgttccccgaggaggggccgcggctccgtcgttcaggcgattcctcccctcgctgcggtcgagcgctctcggggactgtgccggcgtttcacgcctttttctgcggggagctcttgtagtttttcatattttaaagggtttatgatccccctcctctcaaatgaattaattatttctgttgataaggcgtttttcccaaacttatagttcagtgaacaaaatgcacttgcaggttttattgagagcgcggatccttaatttaaaaggacgtctttttttggtacctgagttattcgttgtatgcataaagcaggactttcatgttcatagcatgagaaatcctgcttttctgtgggtgtgtttttttatcccaccacgctttttgtgagtcatgtggtttacagcttacagtgattgaggtgcagtaaacatcaggagaaaatagaaatatgctttgttagaattagttctctgaatttctaatattagtacactgagtggtcttggcatttacttgctgacaataaaagttgtaggacactattttataaccagatttcattctttttctgtggttcctcatagcaattttaggatgacttttattgaggttttgcagctgtagcaata

SEQ ID NO: 2009 - DNA, 6000 bp, Homo sapiens
tcaacacagcaggagaggtgaaataacgtcttaccctaatgaactccctgacaggatctccagatccctagtgatcctggcacactttaataaatgctaacctacattatagcttatacaaaaatgcaaattatactatgaacttcaagaaaatgcctccaaaattttctttaaaagcaaaaatactcaatgaaaagttcaagtccacctacaagtgaaacagctgagaaatttagggtatgagcaaaaagcaagtacattcagaaagcaaaggtcatcacctcatgtgcgcggcacttctctgcaggacagcctccatgtgtgcgttctgctcagcagagagcgttgtcttccagtacgctcggcaggctgagaagtctggagtcagggaaacctgagaccccgcccctccacaggtcactttttagcttacatgggttttcaagacaaacaacatccaggagatgaaaacgacagctgcagacgcccctcccacccaagccagggctctggcatgctgctggaggccacctcctgctgccgcaccatgtccccaggtgaagtagggccccagaaaccaaaacctccctcctctcttcaccaggacccgcaaaccaaaccacctggtttgcagaaccaaaccggaaccctgaccccacgcttgcctcacagccacttgccctgagacactaatcaaaaatgctcgatgctgccttttctccttacaactcactgagtgggtcagaggaagtcatctcctgtacctctgtactgaggtacatgcagatgcatcctcttcccacggcaggcttagaccttctactatctgacaatgtgccaggtgctgtttggtcacaggactcccgccttgcagtgagacatctgcctctgcacagcacagacactcaccatctgtctccagggctccaatgaccagactgagcatcatttctatttctgcaacccagaactaagacttcataagtgctaaagtggctttttttttttttgagatggagtctcgctctgtcacccagggtggagtgcagaggcgcggcctcagctcactgcaacctccgcctcctgggttcaagcgattctcctgcctcagccgcccgagtagctgggactacaggcgcccgccaccatgcccggctaagtttttgtatttttagtggagatgggatttcactgtgttagccaggatcgtctcaatctcctggcctcgtgatccgcccgcctcagcctcccaaagtgctaggattacaggcgtgagccaccgcgcccagtctaaagcgtctttttttaattgtcaggcaagactgggccaggtaaagtaagtgccaggcctgctgtctcaacccatttcttctctttggccacacagcctaccttggagagctccacgttaaggtcatacagctcctgactcacttcaggggtacacagcaggtctgtcagtgccttatagaggaggccgttcagggccctcaggcgcgcatggtcttccttcctggttttctttgaggtgctcctcatgaggaattccaacttggatggtttgtaagtctccatcaggaagaagagcacaccccaagggcagcgttacaactccaaactcaccaagtcacacagcaggggctgggggagggctggatgggcaaccagatcaacagcagctatcactctcagctgcctcagctttcattaagataaagttttataaaccgggatccttttaaattttacctggtaaccctccaagattaaaagtactgccagtaaatattttctcaaaaaaagtttttgttgagatataattcacataccataaagttcaccgtgctaaagggaataattcagtaattttttggaaacgtgatgtatttatttttcagaatgggagccatatattgtataaacttttacagtacacacacactaaaaactgaatggatattaccatattataatttgataaaagatatgactttccagaaaacattaatgtcagtacatttttttttgaaaagatcaaaactccatgttgccaatggcatccagtcgcatccacatagacactatcccctccaatacagaaatggaaagacctccaggtaagagttttgccaacttttaaaccctcactcccatcaagattataaagtggctcatggcttatactcaccgagtgagaacccaaggaaggactttcataccaaaccttttttctttggggagaaaataagcattatgttagtgatggcaaagtcaaaaagttacataagctaatttaagaggttatgataccataactgtttatagggggctaaacttagatgttacattactggacatcttaaaaaatttcagaatttaattgataacaacatgggttgtggggaagaggctgaagatggttttaattcaacctcataatttttacctaaattctacttctagtcccaaggttagagagaggatcttaaaaagacacctaccaaactgcacataaacactatacgctaattgataaagatgtttcccatggaagttcaagtaaaggattcagatactgttataggcatagactgagactgaacaattaagcaaatggatggtgggagccacgctcaccattggagtgcgacttacagatcagcaaggagaggaggctagaatgatccacacagtacgtctggagttggagacagatggctatacacggaaatgtttataggtgcatatttacacaagggttagtagaaacacatatatcctttcgtcagatgagatggcccaaaagacagacaccccagaagcaatgaacacacccagcacccatggtttctaatctctctctccaataaaaggaacgagggcttcttggagaaatggctgattttagggctgtggtacgaaacacacaagatgagcctggagtatcttgtagtgccagaaagtaggaaagtgtttaacacacacagaacccagcaaaaccccacaatgacagggtatgcaaacaggacataggagcttagtgagctcctaagggcctgagctggaaacattcgaacaaaactaagtaacacgggattataacccatgagttcttggtgatatgaatgaattaatacatggggtgaagagacatatcccttgtgcagaatgcaaaccacttatgagcaaaattccccactcattaggcatgggctgcacacagcgactttctcccagagtacagtaaggaaagggggcaaaaagagtaactttacggtagagaaacctggcaagcacctcatgcaggggatcacggccagcgtggaccctggatacggtgcgatgagaatggcctttacctctgtagtcttcctccccaaaagccataatccacgtctaagcattaaaaaaacaggcacattccaacagagaggcatcctgcaaagcacctgaccagtacccctcaaaactggcacagccatcaaaaccagggacagtctgggacactaccccagcctaaggaaacaagacaattcaatgtaacgtggaccttgggtgggcacctgggacaggaagggacagcaggcagaaccaaggaaaagtgaataaagtatgagcttcagttagcaacactcttatcaatatcggctcattaactggaacacgttggaagctaaagtccgacgctaacacagggggagctgggtgccaggacacaggaacgcggtactatttttgcaatttttctgcagggtctaaaactgtctttaaaagtagtgtattaaagtagaaaacatacaaccacctaccatacttagaagaactaaaagcagtgtgaaaagtcaatgtattttattgtacttatctttcataatttaaaaacactaattatcatgacaagctttagtcttcaaattcacacagaaagtcaacattagcaaggaaattcttatattttttcatttttcctcattttctgaaactaatcttctgaaaaatacgtctggtgacaagaatcaaaataaacacacattgtcactttgttttcttaacccgacacacgtccacgaacacaaaagctgcaaatgctgacagtgagagctagaactgctgcagaccccaggaggcaggaactggcgagctaggccgcatgggcgcaagaacgcggatgagcggacaccgcaacccggggacaccgccccctagggaataccgcgcccagggacaccgcccccgccgcattacttggttttcgaggcaaatttcttgagccagttcttgcaggagacagcagagcagtgaagtccccgctcgcagcctggaaatagcgcagcatcgcggctacggaacagggcccggagacccgcgcgggagcgccacagcccgcccgccgcagcccacatggcgcggcgccgggacccggagcgagcagggagacaacgggcgcaggcgcggagcgacaactgacgcgagggtggcggcgtgtgggcggggcgacggcgcagagcgggaggaagactcacgcctggcaggcggcgtgtgggcggggcgatgatgcagggcggggcgatgatgcagggcggggcgaggacagacgcgaagctgacggcgtgtgggcggggccacggcgcggggcgggacgaagacggggtgcaaggcgggcggggcaacgacggcggaggggcgaaggcccgaggggggcggtaggtgggcggggcgaggacagacgcgaagctgacggcgtgtggacggggcgacggcgagggacggggcaaagactggacgcaagaaggggcggggcgacaacggcggaggggcgaaggcgcgaggcgaacggcgagtgggcggggtgaagaccgacgcgaagcgggcggtggttgggcggggcgaagactgacgcgaggcgggcggtgaatgggcggggcgaagactggcgcgaggtgggcggtgggtgggcagggcgaagactgaagcgagaagggcagcgcgaggtgggcgactaccagagcgaagcgagcggcgtgtaagcggggtgaagacaacgccaggtgggcagtgtgcgggcggggggggcggcaacgggggcggggcgaaggacgacgcgaggcggggccggcgggagctgggcgtggggaggccgcgtgggctgcgcggagggtgtgccactcggggaagcgtgggaaccgcctggttgcctggcgctgcgtagctaggaacacgttttgtttaaatactgggaactgacgtaggcgggtgcgccgcacaaagcaacgaaggcatcgaagcctggagacctgggcagggccgctgtcggcgggaggctgcgaggggtccgtctgtttccgccactgggccctccagggctttgctgctgcgccgccttctccccgggcacctagagaaagtccccagattgggcgtcctccccagaagtggtctcgccccgcccgcctccccagagtcagcgtggcccagcggggaagctgctccccccgggcgtggaaagagaagtgagcgcgaccgcagtgttggggatgcgtgggctgtgactcccccgaggcggctgctgtggtgtgagacacgtctgtgtgtgtgtgtgtgtgtgggcgcgtgtggatgtgtacatgtgtatgtgtgcatatgtacgtgtgtgtgcatgtgtgtggacatgtatatgtgtgcatgtgcgtgcgcgtatatatgtgtgtgtgtatgcgtatgtatgtgtgtatatattgtcaatcgaagaaaacgacgagacaagtctctaatcattttaggagatttatttgccaaagttaaggacgcacccaggagacaggtctacgcctttctccaaaaatgattttgagggccccagatttaaaggggaaagggcggagtattgagaagcagagttttcacaaacaaacgggcagaggaaaaacgtggggaatctgcattttacataagataacgcagacaaaatgtggtaggggaacaatcagatgggctagggtg

SEQ ID NO: 2010 - DNA, 6000 bp, Homo sapiens
aactcactttactggccaggttattcaaaatatttgtaaaacttggctcatattttcacatttccattgtgcctaccatccccaatcctcaggcctagtggagaggcacaactggctaaattcacctccaggcatttcacctcccctagcccaaagcactccccctagtgctgcttaaactccaatccaccccttttggaaaacaactgtgtcctcaagaaataataacagaggcccatgtgtatgggaacaaacataatcaacccaacttttctcaagggagatatattgcaacattgtgagggacttatcgccttaaaaaaaagccaagatttgataaagaattcctttcatagtgtgctccatgaagataaggtgcctggtcacaatctgcaacccagagattttgtctattggaaaagacatctaataaagaattcccttcaaccccaatggaagggcccacaccaggtactattgactaatctatgtcccataaaattagaaggtgtagactcatggattcatctctctcatcttaaggcacaacctcctgagtggattgtaactcccaccaaagacctttgcctccagttcactaaacattgaccttcaacccaggattagaagcagacaacagctgttgtggactgcttaaacccaagacacaggaccaggcctgtacacaaagaaatgcctatgtttactgcacaataaccattacaattattgtcctagatatactgtcatctgctgtctaataaagaacagggcacttgccttgtctgatttaacaccctttagtaactaagatgaatttcacaaccttgctattattaatcatgtatcccttcaccttcttgccactgccacccactgatgcccatgaaacaaacctgtttctacaatgggctcaggattatgcagacaaattacataagaacacctgcttgatatgcggacttacgcctctttccagtggctccagcctccagtggtgggtatcctccttccaaggtcaggactggatagaataccaaaaatttattacatcacagaaacagtttggtatccttcatgctggcataacaaaagacaatatatatagttggcccattaaaaacactcttggccaggcgcagtggctcacgcctgtaatcctagcactttaggaggccgaggtgggtggatcatttgagatcaggagtttcagaccaggcctggtcaacatggtgaaaccctgtctctactaaaaatgcaaaaattagccaggtgtggtggtgcatgcctgtaatcccagctacttggcaggctgaggcaggagaattgcttgaacccgggagttggaggttgcagtgagctgagaacacgccactgcactccagcctgggcgatggagtgagattccatgtcaaaataaatgaacaaataaaaacactcttaagaacaaaggacatgggaaaagtttttcagtggaaaggaccagctcattagctctcacttcagcatttcccccaactaaaacaaagtggtgaccatgccccaaacaatggcccgttttcacaatggaataatgcaaacttgggatggatttatctggttcaccccttcgtttggccaactcagtcaaaatgttcctttgtgctgggagcaaagaaatcacacccaggacctgtggccaaacagtaggaagatatatggggtggacacctggagaatgttgtgaccacattattgtattatgagacactgactggcatgccactgactgggtgcagtgaccaactatttattggctagctccaagtgggacatattggctatgtggcactaacttatggctgtggtcacctccagggtggttgggatgatgctccccaggttatgcttgggcacaaggacgagtaattcagaccctgccaaaaacagcaaacctttttcatttacaatctcgttggacacgttcagtattccaatggtatgatcatttaacttcaatctttgtaccacagatagctattgaagatgctatatgggatatagaagccttaacaaattacacccaaaaggccctgaatgatggctacatgagttacctctttgccaaacgacggggtcatgcttatgaggaaagcagtgctgcaaaatcatatggctttagatacactaacggcagcacaagggggcacttgcaccagaacaactgaatgttgtgtgtatattccagaaaatgaagaacataacccggcttatgactgatatgaaaacccagataatcaacctgtcagacccaaaaccctcactgattggttgagcagctggtttggattctggggaacttggtggcacaagctagtgcttataataagaacaatttctgatctgtcctgtttttgcttataatgttgttgtggtatatgtttgcaaataagtccatgtgtaactgaaagggctagggtaatgactgctcagagaattgctctaattcaggaggcagtaatgtagcctgacctagcttccagttttgccctccttttgttgctataagtctggcctaggtccctatacatttttctttttttcctcttttttcctttcctccctattttttatcttcgtgggacatgatctcctaggaatgagcattcctcgtgacggaggacttgaacttctaggaataaaccatcccagcaacaacaaaccagcaggtgggaagaaaggaggaagcagcaacctgaggccaggaacccacattcctttttaaaatgcttttctccaaaagattttaaagaaaaaaaaggggggaaatgtgaaaggaaattaaattttgggacgccaaattcacttagccaaagggaagagtcaagctgggaactgggtcacgcaaacctgtctcccccttttggttcctaaataagatggctacaagatgaaaggctacacgcctcccccatattttgcccacaaggagattcctggtgagctgttgaaatttcaccatggtggccaggcgcggtggctcacgcctgtaatcccagcactttggaaggccgagttgggcggatcacttgaggtcaggagtttgagaccagcttggccaacatggggaaacaccgtctctattaaaaatacaaaaagtagctgggtgtggtggcacacagctgtaatcccagctacacgagaggctgaggcgggagaattgtttgaacctggaaggtggaggttgcagtgagccgggatcacgccagtgccctccagcctgggcggcagagagagattccatttcaaaaaaataaaacttaaccatggcaatgcaaattgatagcttatctttacaggtgcagtcaccctagcccatctgattgttcccctaccacattttgtctgcgttatcttatgtaaaatgcagattccccacgtttttcctctgcccgtttgtttgtgaaaactctgcttctcaatactccgccctttcccctttaaatctggggccctcaaaatcatttttggagaaaggcgtagacctgtctcctgggtgcgtccttaactttggcaaataaatctcctaaaatgattagagacttgtctcgtcgttttcttcgattgacaatatatacacacatacatacgcatacacacacacatatatacgcgcacgcacatgcacacatatacatgtccacacacatgcacacacacgtacatatgcacacatacacatgtacacatccacacgcgcccacacacacacacacacacagacgtgtctcacaccacagcagccgcctcgggggagtcacagcccacgcatccccaacactgcggtcgcgctcacttctctttccacgcccggggggagcagcttccccgctgggccacgctgactctggggaggcgggcggggcgagaccacttctggggaggacgcccaatctggggactttctctaggtgcccggggagaaggcggcgcagcagcaaagccctggagggcccagtggcggaaacagacggacccctcgcagcctcccgccgacagcggccctgcccaggtctccaggcttcgatgccttcgttgctttgtgcggcgcacccgcctacgtcagttcccagtatttaaacaaaacgtgttcctagctacgcagcgccaggcaaccaggcggttcccacgcttccccgagtggcacaccctccgcgcagcccacgcggcctccccacgcccagctcccgccggccccgcctcgcgtcgtccttcgccccgcccccgttgccgccccccccgcccgcacactgcccacctggcgttgtcttcaccccgcttacacgccgctcgcttcgctctggtagtcgcccacctcgcgctgcccttctcgcttcagtcttcgccctgcccacccaccgcccacctcgcgccagtcttcgccccgcccattcaccgcccgcctcgcgtcagtcttcgccccgcccaaccaccgcccgcttcgcgtcggtcttcaccccgcccactcgccgttcgcctcgcgccttcgcccctccgccgttgtcgccccgccccttcttgcgtccagtctttgccccgtccctcgccgtcgccccgtccacacgccgtcagcttcgcgtctgtcctcgccccgcccacctaccgcccccctcgggccttcgcccctccgccgtcgttgccccgcccgccttgcaccccgtcttcgtcccgccccgcgccgtggccccgcccacacgccgtcagcttcgcgtctgtcctcgccccgccctgcatcatcgccccgccctgcatcatcgccccgcccacacgccgcctgccaggcgtgagtcttcctcccgctctgcgccgtcgccccgcccacacgccgccaccctcgcgtcagttgtcgctccgcgcctgcgcccgttgtctccctgctcgctccgggtcccggcgccgcgccatgtgggctgcggcgggcgggctgtggcgctcccgcgcgggtctccgggccctgttccgtagccgcgatgctgcgctatttccaggctgcgagcggggacttcactgctctgctgtctcctgcaagaactggctcaagaaatttgcctcgaaaaccaagtaatgcggcgggggcggtgtccctgggcgcggtattccctagggggcggtgtccccgggttgcggtgtccgctcatccgcgttcttgcgcccatgcggcctagctcgccagttcctgcctcctggggtctgcagcagttctagctctcactgtcagcatttgcagcttttgtgttcgtggacgtgtgtcgggttaagaaaacaaagtgacaatgtgtgtttattttgattcttgtcaccagacgtatttttcagaagattagtttcagaaaatgaggaaaaatgaaaaaatataagaatttccttgctaatgttgactttctgtgtgaatttgaagactaaagcttgtcatgataattagtgtttttaaattatgaaagataagtacaataaaatacattgacttttcacactgcttttagttcttctaagtatggtaggtggttgtatgttttctactttaatacactacttttaaagacagttttagaccctgcagaaaaattgcaaaaatagtaccgcgttcctgtgtcctggcacccagctccccctgtgttagcgtcggactttagcttccaacgtgttccagttaatgagccgatattgataagagtgttgctaactgaagctcatactttattcacttttccttggttctgcctgctgtcccttcctgtcccaggtgcccacccaaggtccacgttacattgaattgtcttgtttccttaggctggggtagtgtcccagactgtccctggttttgatggctgtgccagttttgaggggtactggtcaggtgctttgcaggatgcctctctgttggaatgtgcctgtttttttaatgcttagacgtggattatggcttttggggaggaagactacagaggtaaaggccattct

SEQ ID NO: 2011 - DNA, 6000 bp, Homo sapiens
ctggaccaccaagaaaccatgctgaaatagacaagaggaaaagcatgcagtttcatctaataggaaatcagtagggcctgcaactgctttgaacctctgaaatgctttgggagtgtgcacgaggagatgaatcatgctgatgaatggatgctgtgtggctgaaaactgaccacgcttttctgccataaaatcacattctgatacattcaccaagtcagtgaaaagctttacggactgactctttttaaaacagatcctgagactctaatccatgcttagtgtaatacttggaacaaagactgtgcttcatgttctaggtgcttttatttgtattttgtaaaagtgtcccagagttttaatgcaaagtcagagacagctgcgtaaggtttaccacctgccttttgtcttccacctgggggtggacatgcaggtcacaccgcaagctggttgaggagagagccctttgcaccaatctaggggatgcaaccagggccactttgtaggatgtgggcagatggctctggaatgcagggaattcattctattctggccaacggtgccatctgctgaaagagctactggtaagtcaatttaggcatgaagcttccattgagagtcaagatattactgcatcaaaaaggcagaagaggctagacacagtggctcacacctataatcccagcactttgggaggccgaggcgagtggatcacctgaggtcaggaattcgagatcagcatggacaacatggtgaaaccctgtctctactaaaaatgcaaaattagccgggcgtcgtggcacatgactatagtcctagctatttgggaggctgaggcaggagaatcgcttgaactcggaaggcggaggtttcagtgggccaagatcgcgccattgcaccccagcctgggcaacaagaatgaaactccatctcaaaaatgaaaatttttaaaaaaggcagaagaggcctctttgagcaggggaagagtaaagggtaaaaagaagggatgcctttatatgagaatcaggtgataatgaggcataactactctgccatttccttatttcaatcgaatatcagttctttgcctgcctcatccgaaaatatattagaatgcattgcaaatgcaacagcctgctggttcaaatattacagcgatgctttcctattacccaacgaaattatcttagagaatgttttcttagaacatatacatcagcaacaaatgttcaatcataaaagagcctgctctcatcataaaagagcctgctctcatcataaaagaacctgctctcatctttttttcaacagggtctcactctgctatgccctggagtgcagtggcatgatcacagctcaccacacactcgaccttccagtctcaagaaatcctcccacctcagcctccccagtctcaaacaatctgcccctcttggccttccaaagtgctaggattacaggcatgagccactgcagaggggccttccaaagtgctaggattacaggcatgagccactgcagaggggccttccaaagtgctaggattacaggcttgagctactgcacccagtcaaggaatacattttactgggtccacaacatacttcctttttgctcctgatggttcagttattagatgggttcttagaagccgtgatttgaggaagatttaacccctacccattcctattttctctctcattttctgtctgaaacaagtcagcctctcagaggctcccatgacccccagttgtgtgaaaaggcaggctatcaggccaggatctgaggagtcttttctctctctcctttcttttctctttctttcttcttttccttttcctcccccactcccttctttttgcttagatgaggtctctctctgtcacccaggctggagtgcagtggcacaatcatagcccactgcagcctcgacctcctgggctcaagcaattctcccaccttggccgcctgagtagctgggactataggtgtgtcccaccatgcccagctaatttttttttttttttggagagacagggtttcaccatgttgcctaggctagtctcaaactcctggcctcaagcaatcctccagcctcagcctcccagtgtgttgggattacaggtgtgagccactgtgtctggtaggagagggcttttgttttttccaatctggctgctgtactgtgtaaaagcctttccagctgaaggctcagttaatttttttttggtctatacccgcctgaacctagagctcaaagccctagcaaatccagttcaagtctcagctggaaactcaagctccacacgcaacagcaagctttcccagcctttcctcctgcttttgcctgcagatcatgccaatcaagaactgtggagcaacagatgattaagataaaggagcagcacctctcaaacttcagtgtggacatgaatcacctggggatcttgttcaagtgcggattctgattcagtgggtctgggtggggtattgctaacaagtgccaggtggagcagattttgggccttacaccacactctgagccacaggcattgacaaagtgatctcactctcatcaacctggtccagagccaagtctagggctacttgaaattccgtagccttccagcctttcctttaaaaggcgtcttcccactccaaagccccgagcttactgggtggaccccactcccaccttcattgcctacagtgctgttcattcctccacatactcctttgtccctgcatttcttaaaatgtgacagttggagctcctccctcaggatattactgagcctcttctaaccacaaaacaatgttgcccactgtaatgggcaacttgcagtcagcattgagcctgtgacttttctcaaatccaaagatttgcattcagtttaggaaatttcccttgaaagaatggcagcacctctgtccacagtctgcttgccaagtgtgtgtctcttggcattttttgtttgcttgcttacttactgcgcacgtgccttgttttggaactctgtttacatatccggtcctctggccagcctagcatttctctaaagggcagtgattataactcagtggctttgtaatggtactccctggcactaagtcccagcatataacagggtaaatacttagcaaaaataaaggaaaatcagatttctatgaaagtaatttgtgttaaaggctttagaggtgtgtagtttgtggcctagtagttctaattttagaagtccatttaaaacattgaatataagcaaatttttaaaacagtgtgatataaaagcttaacagtggaaacatcttaaatatccaacaataatgaaatgattataaattatgcctatattcatataagcaccttttagaaaacatcttctctaagaacatttaataaaaccgttctggccgagtatagtggctcacatctgggaggcagaggtggaagcattgcttgaggccaggagtttgagacaagcctggacaacataaagagacccccatctttacaaaaaacaaaaataaaaataaaattagtctgtgtggtggcacaaatctgtggtcctcaagaggctgaggtggaaggattgcttgagccaaggagtttgaggctgcagtgagctgtgattatggcattgcactacaacatgggcgacatagcaagatcctgtttttagaagaagaaaaagttcattatatagcacaaggtgaaaagtgcaagttgtaaaacgagataaacagcatggtcacaactttgtaaaatatacaaatatatatgcagaaaaataagtgaaaataaaatacaccaaaggttaatacagttgattgctgagtagcatgactacaggtaatttttacaggttttttcacttctttatattctgcaggtttcttttgcaatgaatgtatggtgagatttataattatatggcttgtagattacaattcatagtatacttcaaaatgattttttaaaaactgtcttgtcttctgaacttcatcacaaattcctcaagggcaaggattgtatctttggtttcagcaagcccgtttcagaggcctcttgattggtaaatattcattgatgctgctagtaattgattctttgtcttaacaggttctctttttctagctgccttagaaaaagtctcctttcgcatcaggcaggtgcttctgatcctctccctagagataggctatctaataaagccctctaagcctttatttttattttttattttttgagacggagtctcgctctgcctcccgggctggagtacagtgatgcgatctcggctcactgcagcctccgcctcccgggttcaagcgattctcctgtctcagcctccccattagctgggattacaggcaccccccccaccacacccggctaattttgtatttttagtagagatagtgtttcaccgtattggccaggctgctctaagcctatttgataaaacccttctcccaggccatcagcaacttgacaattagtactgacaggtgatgccttttgggatcaggtctccagtggttctcgttagcattcttcacttgaatattacccaaaacaatggcaaaaatcaacccctatcctaggttgctcggtggaggcaatcaaaacgagacgccttgggctggccgcgatgctcctttccccaggctctgggattgtggacaggagggcgcgcacccactggcgatccgacgcggagctgcagcgtgggggcgtggtgtggcgggtcctccggagcgcggggcggggctgtgggcggggatatgggcgggtcctccggggctcgggggcggggcggggcgcgggcgcgggcgccgggaggtggggcggcgcgcgccggcgtcccccgcgctcctcccgcgcgcggcccctggagtccctgaggcgcgcggccagcccagctcgggcccgcagcaccgggagcagcccgccggccaagcgagcgcgggccggggccggggccggggcctgggggcgccgcccccgggagtctttctgcggcccctgaggagcgagggcgacggcgaggctgaccggggccgaaaccatgaaccgaagttttcacaagtctcagaccttgcgattctacgattgcagcgcagtggaagtcaagagcaaggtaagccccccgcccgccccggcggccctgcgcccagtctcctggctaatgaatggggcgccccgcggagggggactggggcggcgtggaggcgacaggcgccggcgacaactttccagttcgggcgccgcgcgccgctccgcgggacgcgcactggggaccccggccgtccttcccgccccccgcgcggacacaaagcccggcagccgcggcgctcagagggccgagggccatcggacagtccgggcagactctggacccgctccgcgggagctgctcttttgttccacgagtgagaggcgatcggggcgcgccacacattggaggggagggcggcctttccggggcgagttgagggccaggggctgctcggattcggggccgtgggggggctctgggggcccgggccgtgggatggccctggccaaggcgccttcaaggctgcaaaggaggcttgttacctgccaggaggagacttgccgccggctccgagcccggcgtcccccacccgctcggtaccaaacatctaggcaccaggcgcgctcccccgcgcagacccagagcacgcacccggctctcccccggcccagacccagaccacgcctccccgggcgcgtccccgggccagacaccccaccccacccccacgggcgcgcccccaccccagactcccccacctccggacgcgcccccgccccagacccagcccactcccccgggcgcgcccccggctcagacccagacccctcccgagcgcgcccccggatcagacccgtacccagaccacccccacgggcgtgcccggcccctcccgctgcctgcgcccgggcggagcgtgcccgaacttgcgggtcgcgatgcg

SEQ ID NO: 2012 - DNA, 6000 bp, Homo sapiens
ctggccatgttgcccaacgccccacagctgctgtgtcctggctccctgtccctctcccctgaggaccatatcctcccacatgcacccctctgccttctgagaactgtctttcttccctacaaggcatgagagcagcaagatgccatcgtgtaagagtctcagtgacatcttgggctccacaggaagacctttgtacaactatcttatctaacccactttcaaattaaaaaactgaaagtcgggctgggcgcggtggctcatgcctgtcatcccagcagtttcagaggccgaggcaggcggatcacctgaggtcaggagttcgagaccagcctggccaacatggcgaaaccccgtcactactaaaactacaaaaattagccgagtatggtggcgcacctgtaatcccagctactcgggaggctgaggcaggagaattgcttgaacccaggaggcagagattgcaatgagccaagatcgtgtcactgcactccagcctgggcaacagagtgagactctgtctcaaaataaaataataaaataaaataaaaaactgaaactcataggccaggcacggtggctcatgtctgtaatcccagcactttgggaggccaaggagggtggatcacatgaggtcaggagttccagaccagcctggccaacatggtgaaaccccatctctactaaaaatataaaaattagctggcatggtggcacaagtcacccacttgggaggctgaggcaggaggatcacttgaacccgggaagcaaaggatgcagtgagaagagatggagccactgcgctccagcctgggtgacagagcaagacgccatctcaaaaaaaaaataattaaataaataaattaattaaataaacctgagactgggtttaatgtttgagcgatatttccaaggtcgtggcagaaactagatttgaatttaaggttcttctctgccatgtgatggaaaacctaactcaaactggcttaattaacgaagaaggaatttatttttacttatttatttatttttgagatggagtttcactcttgttgcccaggctggagtgcaatggcgtgatcttgactcaccacaacctccgcctcccaggttcaagcgattcttgggcctcaccctcccgagcagctggaattataggcatgtgccaccacgcccggctaattttgtatttttagtagagacagggtttctccatgttggtcaggctggtctggaactcctgacctcaggtgatccaccctcctcggcctcccaaagtgctgggattacaggtgtgagccacggcgcccggcacgaagaaggaatttaacctggttgtggtggtgtgcacgtgtggtcccagctacctgggaggctgaggtgggaggactgtttgagcccaggagttcaaggccagcctgagcaacaggaacgggggcagggagggaggaaaggaaaataaactaaaaaggctgggcgtggtggctcacgcctgtaattccagtactttaagaggccaaggcaggaggatcacttgaggctgagagatcgagaccagcctggccaacatggtaaaaccccatctctactaaaaattcaaaaattagctgggtgtgacagtgcacgcttgtgatcctagctacttcggagacaggtgggaggattgcttaagcctgggaggcagaggttgcaatgagctgagattgcgccactggactccagcttgggtgacacagagagactccatctcaacacaaacgaactaagaggcaagaattcatgagcttgcatcattggaacatccaggggaggtcaggtaacagcatgatgcaggatcactaataggattatcaacgtttcccctctcatcagccggctcggctttcctgtgatgccgcctttgttcggaggccccgtggtgacaccatgaccccgtaactccagccccaggtccttccagctcagccaccccagcactgtgatcccagagaaatgtcccagagctgaatctcattggacgtcaggagtcacatgcttgttcctgaaccaatcattgcagcccagggtgggggccctgggaactgatgggatggcccctccctgcagccagggcttgcgtcagtccaattcgaacccgttcccacagagtagggagcccccaagcaggcaggtggaagcccctggtgtccaccgctcccgggtgctgtgagcctgagcctccctgggggtcggggccctgtgggaccagctggaggggcttgaaaatctccccaacccaggccgggcgcggtggctcacgcctgtaatcccaacactttgggaggccgaggcgggcggatcacgaagtcaggagatcaagaccatcctggctaacacggtgaaaccgcttctctactaaaaatacaaaaaattagcagggcgtggtggcatgcgtctgtagtcccagctactcaggaggctgaggcaggagaatcacttgaacccgggaggtggaggttgcagggagccaagatcgtgccactgcactccagcctgggcgacagagcaagactccttctcaaaaaaaaaaaaaaaaaaaaaaagcgagagaaagaaaacctccctcacccacacagtgcttcctgggatgtgggtgtacggaagaagagagatcttgggagcccttagagaaggaatcgtggttaattctaattagcattaatttacccatgagctgctgcctgccggctccatgatgctggcaatatatccacgacctgtggcacggaagagactgaggctcacaaaaccctgggaaccttggtgaaggggccacagccagaaggccccactagtcccgagaccctccttttactccaggcccccagggtgccgggcagaggggcctgagggaggaggcccagaggcccttacgggtgaggacgcctcggcctcggccctggacagctctggaagtgaccgctcggcccagagctctttcttggatccctccctccctctccactcctgatgctgttttcctttccccagacaggtttgcctgctggtcctcttccggggaccagactcatgaagccggggccaggtgttggggcacctgcgggacagagtggccctggtcccagactggtttttgtttttggttttttttttttttgagacggagtctctgtcgcccaggctggagcgcagtggcgctatctagactcactgcaagctccgcctcccgggctcacgccattctcctgcctcagcctcccgagtagctgggactacgggcgcccgccaccacgcccagataattttttgtatttttagtagagacggggtttcaccatattagccacaatggtctcgatctcctgacattgtgatccgcccgcctcggccccccaaagtgttgggatcacaggcgtgagccaccgtgcccggcctgtatgttgatgcagctgtgtgtacccagggcatagcaacaatgccactggcacagtccgagggcagggccacccgtcacgggcacgactcaggggaggctgggctgccccgtcctcaccacggccagttctcccgaccaagcttcacagcaaggagcatgtgggtgtctgggcagccactgagccaggtcagaagtcaggtggggtcacagtgatgcccggaatcagctggggtcaagactcaggtgggctgggcgcggtggctcatgcctataatcccagcatttgggaggccgacgcagacggatccctttattagtccaaactgcatcctccccttcctttcaaaacctaacaacacacttgaggtcaggggttcgagaccagcctggccaacatggtgaaaccccatctctacttaaaatacaaaattagccggacgtggtggcgggcacctgtaatctcagctactcgggaggctgaggcggacactagcttgaacccgggaggcggaggttgcagtgagattgtgccactgcactccagcctgggccacagaacgagactctgtctcatttaaaaaaaaaaaaaaaaaaaagactcgggtaggacaaaggtcaggctgggaggagggcacagccaggctcgggctcagcttggggtgggggctccgtggggctggcgcctctcccgggtcaggtgctgagccgatgctggccggcgtaggcctctttcccagtttctctggggggcaggagcaccttgccaacctctgatggctccagcgcctgcactcgcctcacaccacatggtgacttcaacggggaccagggaagccctcgcccctcccacccctcagagccctccccgacctcgcccacttctcagagctcccgctgtcgggggaaccgaggcagcgccgcgcctggaagccaggtctgcggatcccgcctcgctcccgccccttcctcccttccgcgtggccagcgcgaccctaggacagacttcgcgcccgtcccctgcacagacggggaaacggagacggggacgcggggtcgcgccggatggaccggccctgcccctccggtcccggtcaggaccccgcgccgcgccccgttcaccgcccgcggccccgccccgcgccggcacgtcacaaaacaaccccaaagccgggggaccgggccggtgacggcgcagagcagccctgcccgcctccttgcgcacagcgtccgcggtgctggtcgagcagggggcgacggcggcggcctcggggatcggaagagcccggggctgcgcgctcgaaccctccctcccggcggaggcgctcggcgccgtaggcgggaccggggccgggactccacctcccggcgtcccctgcggccgggcgcgcaggcgcaagtcggacctggccgcggagcgcaggcgcagtcggggccaggcggtgcgcgcaggcgcagcggggggcggggcgcgcgggcccggccaaggcaagcgccggtggggcggcggcgccagagctgctggagcgctcggggtccccgggcggcggcggcggcgcagaggaggaggcaggcggcggccccggtggctcccccccggacggtgcgcggcccggcccgtctcgcgaactcgcggtggtcgcgcggccccgcgctgctccgaccccgggcccctccgccgccgccatggctcggccgctagtgcccagctcgcagaaggcgctgctgctggagctcaaggggctgcaggaagagccggtcgagggattccgcgtgacactggtggacgagggcgatctatacaactgggaggtggccatcttcgggccccccaacacctactacgagggcggctacttcaaggtgagcgcggcgacccccgcccgggtcccggagcccacgagcgacctcgggcgccgggaaccagctccctgccccgcggtcctagcgctgttgctgggcgggccccgaagcctcctggcttgggctcgtttcccttctatggccacgttcccccacccagctctgcccggccccctcctcggaccgtctcggggaccttcagcctctgctgcagtcctcgaaaatccccagttcccttcaaggcatcgtccggtcccctgttaggctcttggcccccggaggggtggccgggggccctccctgtagcatctgggcgtggggctcttgcccacctcctccttggcgggggctggaccccggctgcctccccctccgcccctgcgagaaagagggagcggagcccaggccgcgccggcctttcagctgccctccccgccctccccggaggagacaaagaggcccccccagaccccgtagctgctattgttggggagctgggcccgtgagcgggggagcgaggccagcctgggggtggctggcgcggccactcgctcagtctccaacaaaggcccggatgagccttggcagccaggacccgcctggaaagcggccacccttgccagtagcagccggccaggcgccctgggctccatcccctgctttatgtaacctgcgccctcgggaaggccgaagtaggggcgtgcctc

SEQ ID NO: 2013 - DNA, 6000 bp, Homo sapiens
ccagaaggtggtaactttgctcactaagcacccagcagagtggcccagggatgtggggtgggcctccccttgggcagtggacaggagggtgagagctcagccaggcagatgggggcaggggagatgtgaggagccccaccttcaccctcaaatggcccacaacagcctcctgtgggccctcttctataatgtttctccacttttttttttaaatttgttgcccagccggagtgcagtggtgtgatcatggctcactgcagcctaaatctcatgggctcaggtgatcttcccactgcttcccaaagtgctgggatcacaggcatgagacactgcagctggctatatcttcaaatttaaacatgatttgcagccaggcgcggtggttcacgtctgtgatcctagcactttgggaggccgagatgggtggatcacctgaggtcaggagttcgagaccagcctgaccaacgtggtaaaaccttgtctctactgaaaatacaaaaaaattagcctaactgggcatggtggcatgcggctataatctcagctacttgagaggctgaagcaggagagtcacttgaacccaggaggcggaaatcgcactctagcccgggcaacaagagctagactctgcctcaaaaaaaaaaaaaaaaaaaaaccatgatttgctcgtgttcttacctctcgatttggaattaagttacattacagagaaagtgtgggtccgtgtttttctctctgtttgggaaaaggtgggttggacagaggaaggatggcccagggttataagcttggctccagtacagccgggagacccccaggcagcatgagtcggtgggactggacctgcctggctggtgtccagaggggcccgtagccagtgggacggtgctgcacgtggtcgtgcctcaagccctccactgcaccgggcgccctggccaaccctgccaggaagtaaggagaccggggaggccactgagggcctggacctggctgggtagtcagaagtgggggcaagtcttggctggcagcccctgagatgtgtagaatgtttgaaaattcgcctgtgggttgacctgaacccaccgggcttgaaaccaacggtccaaagtttggagtgtggtcttaaggaaggagaccactactactcctgctgccttcctcccaccaccttgcctagttcacaagacaggaggagagaaaatgcaaaaagttggaaaaaaaatgcaaaagtaagataaacagacaaccttggcaccaccacccggccctaggagttaaaaaaaaagtaataataacatcaaccactgacctaaactacttgtgttatctgtaaattccagacactacgaaaaagcattgtaaaactttctgttgtgttagctgatgcatgcagcccccactcacgttttccacacttgcttgatgtatcacgaccctttcacgtggaccccttaaagttgtaagcctttaaaaaggccaagaatctctttttcggggagcttaagacgcgagtctgctgatgctgccggccgaataaaaacctcttctttaatccagtgtcaggagttttgtctgtggctcatcctgctacagtctggctgctaggtggccgccggaggtctctgggcagcactggccaggttcacttcagcgtgaacagcagaagcttgtacgggacccagcttcgaaggcccaccccaggtccagctcaaggagagggagggaaggcatgtgtaggcagggttcattgtagtctcggttgtcagcattcagaattctttttattttttgagacagagtctcgctctgtcgcccaggttggagttgagtggcacgatctcggctcactgcagcctccacctcccaggttaaagcaattctcctgcctcagcctcccgagtagctgggattacagaagcacgccaccacgcctggttaatttttgtatttttagtcgagacaggatttcaccatgttggccaggctggtctccaattcccaacctcaggtgatccgccttcctcggcctctgaaagtgctgtgctccagcctgggcgacggagactccgcctcaaaaaaaaaaaaaaaaaaaaaagaaattgctgaggtgttaggtgcttttcgcctcagataagcaaagtgggaaattagtggatgtcccactgaaacagctttatctgcaacatggttttcaaccctgagccttagaaatcaaaagtgccggaaaccatggtgcacacttgaagtctttaccgaggccccgtctaaaaaaaacaaatggagccgggcgcggtggctcacgcctgtaatcccagcactttgggaggccgaggcgggcggatcacgaggccaggagatcaagaccatcctggctaacatggtgaaaccccatctctactaaaaacacacacaaaaaatcagctgggcgtggtggcgggcgcctgtagtcccagctactggagaggctgaggcgggagaatggcgtgaacccgggaggcggagcttgcagtgagccgagatcgcgccactgcactccagcctgggggacagagcgagactccgtctcaaaaaaagaaaaaaataaataaatggaaatgacagagcttttgagctaccaggtctatctgcagagcaaatgacacagagatgtgtggggccgcgcccatcatgaggcagctagctgggaacaagccccagggggccctccctgaggaaagcataataggaatgggtgctgggcctcacttcgcttttgcagagctttactggcacccagctgtgcccattcatacctgtattacttctgccaggcagacgctgaaaatttactgtctggacctttacgggaagtttcctgtccataaaagccctccctgcacacgcccctgctggctagcacgtggctgctaatgggtacttcccttggttttctgcagttggaatccagcatgtgtgatcagggaaaatatgtattagtatttaaagcaaaaagatacccccagttcagagagacacatgtcttggtggccaggtggtgccctaggtccacaagaatttggggggtgtccaggaggtggggtgggagcctctaactagcactagggtgccactgtcgagggccactcccaactcaaggcccaggctctgtctttaggcctctctggccatatccgcacttcttttttttttttttttttttttttctgagacggagtctagctctgccgcccaggctggagtgcactggcagaatctcagctcattgcaacctccgcctcctgggttcaagcgattctgctcagcctcccgactagctgagactacaggcatgcgccaagacgccggttaattttttgtatttttagtatagacggggttttgccatgttggccaggctggtctcgaactcctgacctcaagtgatccacccgcttcggcctcccaaaatgctgggattacaggcgggagccaccgtgcccggccccacgcttctgtttctaccctctggtcccacaccccgctccagaatctgcatggactctcccagacctgcccggccccatctgtgccgtctcagacagacagctccgtcctcatcaggttcaggtctggccccggcgcttgcgggtcagctgccttcaggccctgtcctggttcccggcgcttctcacatccccgcggcctcccccctggacggcagtttacactgaactcggcgccctcccctgacttctgaaggaggagtcctgggtggccccgaagcctccccggcagccgcacggctccgtccccgctccagggttcagctgaggcacctgctggaggcggcctgtccccgccgccctgctaaagcggcgcccctttctccggccgctcgttctttggtttccagggactttgcacaattcataacacccctcttagcccccatcctgcccgggccgcatcttccgcccgatcatccggccctcgacccgcgcagccgcctccgccctcctctcccggcaccgcccacggcctgttctccccgcagccgccagcgggcgcccgcgagcctggagccgggcgcggccctgctctgtccacagcccgcggtggctcccacctcccgctgggcctgcgcgacctgccccccggggcctcccagccctcactgccctcgcgggctgcactctcccccaacactccccagggctgttcggcctccccagcagctccccatgccctgcccgccgcgctggcgtctctcccagcccgctgcagtcccctcgttcacgtcagcttcccaagggcctggattttgttttgttcagtgcagggggacccagcacacagtaggtgctttataaatgcttgttgcatgaatgtccgcgttcggtgtcgcccccttacggcggccccccgcgcgcccagctcggcgcccagcaagccttgtgcgcgcaggtgatgtttgctgaatgactaatgaacctcagcgcgccaagccgggctgattcgggggtggttccgagcttccgcagggtgaccgtccgcgggcagcggaccacagccgcatggcgacgccgcctctggccccccgcgacccccattccccgtgggacctctcgtgcccccacccccacccggcctcctccccgccgcctcgggcccccccagcctcctccgcattcgaactccccagcgtggtcggacccggaccctggcgccgctcggcccacgcgagtcccctcccctctctcccatccttggatctcccaccgcccctccgcagcctcggtcccgcgagactccccagcccccgcgagcacccccagaccccacggtacgccctcgcccctttcgggaggagccccgccccgggcccgcggactgacccctcccgcccctctccgcgcaggcgcagggcggccccgttcgcgtcccgcacccccaccctggccgccgaggggcggggcgcggcgggtccggggcggccgcggctccatggggctcctggggctcctgagcctgctgcactcggccttcttcggggaccaggtagggcgcgtgggtcgagccgttggggagggctccgggccgcgcaggaacggggcggggtccacaccgcgggaacagcgggcgcggcggcggggggcgcatggggcgagcgcgcggaggctgcagagtcgggggtctagtgccgtcgccgtagagaccgttgccgggaaaccgcctcggaaggctggcggggatggaagcccctctcgtgcgccgctgcgacccccagccccgggtctgcgcaagcgcagggctcgcccagcccagccctcggcctctgcaggagaccctcggacccctcctcactgcgccgacgcggaggctgcgccagctggggcggcgggggcggctgcgggggcatcctgcggaggctcggccctgcgcagggtgggggcctgggccacgccctgcgcttctttgggcctcagtttccccttctgggcgcgagcgtatggcctgctttgacgttcgccgccgctgctgttcgtatccgtccgctcccgaccccagcgcttctccagcctccggaatcgtctgaatttcgcggctgtgacatccctcattggaggggaaactgaggctggggggtgcagcggggagcccaaggtcacgcttcgaggccggagcctcgttgcggagctaaggcgcccgcaagagaacgcggggcgggggccggggagctgtccgcggtgctgacggaggcgcacgtctgccgactcgccgccggggaaactgaggcccatagcggcggtcaggcttcagggcgcggcctggaccggcctaccccaccctcccccacctccggtggcctcctcaccggtcagggctctgcccggccacccagccggcggcgggccgtctctatcctcccgcgatgacctggtgccttctctgtccccacccagctcccgatgggggccgcccctgtttctgcctctagcccctggcacagaggaggcatca

SEQ ID NO: 2014 - DNA, 6000 bp, Homo sapiens
ccggccctcgacccgcgcagccgcctccgccctcctctcccggcaccgcccacggcctgttctccccgcagccgccagcgggcgcccgcgagcctggagccgggcgcggccctgctctgtccacagcccgcggtggctcccacctcccgctgggcctgcgcgacctgccccccggggcctcccagccctcactgccctcgcgggctgcactctcccccaacactccccagggctgttcggcctccccagcagctccccatgccctgcccgccgcgctggcgtctctcccagcccgctgcagtcccctcgttcacgtcagcttcccaagggcctggattttgttttgttcagtgcagggggacccagcacacagtaggtgctttataaatgcttgttgcatgaatgtccgcgttcggtgtcgcccccttacggcggccccccgcgcgcccagctcggcgcccagcaagccttgtgcgcgcaggtgatgtttgctgaatgactaatgaacctcagcgcgccaagccgggctgattcgggggtggttccgagcttccgcagggtgaccgtccgcgggcagcggaccacagccgcatggcgacgccgcctctggccccccgcgacccccattccccgtgggacctctcgtgcccccacccccacccggcctcctccccgccgcctcgggcccccccagcctcctccgcattcgaactccccagcgtggtcggacccggaccctggcgccgctcggcccacgcgagtcccctcccctctctcccatccttggatctcccaccgcccctccgcagcctcggtcccgcgagactccccagcccccgcgagcacccccagaccccacggtacgccctcgcccctttcgggaggagccccgccccgggcccgcggactgacccctcccgcccctctccgcgcaggcgcagggcggccccgttcgcgtcccgcacccccaccctggccgccgaggggcggggcgcggcgggtccggggcggccgcggctccatggggctcctggggctcctgagcctgctgcactcggccttcttcggggaccaggtagggcgcgtgggtcgagccgttggggagggctccgggccgcgcaggaacggggcggggtccacaccgcgggaacagcgggcgcggcggcggggggcgcatggggcgagcgcgcggaggctgcagagtcgggggtctagtgccgtcgccgtagagaccgttgccgggaaaccgcctcggaaggctggcggggatggaagcccctctcgtgcgccgctgcgacccccagccccgggtctgcgcaagcgcagggctcgcccagcccagccctcggcctctgcaggagaccctcggacccctcctcactgcgccgacgcggaggctgcgccagctggggcggcgggggcggctgcgggggcatcctgcggaggctcggccctgcgcagggtgggggcctgggccacgccctgcgcttctttgggcctcagtttccccttctgggcgcgagcgtatggcctgctttgacgttcgccgccgctgctgttcgtatccgtccgctcccgaccccagcgcttctccagcctccggaatcgtctgaatttcgcggctgtgacatccctcattggaggggaaactgaggctggggggtgcagcggggagcccaaggtcacgcttcgaggccggagcctcgttgcggagctaaggcgcccgcaagagaacgcggggcgggggccggggagctgtccgcggtgctgacggaggcgcacgtctgccgactcgccgccggggaaactgaggcccatagcggcggtcaggcttcagggcgcggcctggaccggcctaccccaccctcccccacctccggtggcctcctcaccggtcagggctctgcccggccacccagccggcggcgggccgtctctatcctcccgcgatgacctggtgccttctctgtccccacccagctcccgatgggggccgcccctgtttctgcctctagcccctggcacagaggaggcatcaagggggcggggacagctcgaggtcagactcagaaggctcaaagacactccaagagtgagccgtgtgccaggctgcggacttgcggggaggtgtcacaggacaggggtgggggagtgagcatttcatggaacttcccctttagcccagcagcagtagggggcgtggaggaccccagggaggagcctaggtcggggtcttgggctaggccctgcgttctgcagtgggagaagggggagacctctctcagtctcctgaagtcctagggggctgtggggggttcttgaggctctgaaatgtctggtgatgtctgagtgtggctgtggttcaaggatttacagggtcgaggattttagtgtgtggggggggattgttcagggacataatgttttgtagatttggggccaagggcatcttgtcttggggtctcagcccccatgtaccctcagccctccaggccctggccacccccagagggataagaagggaggttcagtgtcactccggaggcctggctggcacaggtgaactcaggcaacacgttccctggcccaggcctcagtttccccatgtatacaaggacaggactgaccttggatcccccaaacccctgcctgatgggggcctggggagctgagacatctgaaactacacagggaggtgggacttagttcctctttgggggaggcagggatcatccaacccacccttcagtaaacaagactggaaaccgaggccagagagagacatgcccagggggacacagggacaacaaggctgagctgaagccagggccctgggctctgcatccccaaccccatttcagcctcgcccagctctgccccggcttgacctgtcaaaccccaccacgcgccctaccccatggctccaccagacaccccctgtgtcccaagcatgcattgatcttccctcagcctggaacgcctctcctcctgatcactgctgttcacttctcagggcagccttccagcctccagaaaaaaatccccttcgaggcgggcggatcatgaggtcaggagtttgagaccagcccgaccaacacggtgaaaccccctctctattaaaaatacaaaaattagctggcaaggtggtacatgcctgtaatcccagttactgaggagtctgaggcaggagaatcacttgaacccaggaggcggaggttgcggtgagccgagatggcgccactgcactgcagcctgggggacagagcaagaccccatctaaaaaaaaaaaaaaaaaaaggccgggcgtggtggttcacgcctgtaatcccagcactttgggaggccgaggcgggtggatcacgaggtcaggagatcgagaccatcctggctaacgtgaaatcccgtctctactaaaaaatacaaaaaattagcctgggcgtggtggcgggcgcctgtagtcccagctactcgggaggctgaggcaggagaatggcgtgaacctgggaggcggagcttgcagtgagccgagaacgtgccactgcactccagcctgggctacagagcaagactccgtctcaaaaaaaaaaaaaagaaaaaaaagaaaaagaaaaaagaaaagatcccctgtgtctgcccactgcattgcctccccagacccaaccagtggggacagctgcgtccagctctgggggctcccagacagccaggccgaagggctctcagcccctggcagtgctggcccgggacaaggccctcgggtcttcagctcaaggcccaacaggaaacagcacgggtcctcccttgcctttgtctacggggccttgaatactcggaccttcccaccctctcctatcattccctgcaccagcccttgcagaatcttccgcctcctctccattttacagaggaggaaaccgagggttgagcggcgaatgatttgccctgcctgcccagcacggaaaaaaatcactcttctggccccagtcgcctccctttctgtgctgtgagtctgtgtccagagcaggaagggctgctccgagctgcagggacgggctctgtgtgttaaaccttcaaatggcttccagggactcatggagcatccaggacacctggagatggcgactcctgggacccctggcccttccctcctctggccttcggtccgtgagggtgaattaagtgtgccacccaccaggggcagagacacatggagacagagattgagagacagagaacagagggggagacagaaagagagagggacatgaagagcaacggagttacaggaggatctgacgctccgttggggagacagggagaaatgtggggagatgcagcgtcccaggtgctccccagtggccctgcccctcctcccctctcccctccccaccaggcaggaccctcagggagctccagcctggacccgaaccctgtcccaccctgacgcacctgcaccaggccaggctggacctgtggggtgggtgcaggcctggccccagcccggccactgccctggaaacccctcccccgccaagatgctgatgtaacatccaggatttgatgttttactctccaattctgcaaatccagacgcaggaggttttaagaggccgttgcaccctgcaataaagtgcgggacacaggaatcttggtcctcggggcacccccttccctcgggggggtttcgccccccgcactcacggcccctgagcccgcgcggaggcccgacgccccgcggccgacgccggtccccgccccgggccgccattggctgttgccatggcaccagcccgtcttcccgcgccctcattggctgtctcacccgcatccctcatcccgcatcctcccccgctcgcggtggtctcgcccagcgctaggagcggcagcgccgcctgcccaggcccggaccgggctttgtccgccccggagcccctgcccgcgccgcggagaccccggagcccgcgcgctccgaggccaccccgggccgggatttccggtggggcccgcggagccgcgcagagggaggaggccccagacccaggcgccccgccagcccagctgcacgtaagcgggtgtgtgtcctcggggaggagggcaggggcgcgacctccgcctcgcgtcgaggtttccatccctggctctcagcattgcccgtcagcacagactctggaccctccatttccccagagtgggagctggaggggaaactgagtcccggtgagctgggcgtcagcgtttctgcagccggtcctgcgcacacacccactcacgggcttcaccatccggacctccctgaggtgatcggaggaagggatgggcaggccagtggtgtgtcttcgggggtgttgctgcacctctctgggtgtcagtttccctctctggaaagagggggtttggattaaaggaaggagaaaggcccctttgggcctggcttcccatacctgtgcctccctcccctgaaatgcagcccgctcaataagaccagcccccagtcatggtgccttcagggagtgatcgctcaggaaggcccccaggaggctacacgatgcaacctgggggtgaaagtaggcagaagagcttcgtggaagaagctgcactgtgtgggatggcaggacttagaaaaggtgctctaggcagggcaactgcacgtgcaaaggcctgagagaagagagcctccagcctctaagtgagtcgcggtgtacatggaggagtcggagcgtatcctgagggcactggggagccatggaaggtgtttgagcatgggagaaatgggatctcacttgtgacgtttaaagctccctctggctgtgcatgggggactgtgggaggccaggaagaggctgatcagaatgtcctcacagaggggtgtcaggagctgggggaggcatgatcccgctgggcagagcttggagggactagcttagtctgatgaggatgcagaaatgaccaccgaatgtggggagagggaaggtgtctgaggcttggcttcggtcagctgag

SEQ ID NO: 2015 - DNA, 6000 bp, Homo sapiens
tggggctcctggggctcctgagcctgctgcactcggccttcttcggggaccaggtagggcgcgtgggtcgagccgttggggagggctccgggccgcgcaggaacggggcggggtccacaccgcgggaacagcgggcgcggcggcggggggcgcatggggcgagcgcgcggaggctgcagagtcgggggtctagtgccgtcgccgtagagaccgttgccgggaaaccgcctcggaaggctggcggggatggaagcccctctcgtgcgccgctgcgacccccagccccgggtctgcgcaagcgcagggctcgcccagcccagccctcggcctctgcaggagaccctcggacccctcctcactgcgccgacgcggaggctgcgccagctggggcggcgggggcggctgcgggggcatcctgcggaggctcggccctgcgcagggtgggggcctgggccacgccctgcgcttctttgggcctcagtttccccttctgggcgcgagcgtatggcctgctttgacgttcgccgccgctgctgttcgtatccgtccgctcccgaccccagcgcttctccagcctccggaatcgtctgaatttcgcggctgtgacatccctcattggaggggaaactgaggctggggggtgcagcggggagcccaaggtcacgcttcgaggccggagcctcgttgcggagctaaggcgcccgcaagagaacgcggggcgggggccggggagctgtccgcggtgctgacggaggcgcacgtctgccgactcgccgccggggaaactgaggcccatagcggcggtcaggcttcagggcgcggcctggaccggcctaccccaccctcccccacctccggtggcctcctcaccggtcagggctctgcccggccacccagccggcggcgggccgtctctatcctcccgcgatgacctggtgccttctctgtccccacccagctcccgatgggggccgcccctgtttctgcctctagcccctggcacagaggaggcatcaagggggcggggacagctcgaggtcagactcagaaggctcaaagacactccaagagtgagccgtgtgccaggctgcggacttgcggggaggtgtcacaggacaggggtgggggagtgagcatttcatggaacttcccctttagcccagcagcagtagggggcgtggaggaccccagggaggagcctaggtcggggtcttgggctaggccctgcgttctgcagtgggagaagggggagacctctctcagtctcctgaagtcctagggggctgtggggggttcttgaggctctgaaatgtctggtgatgtctgagtgtggctgtggttcaaggatttacagggtcgaggattttagtgtgtggggggggattgttcagggacataatgttttgtagatttggggccaagggcatcttgtcttggggtctcagcccccatgtaccctcagccctccaggccctggccacccccagagggataagaagggaggttcagtgtcactccggaggcctggctggcacaggtgaactcaggcaacacgttccctggcccaggcctcagtttccccatgtatacaaggacaggactgaccttggatcccccaaacccctgcctgatgggggcctggggagctgagacatctgaaactacacagggaggtgggacttagttcctctttgggggaggcagggatcatccaacccacccttcagtaaacaagactggaaaccgaggccagagagagacatgcccagggggacacagggacaacaaggctgagctgaagccagggccctgggctctgcatccccaaccccatttcagcctcgcccagctctgccccggcttgacctgtcaaaccccaccacgcgccctaccccatggctccaccagacaccccctgtgtcccaagcatgcattgatcttccctcagcctggaacgcctctcctcctgatcactgctgttcacttctcagggcagccttccagcctccagaaaaaaatccccttcgaggcgggcggatcatgaggtcaggagtttgagaccagcccgaccaacacggtgaaaccccctctctattaaaaatacaaaaattagctggcaaggtggtacatgcctgtaatcccagttactgaggagtctgaggcaggagaatcacttgaacccaggaggcggaggttgcggtgagccgagatggcgccactgcactgcagcctgggggacagagcaagaccccatctaaaaaaaaaaaaaaaaaaaggccgggcgtggtggttcacgcctgtaatcccagcactttgggaggccgaggcgggtggatcacgaggtcaggagatcgagaccatcctggctaacgtgaaatcccgtctctactaaaaaatacaaaaaattagcctgggcgtggtggcgggcgcctgtagtcccagctactcgggaggctgaggcaggagaatggcgtgaacctgggaggcggagcttgcagtgagccgagaacgtgccactgcactccagcctgggctacagagcaagactccgtctcaaaaaaaaaaaaaagaaaaaaaagaaaaagaaaaaagaaaagatcccctgtgtctgcccactgcattgcctccccagacccaaccagtggggacagctgcgtccagctctgggggctcccagacagccaggccgaagggctctcagcccctggcagtgctggcccgggacaaggccctcgggtcttcagctcaaggcccaacaggaaacagcacgggtcctcccttgcctttgtctacggggccttgaatactcggaccttcccaccctctcctatcattccctgcaccagcccttgcagaatcttccgcctcctctccattttacagaggaggaaaccgagggttgagcggcgaatgatttgccctgcctgcccagcacggaaaaaaatcactcttctggccccagtcgcctccctttctgtgctgtgagtctgtgtccagagcaggaagggctgctccgagctgcagggacgggctctgtgtgttaaaccttcaaatggcttccagggactcatggagcatccaggacacctggagatggcgactcctgggacccctggcccttccctcctctggccttcggtccgtgagggtgaattaagtgtgccacccaccaggggcagagacacatggagacagagattgagagacagagaacagagggggagacagaaagagagagggacatgaagagcaacggagttacaggaggatctgacgctccgttggggagacagggagaaatgtggggagatgcagcgtcccaggtgctccccagtggccctgcccctcctcccctctcccctccccaccaggcaggaccctcagggagctccagcctggacccgaaccctgtcccaccctgacgcacctgcaccaggccaggctggacctgtggggtgggtgcaggcctggccccagcccggccactgccctggaaacccctcccccgccaagatgctgatgtaacatccaggatttgatgttttactctccaattctgcaaatccagacgcaggaggttttaagaggccgttgcaccctgcaataaagtgcgggacacaggaatcttggtcctcggggcacccccttccctcgggggggtttcgccccccgcactcacggcccctgagcccgcgcggaggcccgacgccccgcggccgacgccggtccccgccccgggccgccattggctgttgccatggcaccagcccgtcttcccgcgccctcattggctgtctcacccgcatccctcatcccgcatcctcccccgctcgcggtggtctcgcccagcgctaggagcggcagcgccgcctgcccaggcccggaccgggctttgtccgccccggagcccctgcccgcgccgcggagaccccggagcccgcgcgctccgaggccaccccgggccgggatttccggtggggcccgcggagccgcgcagagggaggaggccccagacccaggcgccccgccagcccagctgcacgtaagcgggtgtgtgtcctcggggaggagggcaggggcgcgacctccgcctcgcgtcgaggtttccatccctggctctcagcattgcccgtcagcacagactctggaccctccatttccccagagtgggagctggaggggaaactgagtcccggtgagctgggcgtcagcgtttctgcagccggtcctgcgcacacacccactcacgggcttcaccatccggacctccctgaggtgatcggaggaagggatgggcaggccagtggtgtgtcttcgggggtgttgctgcacctctctgggtgtcagtttccctctctggaaagagggggtttggattaaaggaaggagaaaggcccctttgggcctggcttcccatacctgtgcctccctcccctgaaatgcagcccgctcaataagaccagcccccagtcatggtgccttcagggagtgatcgctcaggaaggcccccaggaggctacacgatgcaacctgggggtgaaagtaggcagaagagcttcgtggaagaagctgcactgtgtgggatggcaggacttagaaaaggtgctctaggcagggcaactgcacgtgcaaaggcctgagagaagagagcctccagcctctaagtgagtcgcggtgtacatggaggagtcggagcgtatcctgagggcactggggagccatggaaggtgtttgagcatgggagaaatgggatctcacttgtgacgtttaaagctccctctggctgtgcatgggggactgtgggaggccaggaagaggctgatcagaatgtcctcacagaggggtgtcaggagctgggggaggcatgatcccgctgggcagagcttggagggactagcttagtctgatgaggatgcagaaatgaccaccgaatgtggggagagggaaggtgtctgaggcttggcttcggtcagctgagaagaaccacgtgggggaggcctgggtttggggagcaggaggcagacatgtgttgctttgcacgtcatctggtccttccacctggctgggcatgggatggtgacctcagctggaacatggggctcgagccagaccccagggtctccctgcgtgtagcccccaaccccaagcctgatccccactggagacctgaacagccttggacatcatcggatcagggtgggaggtgccagcctctgccacctgacttccagtccctgtgcccctcccaccctgcccttgggcactcctgccctgcaggttcctcagaggggcaacccaaagccagagaggggcgggtcttgtcgggcctccagcctggacttcccagcccctctggggcagcatctgggtgccagacctcggttcctagggcctcgtttctccctctgggaacagccaaatggtggtccctgagactcaggacagaccaagaaggagccggatgacatggcaagccacacactgcgtcccctgagcaggacgggacagcccgactccatcctcccacctgcgactgagcccccacccctactcctgtcccagccgtgcccctggtgacatttgggtgggaggggaggggatgagggggcacctgggggtcagagaacaaatgacgggtgaatacatgtgtgtggccaggtggaggagggaggggaggagcaggtgggctggacagggccggtgtgaggaaggggctcaggctggcagggggaggtggcagagggatgggctgccattggtgcgtctgagacaaaggcggagggaggaggcgagcgctgatgggaaaggaacaaagagggaaggggggcgtgaaggggggctccggcgggagggccgagccgagggaggaggcgccggccagctggacagagggaggaggccaggccagagccagaagacggccagaggcacaaagaagccagcgcgctggcagagtcaagggatggggcaggggctgccggggccagcagggaccagctg

SEQ ID NO: 2016 - DNA, 6000 bp, Homo sapiens
aggcccctgccccgtccaaggctgcaccagctgccccgccgcccgcccggacccagcccagcctcattgctgacgagaccccgccctgctactccctgagctcctccgccagctccctcagcgagcccgagccctcggagccgccggccgtccatccacgaggccgggagcccgcggtcaccaaggacccgggcccaggaggcggacgcgacagctcgcccagcccgcgggccgcggaggagcttctgcagcggtgcatcagctcggccctgcccaggcgccggccccccgtgtctggcctgcggcgccgcaagccccgagccacccggctggatgagcggcccgcagaggggtcccgggaacgcggcgaggaggcagcgggctcggaccgggcctccgacctggatagcgtggagtggcgcgccatccaggagggcgccaattcaattgtcacgtggctgcaccaggcagcagctgccacgcgggaggcctcgtccgagtccgactccatcctgtccttcgtatccgggctgtcagtgggatccaccctacagccccccaagcacaggaagggacgacaggcggagggagaaatgggcagtgcccggcggccagagaaaaggggcgcagcctcagtcaagaccagcgggagcccccgttcccctgcaggccccgagaagccacgtggcacacagaagaccacgcccggggtgccagctgtgctccggggacgaacagtgatctacgtccccagcccggcaccccgtgcccagcccaaagggacccccggcccccgcgccacaccgcggaaggtggcgcccccttgcctggcacagcccgcggctccagccaaagtcccgagccccgggcagcagcggtcgcggagcctacaccggcctgccaagacctcggagctggcgacgctgagccagccccccagaagcgccacaccgcccgcccgcctcgccaagaccccctcctccagctcctcccagacctcgcccgcctcccagcccctgcccagaaagcgccccccggtcacccaggctgctggggccctgcccggccccggagcctccccggtgcccaaaacgccggcgcgcacccttctggcgaagcagcacaagacgcagagatcgcccgtgcggatcccgttcatgcagaggccggcccggcgtgggccgccaccgctggctcgggcagtcccggagccgggccccaggggccgggcggggaccgaggcgggcccgggggcgcgcgggggccgcctgggcctggtgcgtgtggcctcagccctctccagcggcagcgagtcctccgaccgctcgggcttccggcgacagctaaccttcatcaaggagtcgccgggcttgcggcgccgccgctccgagctgtcctcggccgagtccgcggcctctgccccccagggcgcctcgccccgccgcggccggcccgcgctgcccgccgtcttcctctgctcctcgcgctgcgaagagctccgagcggcaccccggcagggcccggccccggcccggcagcggccccccgcggcccgacccagccctggcgagcgccctgcccggcgcaccacctccgagagcccgtcccgcctgcctgtgcgcgcgcccgccgcccggccggagactgtcaagcgctacgcgtcgctgccgcacatcagcgtggcccgcaggcccgacggcgccgtccccgcggcccctgcctcagccgacgccgcgcgccgcagcagcgacggggagccccggccgctccccagggtggccgcgccgggcacgacctggcggcgcatccgagatgaggacgtgccccacatcctgcgcagcacgcttcccgccacggccctgccactgcggggctccacgcccgaggacgccccggccgggcccccgccgcgcaagaccagcgacgccgtggtccagaccgaggaggtcgccgcccccaagaccaactccagcacgtccccgagcctggagaccagggagccccccggggcccccgccggcggccagctctccctcctcggcagcgacgtggacggtcccagcctcgccaaggctcccatctccgcacccttcgtgcacgagggcctgggggtcgccgtggggggcttccccgccagccggcacggctcccccagccgctcggcccgagtaccccccttcaactatgtgcccagccccatggtggtcgcagccaccaccgactcggccgcggagaaagccccggccactgcctccgccaccctcctggaatagtggcctaggccggccttctggaacgttctctcccggccctgcggcgcggtctggctgccccatgggcctgcgctgtagacgtcccccataggtcgccccagggcctctgcccacccgagccccaccactctcagaacccccgcccagcgcacggcgacctcgcgcctcaccggaagaccttgcctctgtgccgcggaggtccaggaggaaacggggcggccgctaggcctcaagtcccgaccgtggagcgctggcaagggcgtcctggcccagccctgagcgcgcggcccttcccctgtcggaagccgttgcttgaccccgggcgagggaggcggtagcctccgggtccgggtctgggtctgggtccgctgcttcgcagggacagcgctggggaggtgacggcgcccgccgcaggtggggcgaggctgggggagggcggcgccgcggcgggcctgccagctgggggcctttgcggcgcgcaggggcgaagcctgtaatcactgcagccgccggtaattcgctaatgagggctttgcagggattgttttcattctcagccccagctgtgggagtgcgggtgggggtgtggccgagccccggcaggaagccccgcccagacggtgttcagggaacccggagcccaagcgctccggcggagcccaaaagggtgggggtgggaggggcagaggccaacggatccccctgcctgtcgcaccccttggcgggagacgggaaggcagcgggctgcgtacgatgggaccctggtgcagacgccgggccggctgacatttggaccccatcccagaggagatgctggctaccagctggggcgaccccaagggtcgctggagtcagtatcggcccggcgcagccgcggcgggcgaggccaatggaaaggagactgaggggagtcccggcagtgagcccgaggccctgggacctggagcccgcgctggcctctccccagcggagcctgcacgttacggagaccatcacatgtgggcgtggtcagtgcccaggaccgcaccgctgctcatcttgtcccttttcaattcccttctggttcatgatgcataaagcgctaggccctagaactccagaaacagcacagctggggcggggacccagccttgccctccacccgaggctctgggacaaggcgggaggttcgggggccttccggcaggtgaacgcagggctggagagtatttggtgccagatgaggtgaaagcttatagaagggcctgaggggctcggctgcctcatcccctggcgggggaggctgggagctgggcctcctgcgtggggtgggactcgcaggggccgggtctccgtgactggggcaacgcctcgtcctgcagagggagccgacgacctcttttctgcagaaaagctccagcaggcgctgccttcacccacggatctgcccaggctgaaggcacacgctcaatgccccacgtgccttctccaggaggaacgaagcagggtttgagggttgggtggatggagctcagaaggaaaccccagccccaccacggatgacaccatccctcccgtcccatccccagcatgggcaaggccagcctttctggcagaaggagctgtcctcaactcagggccgctgtgagcaaagctgaccccagcccccacccccagttaacactgctgcttctctgaatgcatgtcacgctgcaccccatgctccgggcccacaccctgcaggacaaggagctccagacaggacgtccataagtcaccgaggtgtgccacccagcaggtgctggaggtgcccaatgctccctcctaggacctcgcagccaggcaaggctgtcaggttgttttgggggaagagggggtcatggatggctgagcagagagcggggaaaatgcaggctgagtggggcgacctcctgcctgccaggagccccctttcaggacacagcgggggtctcacacttgctgtccccatccatggcccgagggggaacctggtggtctcttctgagcttttggacttggggatgccaaacacgtgctcaccctcacactcgccccggcccgctgcgcccctaattgccaaagggtagggaaatggcgaagccagccaccaggtcgctggtgacagggccagggttatgcaggaaggtggtgcggcattgccttccacatatgtaagtctctgggcggcgccctcccagctccctgcctctgtttccccatgtgggccgtggggaactcccagagctacctcttgggggagcgtggtggcagcgatgatggggagacgcctggaagctcacagaacttgggtctggctggctcctgcccgtgacgccttgcccagcagcaaggtgcgcaacatggctgccagccccgcctcccacccccaccccgagtcctgagctcactttcgccttctccatcccctgccgtgggggccacagccacacctcaccgcccagtccagctgtctccagaaggggacaggcagtccgcggtctctggacaatcaactcaaggtacgcccactgcaaggcctccctcccaccgcggcccctgcctggccacctggcctctctgcaccagggtgacaaggggtcctcgtctgccccccaatgctccagggccagtcctaaggagctgagggtctgaggacgcagggagggtggaggtgtcctgaggctgatggacagtgaccgccactggcccccaacatgaccacacgtgggtgctgaactcggggcgccgtgcccaccggcatggtcctcccgagctccgacagcattacctcacccggccccatctgttgccccggtccagccctgatggcgcgcgcctggtctgtctgattcccctagccgccaccccacgtttctgtaccgggtctctgcagtgttaaacggacgtgtaaatagtggtaaatagtgaaagcctgtccttccctaaatgtaaagccatctgtccggcgtaaggacgacaccgtcagctgtccgactcgcacacatttaataaactgagctcttgcattgcctgccgccatcacctcttcctcaaaatgggctgtgggcgggtaggttcatcgctgtctatgtgctgccacagaattgctgagaccccccaggttagatccctggaagcagagccagaaagcagaaactgggggcacagggtttgtgggcaccccacccagatgggccggggaggcactggctgaggccaggagtctccccctggtcccaagggagggcaggctccagggggtgcacagcaccccagacagggggtccaacctgggcattggtacctgggccagttattatggcaggccccagtgtggggcaggaggcacccatgagccactaggagctgtggctggtgcaacagctgggatggggcagccacagcagccactaccggggagagtcaatggtggacaggggctgcgggagctgggacggccccacgtcaaagccacttcagggagcacagccctggcccagctggggggacaaggaaagctatgactgcaagcagcacagaagtgcagggtgggaagggatggcaggagccggccccctccccaccttccaccctgggacactgccgggacctccctcggccaggtgagcagcttcagaagcatgaccagtgagaagtccctagggcccaggccgggctagccaagtcccagtttctggatgaggcgcctcccaggctgtgtgtggca

SEQ ID NO: 2017 - DNA, 6000 bp, Homo sapiens
gacctcgggcaagttccttgacttctctgggcctcactttcttcacacaaaacagcggtggagggagacctaccccctccttcacggggataccggggacatcattaaagaggagaatttttttttgtttttttttggtttttttggtttttgttttgagacggagtcttatgctgcccaggctggagtgcaatggcacgatcttggctgactacaacctccgccccctggattcagacgattctgctgcctcagcctcccgagtagctgggattacaggcacgtgccaccacgcctggctaatttttgtatttttagtagagacagggtttcaccatgttggccaggctggtctcgaacccctgacctcaggtgatccacccaccttggtctcccaaagtactgggattacaggcatgagccaccgagcccagcctcttgtttactttttaaaaacattctcaaggccatgtgcagtggctcatgcctataatcccagcactttgggaggccaaagcaaacgaataagctgaggtcaggagtttgagaccagcctggccaacatggagaaaccccgtttctaccaaaaatacaaaaattagctgggtgtgatggcgcatgcgtgtaatcctagctactcgggaggctgaggcaagaaaatcacttgaacccgggaggcagaggttgcagtgagccaagatcgtgccactgcactccagcctggtgacaagagcgtgacgctgtctcaaaaaatcaacaaaaaacctctttataaagtgaacaaggcagctgatgtggtggctcatgtctgtaatcctagcactttgggaggaaggagttcaaggccagcctggtctacatggcgaaaccccacctctacaaaaaaaaaaaaaaaactagtcagatgtggtggaacatacctgtggtcccagctactcgggaggctgaggtgggaggatcacttgagcccaggagatggaggctgcagtgagctatgatggcaccactgcactccagcctgggcaacggagcaagaccctgtctcaaaataaaataataaattggctggccacagtggctcacgcctgtaatcccagcactttgggaggccaaggtgggcggatcacttgaggccaggaattcaagaccagcccggccaacatggcgaaacccggtctctactaagaatacaaaaattagctgggtgtggtggggcgggcctgtaatcccagctacttgggaggctaaggcacaaggatcacttgaacccaggaagcggaggttgtagagagccaagatcacaccactgcattccagcctgggcaacagagcaagactctgtctcataaataaataataaatagagaagaaaataatttttaaaatataaaataaaggccaggcagagtggctcacgcctgtaatcccagcactttgggaggccgaggcgggcggatcacgaggtcaagagagtgagaccatcctggccaacatggtgaaaccctgtctctactaaaaatataaaaattagctgagtgtggtggcatgcgcctgtaatcccagctactcgggaggctgaggcaggagaatcacttgaacctgggaggcagaggttgcaatgagccgagatcatgccactgcactccagcctggcaacagagcgagactctgtctcaataaataaataaataatataatataataaagtaagattgagttccagactgggagtgctggctcacacctgtaattccagcactttgggaggccgaggaaggtggatcacttgaggtcaggcgtttgagaccagcctggccaacatggtgaaaccccatctctactaaaaatacaaaaattatccaggtgtggcggtggacgcctgtaatcccagctactcgggaggctgaggtaggagaattgcttgaacccaggaggcagaggttgtagtgagccaatatcacgccattgcactccagcctgggcaacaagagcgaaactccatctcaaaaaataaaataataaataaaatataaaatacagttccagataaatggatcttttgtgtgtggtgtgtaagtatatccccaatgttgcgtgggctagacttatactaaaagaattctgtgttaaccagaactccagtttcactgggcatcctgtactgtgtctggaagcctccctcagagacaaagtcacttgccatgggtcacccagcaggttgttagagcctgggatggggaaactgaggtcacagggttgcaggaggtggggggtgagcgtgggaagaggtaaaccatgtctgcagcagagtctgacccctcgacttctctccctttttctctctccctctttctgtcgccactgggccactcagtcctggtatctgggatagcaaaggtcttcttccctcgccccttctccatcgtcccaggaatcccagggggcagcacagccggcccccggcccacgttttcggtggaaaattagagtgaacaagaacacccctgccgactcccagcccggccaaaaagacaaaacacatagacgcacacactcaggaggaaaagaaaaaacaaaggcagaagaagaagaagaagaaataaaaacccacccaagcaagaagacaaaaggtaaagacgcaacgtttccaactctcgggacgccaaggccgcaggactggagggccaggccccgccacccccacgggagacccgggacagggcgtcttcctaagttattcatctcctctccgcctgctgctcgggaaggacagacgccggccgcccgcccgcgccccggaggccctggctctgtccggagaccaggtgagcacagcctggagcctgtgcccagggccgacaggcgcgacacccagcaaggccacctctccccgggcccccgcgcctctgccggacacggaccggcccctcagcccccaccgaggacgcagccactggggggaaagggagacacagcggaccccggccgggcagcggagaccgcagaggcgggcagggtggggcaggcgagtggtgtcgcgggggtgcgtggcgcttgcgagccctggccaggggaggaagtgaggcccaggcacctgctgcccctcgagggggccctgcctgccgcggggcctccccacaagcccctcccaaagcgccggccgactcgctgtctcgctggggactctttcagccctcgcgcccgcccgtttgggaggagaagtctctatgcaattggccccggcccctccaccccccacccccggcataggaggcccccccacctcgcccggctcacacccccaaagggagggacccacattgcacacactgtaagaaatgcactttccgaggaaggggatgggggagcccggacacccagagctccccgagttgggggtgcccgtctggagcgcccccgtcagcccctggcggtgggaggtgagagcgagtggtttaagtgcctgattaccaccacccgcccccccctttgtccagctgggacacggaatggccgcgggcctcctccccctcccctccagcctctccaccagcccctccagtcaaccctcatcgccgtgcccccccagagctagagagatggggcccctgcgtggcccgaggggcagagctgggcgtcacttcgcaagcgtcctgccctgccggggcgcgggggtgggctctggggaagccggtgcgccccccacgcctccgctgccagtgccttacattctggagcgacccccctccctggtgcctcccagcgaagggggaccgccgtttgcactttcatcgcctaccccgacgcggggcccagctgcgggacgtgcatcacggctgggcccccagaggagagaggaggccgacgccagcggtccccgctcggaacggggagggttttcggggggttcggcgtcgcaccttggggccccccgcagccgtgtagggggcctcccatctgctaagcgtttttccgttgagccgctccaaaaacactaagctggggacgccaggtgcccccccaccccggctccctggccctatccacacctccacccccaccccaggatcgccatctttaggggaggcctgggagggggtgttaggtgttttagggccaccgagctcaaacacaaggacccctccccggcccacccagcccagccccaactgacctccatgcctagggaaaaactccccccaccactgccccctcccccgacccaggccaaagccagggcaggtctccgggtctcacctgctcctagcctcacccccctgcccccgaaaaccagactctcctcccaaactagcctcaggagcttggcgaacccgctcgctcctaaagagaaagacccaggaccctcccccatcacccccaagagaggttcgccatcctctggcctcgagcccttggtccctccgtccgtctgtcctcggggcccgctcccccggtggcccttggggatcaaagcgtgggccgctctccgggagggcgggcgggggagggggtggtcgggttgtgccattggggtgtccggaagcttctcagccagggtgggggtcgtggagtgggggagggaggccagccgggctccagaggggtcagggcgcgacgagaaccaactctttacctaactttgcatggtgcttagtcaaggactcctgcgacctggctcccgaggtcagctggcggcgctgacacacatgcatggcagactatccctggctctatctccctgttcctcgccccctccaccccccacttcctctttaaaaaaaaaaaaaaaaaaaaaaagatacaagaaaaacctttaaaaaaattccatgtttcctaatttgcacgaaattttctaccacaagatgtgccttgccttccgagaataagtattacctttaaacaatatcagcgcacacacatagctgcatgttctgctcgtgtagtttaaaaaaaaaaagacaaaacagtgacatgaaataaaaaataaaaattgaaaagggatgtatttctatttgtaaaaaaaataaaataaaaaataagaaagtgagaatctaaaaaaaaaaaaaaaaaaaaaaaaggaagaaaaaccacgctaaaaatcaagccactgaaaacaattgcccccaggtctacccagcccctggctgtccttggtcctgtctcccctcctgctgtattcaggggtgccccctggtgctcagcctctaccacccccaaccctgctcttgggtacccagaggggtcatttctgaatcccttgcccagaggacagacctccggggcccatcttggccctgggaaagggctctcctctctgattggtccctaggccacgggccggcccccagacaccattcaccgacccactgcaggctgtcctccaaccatggggtggccactccacccgcagccagactccccgctccccacttttcatgcaggctggcatacccctggctcagggtcaaatgctgttccacacccacctcagaggcaccccctctcccctgccccgtgcatccccacccttcttgccaaaggacctcttttcccctatccagagaccaccccaggtggcattctctcccaccttctcctttgtcccccatcccctgtctctgtcttccagctgtgaatatgaagggtatcctgtatgaaacaaaaacaaaacctgatatatgcaatatctgtctgtctgtctgtacccatgggcctggctcagccattggaggcccagccgagggtccggcagggcacagggacagccaggtggcaccgagtcacaggctgtggtccggtggctgagcatgctgttgtcttgtccttgattttattttcttttgttctttttttttttcttttctttttgtttttaactccagcttcctttgctttttacttgaccaaagctaagacaatagccagatggttagtggggcagccaggcagggaggacccagggctgggattctccaaccttaggccattcctgcagccctc

SEQ ID NO: 2018 - DNA, 6000 bp, Homo sapiens
agacagggtttcaccatgttggccaggctggtctcgaacccctgacctcaggtgatccacccaccttggtctcccaaagtactgggattacaggcatgagccaccgagcccagcctcttgtttactttttaaaaacattctcaaggccatgtgcagtggctcatgcctataatcccagcactttgggaggccaaagcaaacgaataagctgaggtcaggagtttgagaccagcctggccaacatggagaaaccccgtttctaccaaaaatacaaaaattagctgggtgtgatggcgcatgcgtgtaatcctagctactcgggaggctgaggcaagaaaatcacttgaacccgggaggcagaggttgcagtgagccaagatcgtgccactgcactccagcctggtgacaagagcgtgacgctgtctcaaaaaatcaacaaaaaacctctttataaagtgaacaaggcagctgatgtggtggctcatgtctgtaatcctagcactttgggaggaaggagttcaaggccagcctggtctacatggcgaaaccccacctctacaaaaaaaaaaaaaaaactagtcagatgtggtggaacatacctgtggtcccagctactcgggaggctgaggtgggaggatcacttgagcccaggagatggaggctgcagtgagctatgatggcaccactgcactccagcctgggcaacggagcaagaccctgtctcaaaataaaataataaattggctggccacagtggctcacgcctgtaatcccagcactttgggaggccaaggtgggcggatcacttgaggccaggaattcaagaccagcccggccaacatggcgaaacccggtctctactaagaatacaaaaattagctgggtgtggtggggcgggcctgtaatcccagctacttgggaggctaaggcacaaggatcacttgaacccaggaagcggaggttgtagagagccaagatcacaccactgcattccagcctgggcaacagagcaagactctgtctcataaataaataataaatagagaagaaaataatttttaaaatataaaataaaggccaggcagagtggctcacgcctgtaatcccagcactttgggaggccgaggcgggcggatcacgaggtcaagagagtgagaccatcctggccaacatggtgaaaccctgtctctactaaaaatataaaaattagctgagtgtggtggcatgcgcctgtaatcccagctactcgggaggctgaggcaggagaatcacttgaacctgggaggcagaggttgcaatgagccgagatcatgccactgcactccagcctggcaacagagcgagactctgtctcaataaataaataaataatataatataataaagtaagattgagttccagactgggagtgctggctcacacctgtaattccagcactttgggaggccgaggaaggtggatcacttgaggtcaggcgtttgagaccagcctggccaacatggtgaaaccccatctctactaaaaatacaaaaattatccaggtgtggcggtggacgcctgtaatcccagctactcgggaggctgaggtaggagaattgcttgaacccaggaggcagaggttgtagtgagccaatatcacgccattgcactccagcctgggcaacaagagcgaaactccatctcaaaaaataaaataataaataaaatataaaatacagttccagataaatggatcttttgtgtgtggtgtgtaagtatatccccaatgttgcgtgggctagacttatactaaaagaattctgtgttaaccagaactccagtttcactgggcatcctgtactgtgtctggaagcctccctcagagacaaagtcacttgccatgggtcacccagcaggttgttagagcctgggatggggaaactgaggtcacagggttgcaggaggtggggggtgagcgtgggaagaggtaaaccatgtctgcagcagagtctgacccctcgacttctctccctttttctctctccctctttctgtcgccactgggccactcagtcctggtatctgggatagcaaaggtcttcttccctcgccccttctccatcgtcccaggaatcccagggggcagcacagccggcccccggcccacgttttcggtggaaaattagagtgaacaagaacacccctgccgactcccagcccggccaaaaagacaaaacacatagacgcacacactcaggaggaaaagaaaaaacaaaggcagaagaagaagaagaagaaataaaaacccacccaagcaagaagacaaaaggtaaagacgcaacgtttccaactctcgggacgccaaggccgcaggactggagggccaggccccgccacccccacgggagacccgggacagggcgtcttcctaagttattcatctcctctccgcctgctgctcgggaaggacagacgccggccgcccgcccgcgccccggaggccctggctctgtccggagaccaggtgagcacagcctggagcctgtgcccagggccgacaggcgcgacacccagcaaggccacctctccccgggcccccgcgcctctgccggacacggaccggcccctcagcccccaccgaggacgcagccactggggggaaagggagacacagcggaccccggccgggcagcggagaccgcagaggcgggcagggtggggcaggcgagtggtgtcgcgggggtgcgtggcgcttgcgagccctggccaggggaggaagtgaggcccaggcacctgctgcccctcgagggggccctgcctgccgcggggcctccccacaagcccctcccaaagcgccggccgactcgctgtctcgctggggactctttcagccctcgcgcccgcccgtttgggaggagaagtctctatgcaattggccccggcccctccaccccccacccccggcataggaggcccccccacctcgcccggctcacacccccaaagggagggacccacattgcacacactgtaagaaatgcactttccgaggaaggggatgggggagcccggacacccagagctccccgagttgggggtgcccgtctggagcgcccccgtcagcccctggcggtgggaggtgagagcgagtggtttaagtgcctgattaccaccacccgcccccccctttgtccagctgggacacggaatggccgcgggcctcctccccctcccctccagcctctccaccagcccctccagtcaaccctcatcgccgtgcccccccagagctagagagatggggcccctgcgtggcccgaggggcagagctgggcgtcacttcgcaagcgtcctgccctgccggggcgcgggggtgggctctggggaagccggtgcgccccccacgcctccgctgccagtgccttacattctggagcgacccccctccctggtgcctcccagcgaagggggaccgccgtttgcactttcatcgcctaccccgacgcggggcccagctgcgggacgtgcatcacggctgggcccccagaggagagaggaggccgacgccagcggtccccgctcggaacggggagggttttcggggggttcggcgtcgcaccttggggccccccgcagccgtgtagggggcctcccatctgctaagcgtttttccgttgagccgctccaaaaacactaagctggggacgccaggtgcccccccaccccggctccctggccctatccacacctccacccccaccccaggatcgccatctttaggggaggcctgggagggggtgttaggtgttttagggccaccgagctcaaacacaaggacccctccccggcccacccagcccagccccaactgacctccatgcctagggaaaaactccccccaccactgccccctcccccgacccaggccaaagccagggcaggtctccgggtctcacctgctcctagcctcacccccctgcccccgaaaaccagactctcctcccaaactagcctcaggagcttggcgaacccgctcgctcctaaagagaaagacccaggaccctcccccatcacccccaagagaggttcgccatcctctggcctcgagcccttggtccctccgtccgtctgtcctcggggcccgctcccccggtggcccttggggatcaaagcgtgggccgctctccgggagggcgggcgggggagggggtggtcgggttgtgccattggggtgtccggaagcttctcagccagggtgggggtcgtggagtgggggagggaggccagccgggctccagaggggtcagggcgcgacgagaaccaactctttacctaactttgcatggtgcttagtcaaggactcctgcgacctggctcccgaggtcagctggcggcgctgacacacatgcatggcagactatccctggctctatctccctgttcctcgccccctccaccccccacttcctctttaaaaaaaaaaaaaaaaaaaaaaagatacaagaaaaacctttaaaaaaattccatgtttcctaatttgcacgaaattttctaccacaagatgtgccttgccttccgagaataagtattacctttaaacaatatcagcgcacacacatagctgcatgttctgctcgtgtagtttaaaaaaaaaaagacaaaacagtgacatgaaataaaaaataaaaattgaaaagggatgtatttctatttgtaaaaaaaataaaataaaaaataagaaagtgagaatctaaaaaaaaaaaaaaaaaaaaaaaaggaagaaaaaccacgctaaaaatcaagccactgaaaacaattgcccccaggtctacccagcccctggctgtccttggtcctgtctcccctcctgctgtattcaggggtgccccctggtgctcagcctctaccacccccaaccctgctcttgggtacccagaggggtcatttctgaatcccttgcccagaggacagacctccggggcccatcttggccctgggaaagggctctcctctctgattggtccctaggccacgggccggcccccagacaccattcaccgacccactgcaggctgtcctccaaccatggggtggccactccacccgcagccagactccccgctccccacttttcatgcaggctggcatacccctggctcagggtcaaatgctgttccacacccacctcagaggcaccccctctcccctgccccgtgcatccccacccttcttgccaaaggacctcttttcccctatccagagaccaccccaggtggcattctctcccaccttctcctttgtcccccatcccctgtctctgtcttccagctgtgaatatgaagggtatcctgtatgaaacaaaaacaaaacctgatatatgcaatatctgtctgtctgtctgtacccatgggcctggctcagccattggaggcccagccgagggtccggcagggcacagggacagccaggtggcaccgagtcacaggctgtggtccggtggctgagcatgctgttgtcttgtccttgattttattttcttttgttctttttttttttcttttctttttgtttttaactccagcttcctttgctttttacttgaccaaagctaagacaatagccagatggttagtggggcagccaggcagggaggacccagggctgggattctccaaccttaggccattcctgcagccctcaccacctccagcccctccaagcatctcgtgtagggacccacgcagatggtcccattcattcactattgcccccaaccccgggattttgggtggtctccacagccaccatcatacactcatcccgtgttttcttccaaaaagtcacctcagcagcctccccaggcgatacagagggagagcccagaccaccacagctggccacgacattgcccttaagtaatatgcattggccagagagcccgggctggctgtgcacagcattcatgtagctgatttctagctttttttttttttctgccccactcctgagcaaatctgtct

SEQ ID NO: 2019 - DNA, 6000 bp, Homo sapiens
gggtgttatcacttgaggtcaggagttcgagaccagcctggccaacatggtgaaacccccatctctactaaaaatacaaaaaggcttcagcttcccgagtagctgggattacaggcatgcaacaccacaccagctaactttttgtatttttagtagagacagggtttcactatgttggccaggctggtctcaaactcctgacctcaggtgatccacctgccttggcctcccaaagtgctgggattacaggcgtgagctactgtgccctgcttgcaatctcttatttttaaaatgtgggtgactgccaggagtggtggctcatacctgtaatcctggcactttgggaggctgtggggtgagaggatgatcgattgagcccaagattccaagaccagcctgggcaatgtggtaagcccccgtctcaacagaaaaaaaattttttttaatttggctgggcgcagtggctcagcctgtaatcccagctacttgggtggctgaggcaggagaatcgcttgagcctgggagacacaggttacagtgagttgagatcctgtcactgcactccagcctgggcaacagagcaagactccatttccaaaaaaaaaaaaaaaaaatcaactgtgcctggtggctcatgcctgtaggcccagctactcaggtggcttgatagcttgagtccaggagttcaaggatccagtgagctgtaatcacaccactggattccagcctgggtgacagagcaagaccccatctcaaaaaaaaaaaaaaaatgagcaattaataaaaaaacatggctgggcattgtagctcacgcctgtaattccagcactttgggaggccaaggcaggtggatcacttgtggtcaggagttcaagaccagcatggccaacatgctgaaaccccatctctactaaaaatactaaaattagcttggcctagtggcgggtgcctgtaattccagctactcaggagtctgaggcaggagcatcacttgaacccaggagacggaagttgcagtgagccaagatcgcgtcactgcactccagcttgggtgacagagtgagactccatctcaaaaaaataattaaataaaaattaatgaaaaaacataaaatgctgtgcatagcaaagaaatccttttggaaggccaacttctattttaagacaacattcacaaatacttattgagcaactactgtgtgctggacagtgtcctgagcacagaggatagtgtcctgggcacagaggacacaggacaaaacagacacagtgtctggcctcatggagctgacacccccacttttatttttttgagacagagtctcgctctgtcacccaggctggagtgcaatggggcgatctcagctcactgcaagctccgcctcctgggttcacgccattctcctgcctcagcctcccaagtagctgggacgacaggtgcccaccaccaagcccagctaatttttttgtatttttagtagagacggggtttcaccgtgttagccaggatggtctcgatctcctgacctcgtgatccgcccgcctcggcctcccaaagtgctgggattacaggcgtgagccaccgtgcacggcccaccccccctttttttttttaaattattgtattgccttcctatgtgttggaaaactgactgcagataacaggcatcactgcagccctcagctgccttgcgaggacgtcatctcaacatgtttgtggctcaggctgtttacggaggacttcccgtggaccaggagctgtgctgactcaggaaggctacgagggcagggtgccaggtgtgactggccccaaggatgctccccaggaggagataatcccagggtgcaggacgcagatatcgaagcctcagccaaaagcaaggcctgtgtaagtcagagaacttggcatctggcctctgtagaccttcgagaaactgatagcacagaagaaccaagtctgcgtcttctgttcggtgggtcctctgggattgagcaagtccctggggggcggaagtctggaatccaggtatctgcagatctgtggcctctctggaggctccaggggaggatccttcctgcctcttccagcttctgggggtggccgccagtccttggtgtttctcagcttgtggcttcgtcactccaatctctgccactgtcatcacctggccttgacccctgtgtgtctgtctctgtgtttctgtgttagaatctccctctcctctccttttattttattcttctgagacagagtcttgctgtgttgcccaggctggagtgcagtggcgcgatctcagctcaccgcaacctctgcctcccgggttccaacgattctcctccctcagcctcccgagtagctgggaatacaggggcctgctaccatgcccggctaatttttgtatttttagtagagatgaggtttcaccatgttggccaggctggtcttgaaggcctgacctcaagtaatctgcccacctcggcctaccaaagtgccgggattacagccgttagtcactgcgcccagctcctctttcagatctttattaaaacatcatctttgcaataagagcatccccgagcactgcatctgaaactgtaacctcttgcctcctccttttccctgttctcttttctccttaactcagctccaaaggggatttttttttttttttctggagtgcagtggtgcaatctcggttcacttcaaccaccgcctcccgggttcaagggattctcctgcctcagcctcccgagaagctgggattacaggcgcgtgctaccacgctcagctaatttttgtatttttagtagagatgaggtttcgccatgttgaccaggatggtctcgatctcttgacttcataatccgccctccttggcctcccaaagcactgggattataggcgcaagccactgcgccgggcaagaactttttaaataacagctgtattgagatatagtttacatactgtacaattcatctgtgtaaagtgataattcagtggtgtttagtatattcagagtcgggcagccatcatcacataaattttttttttttttttccgagacggagtcttgctttgacacccaaggtggagtgtggtggcatgatctgggctcactgcaacctacacttcccgggttcaagtgattcccctgcttcagcctcccgagtagctgggactacaggtgcgcgccagcacacccggctcatttttgtatttttagtagagatggggtttcaccagattggccaggctgatcttgaactcctgacctcaagtgatctgcccgcctcagcctcccaaagtgctgggattacaggtgtgagccacagctcacggccatcacatcaattttagaacatatccatcaaccccccaaaataaagtccattccagtcactcctgatccccctctcccagcccttggcaaccactaatccacttcctgtctctatggatttgcttatctggacatttcgtatcaatggaatcactcactatgtggtcttttgtatctggcttctttcactgggcatgatgctttcgaggttcatccaatctgtagcctgtgtccgagcctcattgcctcatattgcaaaacaccgtgtcattgtatgaatggagcattttcccttcatctgtggatgtacatttgggttgtgtgcactttgtggatgttatgaataaagctgctatgcacataggtgtgtgagtttttgcgtggatgttacatgtttgtttctcttgggtagatacctaggagtgttactgctgtgtcatgtggcaattctatgtttaacctttttttttttttttttttttttgagactgagtcttgccctgttgcctaggctggagtacaatggtgcgatcttggctcactgcaacctttgcctcccgggttcaagcaattctcctgcctcagtctccccagtagctgggattacaggcgcctgccacgatgcttggctaatttttcgtatttttagtagagacggggtttcactatgttggccaggctggtctcgaactcctgacctcaggtgatccacccacctccacctcccaaagtgctgtgattacaggcgtgagccaccgcgcccggcccataatttttttaaaaacctgttttttgttttttttttcaagacgtagtgttgctctgtcaccctggctgaagtgcagtggcgcaatctcggctcattgcaacctctgcctcctgggttcaagggattcttctgcctcaacctcccgagtagctgggattaactccgtacctcaggtgatccgcccgcctcggcctcccaaagtgccgggattacaggcttgagccaccgcacctggcctaaaaacctgttttgttccctgctgtctcactggggcctggaggagcagcacttaggagcgcaatgcaggtttgttgaataaattaatgactctcagcagtgacgtttgtacgttcgggacacgcacctggtgttgggtcccatctgcgctcattaggcgcgacgtcaatgccgcactgaggtgtgcctggcttcgatctaccctaggaagggtctgccctggggcgccccattccgcgactgtccccagtgggaaccacgccctccatctaccagagccatttctgcaacgtctagcaccccgcgggtcctcttccggccgcggttgccctgggcaacgcgtggagccgcgcttcctgtattgatttgaatcgcgggagacgtcacgtcctcccgagatgcccaacgcgcgcaggcgcagccactcggagtgggcagggcctggctgggtgttgggcagggcctggcggtgtgtggggtaggcggggggcgtggccgcgattagccgcgcgcggcgtgggggcgtggtcgggttgcgggggtgcgcgcggccggccgggcgcgcgcggcggagggagggagccgggaggcagcggaggagcgaccgccgccatattagggaccgcggagcccgggatcccgtcagcggcggccgcggccgggcctgcgggagctgcggaggccggaggcgggcgctgtgcggtgccaggagaggcggggtcggcgggagccagcgagccacgggagcgagccaggtgaggcggccggggtcggggacccgccccccgggccctaggcggcggagcttgactgcgaccccccaaaaccgggacggcggggcgggctgcgacccccaccccagctcaggcccctccaggagcccccagtcccctcgaatgccgcctcccaggccgaactaggcccgggtgacctcagcatccgcgtctcccgagttaacacccaaatcccagcgtcccccccacgtcggggcctgccgtgacccccaccccgagccacctgtaagtcgtgacctccccgcagccgccgtcagcgtccaccattctttttaaaataggctgagccctgcacccccaaccaggggaccccactgcgcacccctagaacagcagaccccgcctcctaacccgggtgatttctccctggcctgtcatccccgggacttcccagttcagaccctcccagcttgggtcctgcccacacgaagccgccccccatcgctgagcctgtggtgtgcgatggctcgcccaggccgcaaccagcccctcgccccagtaaaatgcagtcccagcccgggacacccggaaacctgtgtctgtggtcactgttgtgtccaccagtccccgcaggcacgggttgagtgcatggatgtccccgtctcacctcatctcgctgatttctgctcccccaccctcccagcgtgccccctaccagcccccattcccccgaaatccagctctcccaccaaagcctcagacgagctatccgtgcacaagcccctccctcctccgaactgaacctccgtcctgcgtcctgccccgtgtcttctccaaacgcaagcctggccatctcggatccccagaatatggagtgtgccccccattcagagccgttttacccctactcaaacct

SEQ ID NO: 2020 - DNA, 6000 bp, Homo sapiens
ttttttgagacagagtctcactgtgtcacccaggctggagtgcagtggcacgatctctgctcactgcaacctccgccttccaggttcaagtgattcacctgcctcagcctccctagtagctaggattacaagcatatgccaccatgcccagctaatttttattttttagtagagacgaggtttcaccatgttggccaggctggtgtcgaactcctgagctcaggtgatctgtccacctcagccccccacagtgcctctgtttgtattttttgtagaaacggggtctcgccatgttggctgatctcaaactcctggtatcctcctgctgtacctggcagctaagttctttaacgagtaagatttgcattacaaagtttttccattgttggagaaggcctagccaagggtgctgaaagtacagaagccacaaaggctcccaccaggacacgggaagggctgggccccacctgcaaagtcagatctggagcaggggcagtgctggcatggaatacagtcctggagccgttccgcttgtgcccgcgctcctgtgcccatgggtccctctgcgaggtgccaggtcttggggagactgtcctgtgctgggatttgaagtctgctggtgccgttgtccatcttgcttttactttggcagctagttgttgggggccacttttacaaatgtacttcctttagcaggcatggtggtgcatgtctctggtcctagctactcagaaggctgaggtaggaagatagctggagcccaggaggtggaggctgcagtgaaccatgatcaaactactgcattccagcctgggcgacagagcgagagaccctgtctccataaaaaaaagtgtttcctggcagcacatgccaccacctggaatgcttctccaccagcttgattttctcccactacctcctctggtagggagctcactccagtgggtgggtggggctgtggccctgtcattgggagggctctgttcatgtgtgttggtcaatgaatgaccctccccaccacatccaacacaggatggggctgtcagaagtcaggggccgtgggggcacagagaggaaagagagagggcagggccccccatgcgaggctgggcagagagagggcctccaggaccgtggggagcataagtgtctggggaagccccgtccacacctgccaccctctgaaacattcagtcacacctgcagagtccctgctgccctgcaaggtggcctaggcacaggtcctggggtcaggaccctacgcccctggcagtccggatcgtctctgccctgcggcagccgcgtctacgtggtgagtcgcctgctggctgcatggggcttgtgaagccgccagtgctgggcgacctgcatggagccgacggtggtggctgatctaccccaaggagggcggagggctggcctccctctggtctcagatttgctggacttgaacaagttcctcgccgcttggctctgggactcttggagtctgagcaggggctccctcacccctgctctgaagctcagtgttcgggtcctgcctggtttttggtgtgccaaggggtacaagctactgtctgggcaatgctgcctgtgaagccgatgtttccagctgtcctccccaaccatggccacagctgacgtcctctgtggctgcacgcaccacctctgcacagcctggactgagcactgcacttccgacggagactcccccaggagcccctgcccccagggtggggttttcatgccacagtactgcctttgcaagtggtctctgctccgcggtttcctttctgtaagtgctggaggatctgtgtagatcccccttcatctgtgaatcggtcccggggggccccacacccacagctctcctggggctcaggatctgcatagattccctgttcatctgcagatcagtcccggggggccccacacccacagctctcgtggggctcaggatctgcgtagattccctgttcatctgcaaatcagtcccggggggccccacacccacacctttcctggggctcaggtctctatagaccctctggctccaggctcgggaaattgtcccccagaggctgtcttcactggggacagatgcttaggcctctcctcgtcctgggatggccagtgctggcccaggagtggtcgggtgtggtggggacacatgggcctttggggctgcgggaggcagctgtgccctgtggagaaccggtggggactgtgggtggggagaggccattctgggcgagggagaaggggatggggaggaggctggtgacatgacctggccccagtagggggcaggctggaaggagggagagctgctggccattgctctgtggccgcgtgggccaccctttgggcccatgtgctttgggctgagccatgtagagaaccctgggccttctatgtggtcgtgggcattgctgccctgcactctgccttcgtgtcctcatctgcacaggcggtgggcgctggcacccgtccatgaggccttgcagaggggacacgagataagccacgaaaacccactaccacaggactgtgggctgcatgctcttgtccctcagagcctgactggccccatgtggccgagccagggaccacatgcgtcccttgactgcgggcccagtcagcgctgcctgcgggctcttgcagaagaaacagccctgcggttgatcctatctccaaccccaggccgggagctcgtcagaggccacctggagctgtggaggtggcaatcaggccaaccgcctcagtatctcaggacagagtggtgctcgggatgacaggagcagcaccaaacccgcatgggtctgtccctacctggtgacgcaagccagtgcatgcctcaggtgtctgtttcctaaaaaggcaggtgtcgcctcggcccttctggtctccgtgagtcagcctcctccagggccctcccaggtcttttgtgtctggtgtctctcacagggtgcaacgtcctcagggcgtgtccgcgctgtggcctgggtagagccttgctcctttcatggctgggtcgtgttctggcgtgtggagggccgcgctggttcgtccctcacctgttgatgcgtatgtaggattttgccgtcttttggctgttgtgaattgtgcgtctgtgagcatttgtgtaccagttcctgtgcctttcccattctcctgggtgtgtatctaggaagtgctgggtcatgtggtgactgtgggtttctcttgcgtagacataactttatcatcacttaacattagtagcagaacgggactaagctttcatcactgacagactctgtgtttaacgattgaggaacttacctgccaaagaagtcaccagggactggggagagggatggggagtgagtgttccatggcgacagagtttcagtttgggaagatgagaaagttctagagatgaccgtggtggtggctacacaaccacgggaatgtgattaacaccactgaactgtacgctttttttttttttgagacagagtcccgctctgtcacccaggcaggagtgcagcggcacgatctcagctcactgcagccttcacctcccgggttcaagcgctcctcctgcctcagcctcctgagtagctgggattacaggcatgtgccatcacacccagctaatttttgtatttttagtagagacggggtttcaccacgttggccaggctggtctcaaattcctgacctcgtgatccacccgcctcggcctcccgaactgttgggattacaggcgtgagccaccgtgcctggccagaactgcacacttaaacgtgttcgagatggtaaactttaggtaaattttttcactttttttttttttttttcttgagacagagtcttgctctgtcacccaggctggagtgtagtggcatgatcatagcttactgcagcctcaaactcccagcctcaggcgatcctcccacctcagcctcccaagtagctgggaccacaggtgcgcgccaccacacttgagcccaggaggttgaggctgcagtgatccgtgattgtgccatggcactacagcctgggtgacacagggagacctgtctacaaaaagaaccgctgtatttacagaccggcagcctgtacatggccttgggctgtggtttgctggccctggtgggaagagcgtttttcctaggctaccttctgtctccatggcctgcacggaccttcactttattcttgtacaaacccccttcctgcctcgggctgtgcatctctctctggaacgttctttgcggtctcctcaccgccacttttcttcacacctcaacataaatgccacccccttggaggggccttcctggtttggctgagcctggtcccatgtgggctctgcatgggcccctggatgttaccttggttgtagctgagtgcggatgtggcttgtccacaggaggctgatgtccctggagctgtgacttggtctacctgggcctggacccacgtggccggcccggggcctgtgcgtggccagctcttgcacactgccttagagctggtgtggcttgttgaaccccgttgcagacgcacacgcacgtgggtccccatggctcctcgggacatggaggctgcccacgctcagggaagagtccttgtcgggacctccaggactcttcccagcccccgcctccctcctggggcctccagggcagaaagcccctttcccgggcaggaggacagggtgtggatatacaggctgggagggtctgtgggcagcagccgaggcccaggttgggggagcctcacctaggatgaggctagggctggcagaagatccccacagaggagccaggaggaccccacagtcactctagctcccagggcctggaggtgcaggcgagccccgtggtctccgggcagccggccctgccccactcacctctcctgcccttcccgctgcaggctaaccttgccgcgggccgagccctgcctcgccatggaccaggactatgagcggcgcctgcttcgccagatcgtcatccagaatgagaacacgatgccacgcgtgagtgcccccgccctgcccaccactgtggctccccctcccccagctgcctctgccctggccagcagcctcaggtgtccccactgtcactaaagccccacggaccactcaggtcccagtcccccaggtcacacggggcctccgcctcctgggctgtcagggttgccgccacccccagggccatagtcagagcccagcggggcttggatggatgaggaggcaaaaggcccagagtggtggagctggggcggccgcatgggcagaggcacagggtggcctgcagagcctttagggagacccgttcctgtctccaagccccaggcacatctggaaccctgtgggatttggggggccctggctttgtccttccttgcgctccaccctgcctccccagcccagccgtgtttgccttgccctgggctccaggcaggccactggccacacagggtctcggggctggtggctgctgtgtgacagccacatccctcacctgcttccccacccgactcctgcggggggctgaggggccaaactcctgttgctgtctacacaacatgaagcctgggtcggaatagcatcaggcttagcctggacggccaccagtccctgccctgtgatagacgcccaagccatcattctcgaagacgaagttgccattgtcccgagtccctcccccatgggctggcctgcatagacgggtctgaggggcatgggcctttggggaggggctgtcccatcgcagctccctcagtgccagcaacctctgtgcccaggcattgggctaggcctggggcaggctcaccttcaaggctttgttcagcttcagaccccaaagcctgggtcccgggacctgcgggagcccaccacagccgccttctccccctgtgcggtgcggcccccacagggcagagccagggaggcagatccaggatcgtgcgtgatgtagcagggtccccattggtaaaggg

SEQ ID NO: 2021 - DNA, 6000 bp, Homo sapiens
cttctgagtagctgggactacaggcgtgcacccccatgcccagctaatttttgtggttttacttttttgtagaattttttttttaactgtgaatacacattttttatttggtcatttttgcttacaattgaaactctgggaattcaaaattaacatccttgcccatgagcttcttatagacaccagaaaaagtttcaaccttgtgttccatattgttctgctgtgccttgtccaaatgaacctttatgagccggctgccatctagtttcacgcagattctctagagtttcaactgtaagcaaaaatgactaaataaaaaatatatattcacgttaaaaaaattttttttttttttttgagacggagtctcgctctgtcccaggctggagtgccgtggcgggatctccgctcactgcaacctttgcctcccgtgttcaagctattctcctacctcagcctcccaagtagctgggattacaggtgcccgccaccacgcccggctaatttttgtatttttagtagagatggggtttcaccatgttgaccaggctggtctcgaactgtggacctcgtgatcctcccacctcagcctcccaaagtgctgggattacaggtgtgagccaccgtgcctggcaatttttgtgtttttagtagggacagggtttctccatgttggccaggctggtgtcaaattcctgacctccagcgatccacccacctcggcctcccacagtgctggcattacaggcgtgagccaccgcgcccagcccacgtctttattaggaatacgcacatgtgtacgtgtgtaggcatgtgctgtgggtggagtcatgtccccacagaatgcacaggttcctgtcctaatccccaaggcctcagaatgtgaccgtatttggaaaaaggtcattgcagatataatgagttaagatgacatcattagggtgggccgtgacgcagtatgactgctgtccttatcaaaagaggaaatttgggtgcagacacgcacatagggagaaccccacatgaagatgcaggcagacatcggggtgtcactcctacaagacaagaaaagcccaggattgctggccaatgccagaaactgggagacgccagggacagattctctccccgccctcagaaggccccagccctacccacaccttcctcttggacttctggcctccagaactgtgaaacaataaatttctcttgtttaagcccctcagtttgtcgtaattattacctagcaaaccaatgcagtgtggtgtgcgtgtgtgtgtgtgtgtgtgtgtgtgtgtgtgtgagtgtggctaggaaaaattttaaaaagagatgcggccgggtacagtggctcacgcctgtaatctcagcactttgggaggccaaggtgggcggatcatctgaggtcaggagttcaagacctgcctggccaacatggcaaaaccccgtctctactaaaaatacaaacattagctgggtttggtggcacgtgcctgtaatcccggctactcaggaggctgaggcaggagaatcacttgaacctgggaggcggaggttgcagtgagcaaagatcacgccactgcactccagcctgggcgaatgaaactctatctcaaaaaaaaaaaaaagaaaaaaaaaaggcctggcacagtggctcacgactgtaatcccagcactttgggaggccaaggcgggtggatcacaatgtcaggagatcgagaccatcctggctaacacggtgaaaccccatctctactaaaaaatacaaaaaaattagccgggcgtggcagcgtgtacctgtagtcccagctacttgggaggctgaggcaggagaatggtgtaaacccgggaggtgaagcttgcagtgagccgagatcgcgccactgcacactagcctggacgacagagcgagactctgtctcaaaaaaaaaaaaaaaaaaaaaaaaaaagcaataagctgacgataggaaatgtaatgaaattaaagaggtctgagctgcacttccttaattctgtacaagtgaaatggatgtgaacatgatttgcataataaaaattaattagaaaaccaaagaattataaggcaagtcatccttaatggagagcttccacctctaggattataaattggtatactgttcctggcttcatgctataaaaactggcaaataaatcatagtaataaatgacaaaaaacaaacaaaaaggccgggcgcagtggcccacccctgcaatctagcaccttgggaggccgagacgggcggccacctgaggtcaggagttcaagaccagcctagccaacatggtgaaaccctgtctctactaaaaaaaaaaaaaaaaaaaaaattagccgagcgtggtggcggatgtctgtaatcctagctacttgggaggctgaggcaggagaatcgtttgaacccgggaagcagaggttgcagtgagccgagatggtgccactgcactccagcctgggcggcagagcaagactccatctcaaaaaaataaaataaaataaaataaaataaataaacaaaataaaataaatgttcaattaaattgttattgactatggccgggaggggtggctccacacccagcctcacctagactatttttaagtgagcagagagacacaggggaggcctgggaggtcagagagctgattaagcaacagagccaggtctggcgtgtggaaccgtccagattccagggccagctcctcttcctcagccccgggctgcatcttaggacaatgggcttattgagacttaactcacatataatgcacccatttagagcatacaattccatggtttgtaatatatttccagagtcacgcagccatcactgaaatcaaattgtaaaatactttcatcacccaaatgaaaaccgcatccctctcagtggtcattccccacccactggcacccacacgtccccctcctgtctctgtggatgggcctttcctgaacattctgatcacacactgtgtgacctttgtgtctggcgtctctcactgagtgtgatgtcttctaggtacatccatgctgtgacttgtgtcagagactcgctccttttttttatggctgataatattctttttttttttttttgagacgtagtcttgctctgttgcccaggctggagtgcagtggcacaatcttggctcactgcaacctctgcctcccagttcatgggatcctcctgcctcagcctcccatgtagctgggattacaggcgtgcaccaccacgcctggctagtttttgtatttttaatagaactggagtttcaccatgttggccaggctggtctcgaactcctgacctcaagtgatccgcctgcctcccaaagtgctgggattacaggcgtgagccactgcgcccggcccatggcggataatattctgttgtaaggatatatcccgtcatcgatccatgcatcattagcagacgtttgagttgttttcactttttggctattatgaatcacgctgctaccgacgcttgtgtacacgcttttgtttgaacacctgttttcagttgtctggagtatattcctaggagtgaactgctgaattgcatggtgattccacatttatttaaccctttgaggaaatgccagtctgttttccaaagcagctgcatctgcctcctagacatctgaaggattcaatgaatgtgtattgagcatccaccatgggcaatgctgtgaaccaaacaggcaggccacagggagaagccgacttatggaggcaaaaaaaaaatcagagaaggcctggctgagcaagtgacatttaagcggacttgaggaagaggaagtgggccgggcgtgggggctcacgtctgtaatcccaccactttgggaggccgaggcgggtggatcacgaggtcaggagttcaagaccagcctggccaagatggtgaaaccctgtctctactaaaaatacaaaaattagccgggcgtggtggcaggcgcgtgtaatcccagctactcgggagggtgaggcagagaattgcttgaacccgggaggcagaggttgcagtgagccgagatccagccactgcactccaccctggacgacagggtgagactccgtctcaaaaacaaaagaggaggtgagcagccccaacttgggccagaagcctagactgctgctgggaggtccctgatccaccagagcggagcctcctgacccatcctcacgaagtccttgccatctcccttcaccaccatctttccccaaacacttccagcccagctcccaaccccaccccctgcctgacccacacccagttctcagcttcccagcatcccagtctctctgtcctggatatcgtgtgatgtccccgttgcacaggggggaaagccgagaccccagagggagagcagcccctatggccagaagccctcggatccggacgtcgggggctctaaactgagtaaatacataggaaacttctccgctaggttttgcaggatgttaagaacaggtcccaccttgcctagggctggggactgcctcgcaggaccttaaccctagcaacccacctccgtccccatggcaaccggggcggggcccgacccggatccgccggtcgccccatccggcagcggctgggagtcttgccttcagagagggaggaggagtccgcgcctctcctactggccctttaagaggctccgcccggcaagtccgccactcgctcccgattggtcccgagcgcggccgagcgcagccgaacttgacgcaccgcccgcagccttccttaccaacctcccacgcgactcagcaacctccccaaccaatcgccggccggcgcgccgatcggtatctgcatgggctcgcccggggggaaggtctcacccaatgggaccgttcgccgaggccttcattagcatgccgggggcggggaggggcggggcggccgacgggggcgggctgcgggcggttggttggagcgtcgcgcagtcgggaggtccgggaaagtttctttggaggtgaaaacagccgcggaactccgggccctgagagggggcgggggtgcaggggtcccagggccgggccggggtctttcctggcccgggggaaaccggcccaggcctcccggggggggcaatcgcccaacaaaggattcttggggcgcccgccctcgaggacttccctgcccctggatccggcccccccagcgctccgggcccggcatcccggggctctccatcgcggggtaccccagttcgcggtctgccatcgggcagcccgggcgctactcacctccgcccgcgtccgtgttccaggtccggcccggagcggccatgtcccacggccccaagcagcccggcgcggccgccgcgtgagtgcactgatcccctccccacgccctcgctactttcccggctgcagccctagctcctgaacccctgacccagtccctcccgccggagtcttgactcccccacctgggtcagggggcttctccctccacccaattctgcaccccccacctcggcctccagtccctcccaggagccccgcttgtcccaccttccccggatactgaccccatcagaccctgcctcctcgggctcatgcactctcgctgcagccccgccgtcgggggtcaaaacgccctggggtgggcttttgggggaggggagattcttgggacggggctgaccgcggtatccttggctccaggccggcgggcggcaaggctccgggccagcatgggggcttcgtggtgactgtcaagcaagagcgcggcgagggtccacgcgcgggcgagaaggggtcccacgaggaggaggtgagagtccctgcgctgagctgggggaggccccgggctcccgccccagcctcgaagccccgccccaggctggatttgaattgcttgtggctccgcccacagcccattttcctctggaagctgagaccccgccccgtgccagctgccacgcccctgacaggtcctctgccactctaagtccaggccccgcccacc

SEQ ID NO: 2022 - DNA, 6000 bp, Homo sapiens
gttaattttaactccccacttctggtactattttgagtattaagaatccctttgattgtaagcagcagaaccccctcgggaagaaatcaaaaaagaaagactggctgctaaaactaggtgtcacgtgaattccaggcatcgctggttctaaggatacggaaccagtctttcccttgggattcagtgtctctccctgcttcttggctctgtttcctccaggctggcctccttctcaggcaggctaatgggctcagtcaccaagaccaaggagagacggccaggctcacacctatcacacagtgagacaagagagctagtgcctctagcaaggggccctttcagggagaccttgctctaggaagtatggggatgtccttgaggaaggctttccccaaatggtgccacatgagttgtgtgtgggagagtgagcttggagaggccagctggacacggcggggaagggcattccaggggagagggaacagccagtgcaaaggcgtggaaacttctgcagttcggactcactagaatattaggttcttggagggaggaggagaaaatgggacctgggagatcagctggaggccaaacatgaagagccctggatgccaggctgagcattttaggctctctcctgcaggcagtggggagctatggaaggatttagagtgagggaggacacagtcacgtttctttcccttggctttgcagtgaaaggtgaaaacctggaggcagccaggacgccagaaaggggactgctctgtcaccagcctgcaccaggagggtgacctgcagatcagagaacttctgaaatcaagttgacagggggtcaccaaggatgagaggtggagggtggggagttcaggactgggggaatctgggtgtccagtctacccactcaggctggtataaggaaggggtgagtcccccagctccttggcaggaagcattagaaactggtgcggccacctctggggcctgaaagagccctagagtctttgtgattcaaagtggctaattcttggtcaggaggtcaggagttccaggccagcctggccaacatggcgaaaccctgtctctactaaaaatacaaaaattagctgggcatggtggcgggcacctgtaatcccagctactcaggaggctgaggaaggcgaatcacttgaacccgggagatggaggttgcagtgagctgagatcgcgccactgcactccagcctgcgtgacaggagtgagaccctatctcaaaaaaatacaaatacaaatacaaaagttagcagggcgtggtggcacgcacctgtaatcccagctactcaggaggctgaggaaggagaatcgcttgaacctgggagatggaggttgcagtgagccgagatcaggccactgcactctagcccgggtaacagagcaagactccatctcaaaaaaaaaaaaaaaaaaaaagcaaagttgccaattcttggatgcctcaccccctcctgaggctaccccttctgtggctctgattcaaataaaccgcaggctcaaatctatccccctagagtcaggcacagctcagtgtctatgtctccacccagtcaggggagctccctgccccagccagcccttgacaatttgcgaacccaacaccagctccttaagtccgcccttctctgggctcaagaccttggttccccttattatttcttctggggtgaggcctcctgcccggagccctggggctcctcgggaggactgacactaatatcattgatttgcagagagaggaagaggagaaagtcttcatggggtgctagagcatcttaaatgtccctctcatgcagggacatttccctgctgaacgaagagaaggcagacctcggcgagggacccgtggtcagcagcagcttctggtgagaatcaaattaggcggctgggttttccgctgcagatattttgacttaacacttctagttcaggcaagtgatggtggtttgccatatatggtgggcccgcagtgactgtgacagaaggacagctgcagcgtccccagccctttctggggagccacaccccagactatcccacagccagatccacgaagctgtgggtgctaaaattgtagacacgggcatcctcccagaagatcttctaatagtaaattacaaccccatgaaagaaagttgaggccggtaaaccatgcgccgtggctcacgcctataatcccagcactttgggaggccaacattggtagatcacctgaggtcaggagtttgaaaccagctgaccaatatggtgaaaccctgtttctactaaaagtacaaaaattagctgggtgtggtggcatgtgcctgtaatcccagctactcaggaggctgaaacaggagaattgcttgaatccaggaggcagaggttgcagtgagctgagatagtgcagtggctcatatctggaatcccagcactttgggaggccaaggttggaggatcgtttgagtgcagaaatttgagaccagcctgggcaacatagccagatcccatctctatttttttttttttttttttttttggagacagagtctcactctgttgcccaggctggggtgcagtggcgcgatcttggctctctgcaacctccgcctcccaggttcaagcaattctctaccttggcctcccgagtagctgggattacaggcatccaccaccacaccagactaatttttgtatttttagtagacagggtttcaccatcttggccaggctggtctcgaactcctgacctcgtgatccacccgcctcggcctcccaaagtgctgggattacaggcatgtgccaccacgcccagctaatttttgtagttttagtagagacggggtatcaccacgttggctaggctggtctagaactcctgacctcaggtgatctgcccgccttggcctcccaaagtgctgggattacaggcgtgagccactgggcccagcctacagatgggattaagttgatgctattgagatgagagagcatcctggatgccccaggtatataatataatataatataatataatataatataatataatataatataaatattaataatataatatatataatagtatggtttaaccaggcaccatggtgtgcacgtgtagtcccagctactcaggaggctgaggcaggaggttcgcttgagcccaggcatttgaggccagcctgggcaacacagagagacccccagctctaataatgataataataataatatagtttcctagtctgctgcataatgttccttaatatagctgttctgtaattctcttgtaactgggcctctgctccccgcaaaatcatgtgatgcccccaagtccagacacacagccttttggggtaacagaagattaaatatgggcgcaggccacctgggcatctcggttcattgccctcctaagatgaacttcatctttgtttcagaggactcatcccttagaaaggatgataaggtgcaaggcgtggtggctcacgcctgtaatcccagcactttgggaggccgaaatgggaggatcgcttgatcccaggagtccaagaccagcctgggcaacaaagtgagacttcatctcaaaaaaataaaaataaaaatacaaaagttagcagggcgtggtggcacgcacctgtaatcccagctactcaggagggtgaggaaggagaattgcttgaacccgggaggtggaggttgcagtgagccaagatagcgccactgcactccagcccgggtaacagagcaagactccatctcaaaaaaaaaaaaaggcaaagtggccaattcttggattcctcccaggacagggaactcaccccctcctgaggctaccccttctatggctctatgaaaatttgggaaaaaaaaaattaccctgtggtcccagctacacgggaggctgaggcgggaggctggcttgagcccaggtggtcaaggctgtagtgagctatgatcacgccactgcactccagcccaggggatagagtgagaccctgtctcaaaaaataaatgaataaaaataaagataaaggcctgcattgggtgaaagcagattgggcgttttggtcaccccaaccacaaagccatcgctgggggccagggccctgtccaccaagaccaagtgagatcaaactgttctgtgaggtgaaagcgggtggggcccccaccctccatatgggggaggaaatcccggctggaaaaggggtacctcctacctacgggcagagccaggtccctccaactcccaggccccccttttaccctccaaggagggcagctctaagaagtttgcatccggatgattacagttcccgatgattctgttactccaattttcccttaatgttgatgattatgataatgatattgatagcggctgacattttgaaagctttttttttgtcaaccaccaatagccctctgagacggtgggtgctcaaatgggcgacactgagggagttggaattgcagagtacgaagtgtcctctgggagtccgggcttggcgccttgcttatctccccggacgggcagctcactctccctcacccccggtccccgccgcgcgcactggcggcgcccgttccacgctccaagaaccccgcttcccagggtgggtggggggtgcacgcccgacagggccaggtcagggccaggcgtggagcccgcgtgcgccccgggaccccgcccggggcgcgcgggaggcgccgggggccgcggaggcggggcggggaggggccggcggcggcggcggcgcgcggaggagaccgcagtgcggccggcgctaggacccgcgggggcctcccaggccgcggcgcctcccgctttcccccactccccgacccttcttcgcccccaaaatgaggaaacggagcaactcgctccaagttgtgcagccgggaccgcctcggggtgtgcagccggctcgcggaggccctcctgggggcgggcgcggggcgcggctcgggggcgccccctgagcaggtgagcacgtcggcggggagacgtggagagaccccgaggccggggtggggggaaaccccgagggctctaggcgggggtgggcccgggacgtgcgcaggaagggccggtgtgtgcgcgagtgtgcgcgtcccgggcgcgcagcgggtgcgcggctggggcggagggtgctcagaggcgatcggaccccgcgtggtggtggctggggtttcctgggtgcgggtgtgcgcggctacgagccccgggcgtgtgtacccgcgcgtccacgtggagggctgtgcgcgtgtggccgaaaagcgtgtgcgcggccctgcgtagcgccctgcgtgcccgagtggcccggcgctggcgcccaggtgttccagtgtggggcggctgtgtgtgtgccgggggcgggggacaggtgcgcacgttcccaggtgtggagcgcttgtgcgcgcggatgcgcggggacgtgtgcgcacacctgtttccacgtggacgtggtcctttgcttgtctgcgcgcagctgtgtccgagccctgtgtgtttctgtgcgtgtgcatgcatccgtatgcgtgtgagtacacgtgggactggaggatttcatgggaggcgcatcttggaggggccgagactcaccccccagcaccgcccacttcccagccactagcggtcggggagatgggggaggcagggaggctcccccacccctgcagcaatgagtgactttgtgtgtctgtcctgggtttggggggggatcagagaggctcagcgggtggccggaggagcccagcagggctacaggacccgcccctgcccccagctccaccccacggtcagagattcttgggaatgaccttgactcatccctatttccccaccctgcccctgcctaccaaccagaaaacaggaagaaccaggctcggtccagtggcacccagctccctacctcctgtgccagccgactggcctgtggcaggccattcccagcgtccccgactgtgaccacttgctcagtgtgcctc

SEQ ID NO: 2023 - DNA, 6000 bp, Homo sapiens
ctagcagcaccaaaaccaaaccgcatcgggtctgacgtttctgaattttgccttgaatgggatcactggaatggcttgcagtgcaggatgtggggtccctccagtgaggcggaaagagctggtggtcagtggagcgggggggcctcctgggacagtccttgtggtcagccggcaccacgcgaaaattcctcaggccctgcagtgacccaagctccgcagtcgtaagaagcggtgtcggccgggccgggtggctcacgcctgtcatcccagcactttgggaagccgaggcgggcggatcacaaggtcaggagttcgagaccagcctggccaacatggtgaaaccctgtctctactaaaaatacaaaattagctgggcgtggtggcacacgcctgtaatcccagctacttgggaggctgaggcaggagaatcacttgaacctgggaggcggtggttgcaatgagctgagatcgcgccactgcactccagcctgggtgacagagcgagactgtgtctcaaaaaagaaagcggcggggggccgggggctatctcgagggatacaggataggcctggcccatctgctggtggccacagacaccagcccctctgtgtccccagcactcggggagcagagcgggcgggggtcctgacaggctgtgtgtgccccgcagcacgccctgcgaatgctggccttccggcagacccacaaggtcctgggcatggatctcctgccgcccagacaccggctgggggcccgcttccggaagaggcaacggggacctggcgagggagaggagggcgcaggggagaagaagcggggccggcggggcggagaggggctcgtgtgagccgcctacctcccccacctgcgggcctttgcatccctgcactcctggacgtgtgcgcgccgaccaatggctgcttcatccccgacgttggacaatggtcatttccttttgagtaacgctctgtaggtttcctttaaaacacctgtgcttcagaccgggcactgtggctcatgcctttaatcccagcactttgggaggctgagttgcttgagcctgagagttcaaggccagcccagacaacagagtgagacccccatctctccaaaatatttttaaaaatcagcttggcatggttggtggccaggcgcggtgattcacgcctgtaatcccagcactttgagaggccgaggtgggcagatcgcctgaggtcaggagttcgagaccggcctggtcaacatggtgaaaccctgtctctagtaaaaaacacaacaattagcctggcgtggtggtgtgcacctgtagtcccagctacttgggaggctgagtccggagccttgaggccaggagggcagtgagctgtgattgcaccgtgacactccagcctgggcaacagaagaagactttgtcacttaaaagaaatgttttttaacatttgtgcttaaattgttacagaaatgacaccatccagccctgggagtggcaccccttcctcgagggccccatcccccacagccaggggggccagcagtacagcaagcagattctaaactcgggggcatcttgctggctctaaactcacctcgtggtacaggaaggggttttaaaatacttcctctgggctgcgcatggtggctcacacctataatcccagcactttgggaggccaagcttggtggatcgcttgagcccagcggtttaagatcagtctgggcaatatggtgacaccccatctctacaaaaaattagccagttgtggtggcccaagcctgtagtcccagctactcgggaggctgaggccgtaggatcccttgagcccaggagttcgaggctgcagcgagccgagattgcgctactgaactccagcctgggttacagagcgagaccctgtctcaaagaaacaaacaaacaaacaaacaaacaaacaaaactttctttggatgcggctgcggcatggatttgaaatcacgtgggcaggccctgttctggggccccaccacatgtgcaggacaagcccaggggagctcccagccggcatccccacgcccccagcccagcctgctccaaacagaccccccacccacctccacagccaggatgtcagcagggcctgagccaggctcgtcccctgtggggagagccacagggccaggtggacacgccgacgggcgatgaggatcctggctgggcctcccccgggaacagctgtgctggacagtcagacccggagcccagaggcacccccacccaccccccgccccgagccctgtaccactgagtgcctttcacagagaaaacccactctgccatgtgtcactgaggcctggatttgagcttccgtccttccttcctccctctctccctgatgtaggccttggctggccctgaggcagggggtccccaatccccccttgtggtagcagggcccgggacccgtgcctgggggacccggggaggggccgccgtcttgtggatgctggccatggtgggcaggcgcctcctggcactgatggatgtgggggcacccccttctgagtccccaccccaacctgttcaaaccttccgcttggtcagtttttttttctttggccagctgcccagtggcattgaatgagaaaagtccacctttgggcagatgtgatctccagccagtggctcagttttgtttctctgtgtttgaaggacagcctgcatgtggctctgtctgaatgtctttgtagagctacctggaaattgggaggcagggggaataaaggaaatcatttgtcttttgtgtgagccgtgccgtccttcctgcggggtgcaggtgaccccaaatgctgggctcttcacctccttctcagggtcccgggtgggggtctcccagaaaccctgcagcccaaatgtggactgggaggggcccaaggggctggcactgctcagtggctgctccccaaggtgtgggcatcctcaggctgtcccctcacaagggtcccctgggaacacagacacaccggctgagaatcattcatctcaacgcctcccataacccagctctctgcctcggtccttgagggttcccctggccccatcctagagacacacagtgagatgctctggaggctccccgagggcttcctggaggaggaggcaactacgctgagtttgggagagatgcctctgcccacagagtgcttcccccgccacattcccaaaccctcagaaggcgggcggagggtgttcagatgctgagacctggtcacagtggaagagtttcgtgacagtttccagcccacagggcttccctggcagtgtttgggacggggggcaggcggggagcagagtggggaggaggcagatgcagggtgggggaggaggcagatgcagggtgggggcggcgggacgggagtggcaggggctgggtgtgcagggaccgctgtttcaggcccaggccaaaggaggggggtggggagccaccgaggggtccccttctagcagggattatctgtcagcaacaggaattgctggttaagcctccccggagggcaggcggcctctaggccaccgtcctcctccacctcacaccctctctcctgctttccactctatcccagatttcttgggaacttcactcccttgctacacactccgtccacacacagcccctctctccgtcagcatcgcggcagcagcaccgccatttgcccagggctcaaggtgacagccagcacaaccagggaggcctcctggattcctctgtgctcccggccaatccatgaggatgtcttgtcaattccagttccaccttttttttttttttttttttttgagacagggtctctgtctcccaggctggagtgcagcagctcgatctcagctcactgcaacctcgcctcctgagttccagtgattattccacctcagccacccgagtagctgggactacaggcctacatcaccacgcccagctaattttttgtatttttagtagagacggggtttcaccatgttggccaggctggtctcaaactcctgacctcaggtgatccgcccacctcagcctcccaaagtgctgggattataggcgtgagccaccgcgcctggcctattccttgactttaaaccatgcatctttgaaacgatttggtatctgtcttccccttgagaatgtgaactctctgcctgtcaggaagcctctcaccatcaattggatcaccactgtattcccagatctcgggcaggccaggtggacgctagcaactgagtcggtctcagtgctcagagccacgctctgacaccagaggacgtgtctctttctggtggttatgagaataccatttgtcggccgggtgcagtggcatgtgcctgtaatcccagcactttgggaggccaaggcgagcggatcacttgaggtcaggagttcgagaccagcctggcccacgtggtgaaaccctgtctctactaaaaataccaaaaattagttgggtgtggtggcgggcacctgtaatcccagctacttggaaggctgaggcaggagaatcgcttgaacccgggaggcagaagttgtggtgaactgagatcacgccattgcactccagcctgggcaacaggagcaaaactctgtctcagaaagacagagaacaccatttgtctctgtctcgttaccggtgagggactccagccaaggctgtggggacagagggaagggacaggggaaggggcacaccctggcaggcctggcgatcacagcagcccctggtgggaggcacctcgtcccctgctgtgaaccccaggcggtacctgcagccccgcttccttccttatgccccgggagaggcggctctcggaagcctcccacccacagttcccgttcccatccctggctcccggggaaggcaaacaggattcctgccaccaggtgggtgaaaaccagcccggctgacaaagagttaagtcggccctcctagcaactccaaaaaaccaagtttaggcggcgcgacagcaaaatcaagcagttggttagcgaagggattcggtgcagatggatggaccgtctgggctgcggagtccacgggcctgaaacgcggtcgctcctgacccgtcctccgcaaccctcgtcccaccaggccgcggttcccggagcaggccggcgggtggcaggaagacaccaggctgcagggggctggagaagcaacacccctctccctccccgccagagaactggagcgcggggacctcggttgcggatgctagctgcgagccgggttgctaggcgacatcggtgagtgtaggcgggatgtaccgggcgtgtgggcagggctggaacccaatccggcaggcgggactggaaagacaaaaacggaagggcaggctgtcacctgcatctgcaaggtcacggacaggagcgagaggcggccgctaagatgccctgagtcccccggcccagtcacagtcagccttgcaggcagcatctccctggccaggctcgggggtcgtttgggaaaagattgttgcccgtcttgtcccgggatgcctccctagtttagcttctgggactgagaaggtgtctcaggtgatcggattaagacccgctttcctggttaaggtggagaagccacctctgggtagaaaacggtcactcccaaattttgcaaacgaaatgcattaggaagcatcggccgggcgcggtggctcacgcctgtcatcccaacactttgagaggccgaggcgggcggattacttgaggtcaggagttcgaaaccccgtctgtactaaaaatacaaaaatcagccgggcgtggtggtgggcacctgtaatcccagctactcaggaggctgaggcaggagaatcgcttgaacctggagaccaaggttgtagtgagccgagattgcgccactgcactccagcgtggatgacagagcgacactctgtctcaaaaatacataaataaataaaaataaaaaatgattaagatggcaaattttgttacatgtgtttttccacataaatgtttttac

SEQ ID NO: 2024 - DNA, 6000 bp, Homo sapiens
acagtagatgtaattgttaggaattcagattctgaaatcacacagaccatgtgtggaatgtcagctctgccaccaagcagctgagtgacactaggcaaaattttttaacctctgtaagcctttacttccttatccactggaaataattgcgtttacttcatgtctgctttcaatcggcatattgtgaggaggtataaatgagtttaaagcatgtttaaacatccacagttcctggcattttttttttttctttttttgagacaggatcttgctctgtcacccaggctggaatgcagtggtatgttcatagcccactgcagccctgaactggactcaacacagtcctcctgcatcagcctcccaagtagctgggcagtgtgtaccaccacgccagctaattttaaaattattattattatttattttatttgagacagagtctcgctctgtcacccaggctggagtgcagtggcacgatctcagctcactgcaacctctgcctcctgggttcaagcaattctcctgcctcacctgaggcaggagactgggactacaggcgtgccccatgacaccagttaatttttgtatttttagtagagatggggtttcaccatgttggccaggctggtctcaaactgctgacctcaagtggtccaccctcctcggcctcccaaagtgctgggattacaggcgtgagccaccgcgtctggcattttgaaattttttgtacagacagggtctcccctatgttgcccaaaatagtcttgaactcctgacctcaggtgatcctccagccttggcctcccaaagtactgagattataggcacaagccatcatgcctggccctagcacttcttttcaagacaaaacgtgatagtagacagtgaggcagtgtggcactataagtgtggctacatgatcccagcctcaagagtcagaccgactagatttgaattttgattgatccttagcagtgggatttcagcctctgcgaccctcagtttcatcctctaaaaatgagcactacagtggcacccacatctcaatgagaccacgcaattagaatagcaggatgcctggcacataatgttatttgctgtattcttcctctaggtgtgagtagacaggagaccaactgtccctctgttcccctggccacagttctttgtgtcaaccttgctcctgtcctgttttattttttaaattaaaaaaattttttttttgagatggagtttcacacttgttgcccaggctggagtgcaatggcatgatctcagctcactgtaaaccccgcctcctgggttcatgtgatttttttgcctcagcctcctgagtagctggaattacaggtgcatgccaccacacccagctaattttttttagtagagacagggtttcaccatgttacccatgatggtcttgatttcctgacttcatgatccgttcacctcagcttcccaaattgctgggattacaggtgtcagccactgcgcccggccctgaatttcttatttcttataccactcctcccaccagtggtgggcattaatacatttgagtgactctagaaactttctggaataacctagagtttttatcatacggggataattatatgtcccgtaatatttatatgacattccatagtttgcttttctgtgcttttttttaattattattttttattattattttttgagatggagttttgctctttttgcccaggctagagtgcaatggtgcaatctcggctcactgcaacctctgcctcccgggttcaagcgattctcctgcctcagcctcccaagtagctgggactacaggcacgagccaccacacctggctaattttttgtatttccagcagagacaaggtttcaccatgttggccaggctggtctcaaacacctgagctcaagtgatccgcccgcctcagcctcccaaggtgctgggattataggtgtgagccgttgggccagccatgatttagcaattttgaaactacttttgtgtgtgtgggtgtgggcacatgggcccatgtaatacacacaaacagggttgaacaaataagtaaacttgtagataatgagagctgggtgtctcactgtggagaaggaagttacaaataaaacaggagatgggaatgcttaaaatgaaccttgtaggactggatttggaggcatcagtctgaattcatggttttcgtttaacagatatattgatacatatagatgtgtgtatacatatgtatatttccttgctctatccacttagagggaccagaaacagtgacactccaggaacagtgagcacccatcctggaacataaaaacactagtgggaaaacaggattggggggaatttgtggtttagttaatagtattatattgatattggtttcttagtgttgataattatattatagcagggtttctaagctttggcattgttgacttttttgggttggattttttttttttttttttttttttgagacaggctggagtgcagtggcacgatcttggctcactgaaagctccactccaggggttcaagcaattctccgcctcagcctcccgagtagctgggattacatgcgcccgccaccacacctaattttcgtatttttagtagagatgggttttcaccatcttggccaggctggtcttgaactcctgacctcttgatccacccaccttggcctcccaaagtggtgggattacaggcgtgagccaccgcacccagccttttatttttatttatttatttattttttgagacagagtctccctctgtcacccaggctagagtgctgtggcaagattatggctaattgcagcctcttaactcctagactcaagagatcctcccacctcagcctcccaagtagctgggattacaggcacgtgccaccacacccagtgaattatttttgtagagatagggtcttgccatgttgcccaggctggtccccaactctgggctcaagcgatcctcctgccttgggctcccaaagccctggattacaggtgtgagccaccacactcagcccttggattggataattcttttggtgggggctgtgccttgaaggatgttagcagcatccttggcatctaatactaaatgccagtagccagtagtatctcctgttccaaaatgtctgaaggtgttgtaacaaccaaaaatgtatcaagatgttgccaaatgtcccttgggaaacaaaatcgctactggttgagaattctgttctattgtttatttaagacgctaatattagggaagtttgggtgaagggtacatgaaaaccctactgtttttgtaactgcccatgtctaaaattatctttataaaaagtatctttttaatattatgctaatacttgtaaaaaatgttctattaaaacttaaactttttttgttttttgagatggagtctcgctctgtcacctacgctggagtgcagtggtgcgatctcggctcactgcaacctccgccttccaggttcaagtaattctcctgtctcaaccacccgagtagctggaattaaaggtgcccactatcacgcctggctaatttttgtatttttagtaaagacagggtttcaccatgttggccaggctggtctcgaactcctgacttcaggttatccacccacctcggccttccaaagtgctgggattacaggtgtgagccaccgagcctggcttgagtgctttatgtggattaatttatttaatgttcacatcaaacagaaggatgtaattgcttatccccgctttgcagattgggaaaccgaagtacagagtaacgttaagtaatcagttcaaggtcgcatagcaagtgtcagtcccaggctttaaacccaagtctggctccagacttctcttagccttctactgcatcctgcgtctaatttgttgtgggcaggtttccctatgagttcacttcactgagcctcattctttttaacggtcacatagggttctatgctaggtgaactgtagttgcaccctttgctgtcagtgtcttcaactcccatatctacccacagttccccaactctgggtccccaaatacctcccctgtgtcccacgggctctgcagactctattttaagttggctaaaactgagcccatctcctcccacctgcacctcctccgtgttcttatatgaatgtcaatgtcggcacccactggtcacccaggatggaggaaggagccagactgcgagggaataaaggaagtaagcaggttccaaaggacgtggaaggcctttgggtccagagcctagggaaaagttgagccctgcaaaaaataaaagaggctgggttagctttggacatctgtgggaaacaggtgggaagagggaggatggaggagccaaatttaagcatcgggtacttaggtgctcatctccaaggcaactgcattgctatggcaacagcagaggcagcaccgccccgcccaagtacctcctggaccgccgttacctctgcaccagccagactcttccgcatgggagggctgggggcttgcggacctccgggaacagctcaggcaggcgggagttgctgcggcattagccaatccataagctctatcccgcctgggtgggctctgcggcgacgcgcgccaagaaggggtcgggagttttttggcgctcgctaaagggcgttgagaagggcgggcccgcgtcgcttcggaccactcaggagccgaggagagcgagtgggcggggccaggctgaggctggccgggggcggggcgcagggataacgtgggagggtccgcccagcctttcttctacccaatagaaggccagaaagccaatccggaccgttagggagcccaatgggcgtcgccgccaggccccgttgcagagcgcgtctagccaataggcagcggcggcgggcgggcgcgggcgacaggcggcgcagctgaggcggagcaggcgctgcggcaggagggaagatggcggacgaggagaagctgccgcccggctgggagaagcgcatgagccgcagctcaggtgccgcgggggtcggggctggggcgggactgcgcgggcccgcgtaagcagggctcgagctcgccccttgggcgcggcggcagcgctgcctccctcccatggggtcctggctcttccgcgtcgtccccggggtaacggccccggcccgccctgttgtggggactgcgagcctcaggagccgccgggaagcctgaggaagctgaggcagggggctgggcgggtgagggtccggggagtccggggcgatggccctggccctgccggcccggctgatacctctcggcctaatgcacctgacaccccgggggacgtctctgcaccttgctgggcccgggggcacccctgggagggagacaccccagtaccctgcaaagggcgtagggtgttgcccggcctcgggtccacaacctacccctgctaacacccctactgtgtacacctaatgctgagtctgcgacatcgcccgtgacattctgccagacgatggcccctgtgcttaggcccgatttaagggttagccacaatgataatattgccagtaacagggcatgtttttctctgtgtcaagcgctttaagttctctctgaattgccgcaactctgggagccaggtagttattacttccaccttaccagcaaggaaactgaggtcagaaaactgaaggaactcgtccaagatcattcatttcaggggccgggggttggattaggacctaggcagtttgcctacaaatccccctccccgtgtcactgcaaactcctgaggagcaggcccagcatctgtgggcaggtcccgagtcactctgctgcctctagagcccatagcaatcgcatttgcaataataattctccttggttgagtgccaggttctggtgaactgtttggatacatggactctcctcattaaccccatgaggtttgatctccttattctctattccccatttttcagatgagaaaactgaggtg

SEQ ID NO: 2025 - DNA, 6000 bp, Homo sapiens
cctgagcccaggaggtcgaggctgtagtgagctgtgattgcaccactgcactccatcctgggcaagagtgagaccctggctcaaaaaaaaaaaaaaaaaaaaaggaaaaaaaagcagggacagttgtcagcgtcagttctagggtggtcgcgagtttggagaaggggctgaacatatagcacctccatctgctgcctggaaactgccttgtttctatggttacagtacctgtgtttagccccattcttagccttgttgatcatgagtgctgggataggggatgaattgaggggctgtgggaggctgtccctcttccttcacccctccccatttcttttcttttttgagatggaatctcactctgtcgcccaggctggagtgcagtggcgcaatctcagctcactgcaacctccacctcctgggttcaagcaattcttctgcctcagcctccctagtagctgggattacaggtgtgcaccatcatacccagctaatttttgtatttttaatagacatggggtttcaccatgttggccaggctggtctcgaacccctgacctcaagtgatccacctgcctcgacctcccaaagtgctgggattataagcgtgagtcaccgtgcccggcccccctctccccatttctgagatggcccctcctcattctttctctgcagattaccaacttcgtaccagctagaagggagaagagatgggggcttgaacacggggcttccttacagccccggatgcagattttagagggagggcaggtgcgggctgtgtgtgtctgtgtgagggcaggtcctggacttggcagtttcttgctcccagcacccgccccttcctcacctcttccttattccataggctgggagagaaactctctctgcttccctcgcccttggagctttccccatccccctgattttatatgaagaaatagaagaggggcttgaagtcctcctcgcgagtgccttcttgcaattacctgccttagcgggtgttgcgggtccctccttcacagccgctgagcccagaggtcccgctggcccctcctctgaattttaggatgtcattaaaaagatgaatctagccgctgcctatgtgcttgtttggggacattactgaagtgctgcaatgggagtgggtaacacgtgtcagtccattcctcagtcccgggtcatggccctggtcctctgctgttgcctttgcttcccacctccacggtctgttcccccagtagccgctagagggcgcgtgttagcatcgcttcttttttccttttttcttttttctttttttttttttgagacagtctcactgtagcccaggctggagtgcagtgtcgcgatctcggctcactgcaacctccgcctcccaggttcaggcaattctcctgcctcagcctcccgagtagctgggattatagtcgtagtcgcccaccatcacgcctggctttttttgtctgtttgtttgtttgttttgtttgagacggagtctcagtctgtcgccaaggctggagtagtgcagtggtgcgatctcggctcactgcagcctccgcctcccgggttcaagcgattcttctgcctcagcctcccgagtagctgggattacaggcgcccatcaccacacctagctaatttttgtatttttagtagagaccggtttcaccatgttggccaggctggtctcgaactcctgacctcatgatctgcccgcctcggcttcccaaagtgctgggattacaggcatgagccactgcgcctggcttaatttttgtttttgtttttgtttttttgagacggagtctcgctctgtcgcccaggctggagtgcagtggcgcgatttcggctcactgcaacctccacctcccaggttcaagcgattctcctgcctcagcctgctgagtagctgggattacaggcgtgcgccaccatgccccactaattattgttatttttagtagagacggggtttcaccatgttggtcaggctggtctcaaactcctgacctcattatccgcccgccttggcctcccaaagtgctaggattaccggcgtgagccaccgcgcctggcttaatttttttttttttttgagacaagagtcttgctctgtcgcccaggctggagtgcagtggcgtgatctcggctcactgcaagctccgcctcccgggttcataccattctcctgcctcagcctcccaagtagctgggactacaggcgcccgccaccacgcctggctaattttttgtatttttagtagagacggtgtttcaccgtattagccaggatggtctcaatctcctgacctcgtgatccgcccgccacggcctcccaaaatgctgggattacaggcgtgagccactgcgcccggcctgtattttttaatagagatgggatttcaccatgttggctagtctggtctcgaactccccacctcaggtgatccacccgcctcagcttcccaaaatgttggaattacaggtgtgagccacttcgctcggcattcctatcttattaaagccatggcctggtcgggcgtgggcgacagagcaagactctgtctcaaaaaaaaaaaaaaaaaaaaaaaaaggccgggcacggtggcgggcgcctgtagtcccagctactcgggaggctgaggcaggagaatggcgtgaacccgggaggcggggcttgcagtgagccgcgatagcgccactgcactctggcctgggcgagtgagactccgtctcaaaaaaaaaattaaaaaaaaattaaaataaataaataaataaaaaagccatggcttgatttgcacaattgccatcctgataccccacctacctgctctcccctgctctgtaccacaccaggcacgctctcacctctgggccttagcatctgctgtgcctcccagctggtgtgcttttccccatataaccacaagtctccctccctcacctttaggtctcaaatcaaatgtcacctcttcagggaggccctccctgcctttgcgtttctttttcttttcttttcttttcttttttttttttttttgagacagagtctcactctgttgcccaggctggagtacaatggcgcgatctcggctcctgcgacctccgcctcctgggttcaagcgattctcctgtctcagcctcctgagtagctgggattacaggtgcgtgccaccaggcgcagctaatttttttttttttttttttttttttgagacggagtctcgctgtcgcccaggctggagtgcagtggcgcaatctcggctcactgcaggctccgccccctggggttcacgccattctcctgcctcagcctcccgagtagctgggactacaggcgcccgccacctcgcccggctaattttttatatttttggtagagacggggtttcaccatgttggtcaggctggtcttgaactcctgacctcgtgatccgcccacctcagcctcccagagtgctgggattacaggtgtgagccaccgcgcccggctttttgcctttccgtttcaatggctcatctggtcagtcctctaccactctaaaaagatttaactattggcggagagcaggagctcacgcctgtaatcccagcacttttggaggccaaggcagaaggatccgttgagcccaggaattcgggaccagcctgggcaacaaagcaagaaccccaacataaaaaaaaaaatctgtatttaaaagccaaacacaaataacaaacaaaaaacaccagcctgggcaacatagtgaaacctcatatctactaaaaacacaaattagccgggcgtggtggtgcgccctgtagtcccagctactcgggaggctgaggcaggaggatcacttgagcccgggaagtcgaggctgcagtgagctgtgatcgcgccactgcacgccggcccgggtgacaggagtgagaccctgactcaaaaataaatacatatataaataaaaattaactattgtctctggccccagaccataggtgtccctgcagcaggggccgactggcgtgctctccactcgggcccctctaggaggtgctaagtaaatatttgaacgaagacctctgagtccctgtctggctgcgactatgtcctctcaggccttcccacgtggcagctgcaggctcctttcctgctggctcagtctgagcccggcagggtgatcccttcctcatccactccgtctctccgtttccctttcttcacggtgcttgacactatctaatattatttggttgtttgaatgtgcgcgtccagctcccaggacgctccctgcacacagtgaatgaataaatgaatgaaataaagcgcccagctcgtagtaagggccaatgaatgtctattagtagtggaacctcggattgggtggctccagccctgcctcccttccctcaggaggcgccgaggtcccagagcagcccgcgcgaccctgcccctgacctttctccctgggtcagttaaaccagccttctttcccgcctgccgggttcatttgaaaaccgaaaaccccgccattgccggcggtccaccggttgccacactctgaccaatcaggagcgacgcgtttcacgccgagcccgaagtttccccggcgacgcgcagccactggttatgcaggccctgtgggcggaacgccgtaaggtcgcgcgccgggcaacgcggtgccgctacacagtagcgagtttgtaagaaaacaaatcagttgcgttcggggcgtggccgggagcacgttggctccgccccctggcggctgcctcagcggcggcggcggcgcaggctcagagcagaccccgcccggcgaggaggagggagggtgagttagggggagacccggcccccaaggggcgggcgccgggcagggccccgcgggcggccgagggttgggcccggctcccagcccctcgccgtcctccggctgacagggggaggagcccgccgggagggccggggtctcgggctggggagccgggacgggagagcagcgcagccgggtgcaccgcggccgcgccccgggagggctgttcgggccagcgcccgccggctgctccgcgctgacagcgccgggctggggcggggcggggggctttgcaggccgccagtgtcgacatgctgctggaggaggttcgcgccggcgaccggctgagtggggcggcggcccggggcgacgtgcaggaggtgcgccgccttctgcaccgggagctggtgcatcccgacgccctcaaccgcttcggcaagacggcgctgcaggtgaggccgggccggtccaggttggggcggggcggctaagcgggatgaggatcgagaccccagagctcctctctggtctcctggccctggtggtgacccactgggaaccggtccttcttctctaggctttcattgttcccccacagtcccccttcgaaggtgggtggtgggtgaggctaggttgtggggggaggggagagctttttagcatcttctctgggaggattcctggttctctgagtgccggggattcactttccctggggaggttcttattccgtgggtgcgggttcagctcctttggatgccgtttccatggggacggctcacgtttcttggggcttctatggggagatccgatctctggaaggagaggtcctgtctctaggggttcctcattttgtagggggctctctgagacaaatctggttacttgggggtggggtcttcattcctaaaggttatgcggatccttgatatagtatgggggccccaatggaggaacaatgtcagattgcaagacatccctatattccctgggagacattttacagggaagtctcgtttctcttttattattacttttggaatcccgcttcttgaaaggagctctcaggtactctgaggtgacatcaccattatgtaggaggaggctatttcctggagaaggggttcgctttcctttgacatcttttttcccttatgaggactatcaattctttgggggtagttctccatctctgggggcc

SEQ ID NO: 2026 - DNA, 6000 bp, Homo sapiens
cagtggctaggtcaaagctcactgcagcctcaaactcctgggatcaagcagtcctgcttcagctttccaaagtgcttggaatataggtgcacgccggtgtgtccagccatgcattaccttttacatgcaatgctttctggtgttttcttttctctttcatttaaaaacaacgacaacaacccgtgcgtcatcaaagtcatttctcaaccacctgcagtttgacaagcaccgccccatggggtgcttctcaaagtgctctgaggcttacctgccccagcacaaactactgaaagtcctggtaaaatgcagctccccttcccatgatccgaccagagttggagctagggaaggcctaggaatctgcatgtaaacaccctgtgtccagttggaggatgctcacattaccttcaaaacctggccccagacaacgcctgcattcctttttttttttttctttttttttttttttgagacggagtttcgctcttgttgcccaggctggagtgcagtggcgtgatctcaggtcactgcaacctccaccttccggtttcaagtgattctcctgcctcagcctcctgagtagctgagattacaggcatgcaccaccatgcctggctaatttttgtatttttagtagggacagggtttcaccatgttggctaggctggtcttgaactcctgacctcgtgatccacccccaccttggcctccagagtgctgggattacaggcttgagccactgcacctggccaacacctgcgttcttgatggcatggcctcttcgggttgaactgggcagctggggcacaagataagcctggacttggaggccagacccaggtttgaatccagcctttggcatatgtagccttggactagtggtttaagctctgcaagcctcaatttcctcttgtttcaggcaagttgaacaatagcacaattctgcagccccttctgtgtcatccaggtcctcagagcgaaagtctaaaatccagaacattggccgggtaccatagctcacacctgaatcccagcactttaggaggccaaggcaagaggattgcttgagaccagtctgggtgacatagtgagatcccatctctaaaaaaagagaattgggccaggcacgctggctcacgcctgtaatcccagtactttgtgaggccaaggcgggcagatcacgtggtcaggagttcgagaccagcctggccaacatggtaaaaccccgtttctactaaaaatacaaaaattaggccgggcgtggtggctcgcgcctgtaatcccagcactttgggaggctgaggcgggcaaatcattgaggtcgggagatcgagaccaacctggctaacacggtgaaaccccatctctactaaaaaatagaaaaaattagctgggcgtggtggcgggcgcctgtagtctcagctactcgggaggccgaggcaggagaatggcgtgaacctgggagacagagcttgcagtgagccgagattgtgccactgcactccagcctgggcaacaaagtgagactccatctcaaaaaaaaaaaaattagccaggcatggtggtgggcacctgtaatcttagctactcgggaggctgaggcaggagaatcatttgaacccgggaggtggaggttacagtgagctgagatcacaccactgcactccagcctgggcgacagagcaagaatctgtctcaaaaaaaaagaaaaaaagaaaattagcacgcaagcatgggagtgtgtgcctgtgatcctagatacttgggaggctgaggtgggaggatcgcttgagcccaggggttggtggctgcagtgagctatgatgacatcactgtactgcagtctgggtaacacagtgagaccctgtctcaaaaaaaaagaagaaaagaaaagagaaaaaacttagaatgccctgaaaaatttgcaactcatttcatggctaacttagatctctcattttttatcccagttgttacaagtattcacatatttttatttttatttattttttatttttttgagatggagttttgctcttgttgtccaggctggagtgcagtggcaccatctcggctcactgcaacctctgccttctggtttcaagcgattctcctgcttcagcctcccgagtagctgggattacaggcaccagccaccacgcctggccaatttttgtatttttagtagggatggggtttcaccatgttggccaggctggtctcgaactcctgacctcgtgatccacctgccttggcctcccaaagtgctgggattacaggcgtgagccatgtgcccagcctatttttattttttaaattttactttggccgggcgtggtggctcatgcctgtaatcctggcactttgggaggctgcagtgggcggattacctgaggtcaggagttcaagaccagcctgcccaacatggcggaaccctgtctctattaaaaatacaaaaaattagccgggcatggtggtgggcgactgtagtcccagctactcggggggctgaggcaggagaatcacttgaacccgggaggcgagggttgcagtgagccaagatggtgccattgcactccagcctggatgacaagagcaaaactccatctcaaaaaaaaaaaaaaaaaaattaagttctgggatacatgtgcagaacgtgcaagtttgttacacagctatgaatgtgccatggtggtttctgcacacatcagcccgtcatctaggttttaagccccgcatgcgttatgtatttgtcctaatgctctcactcccctttcctccaccaagtcttaacatattttgttgtacaaatattacagtgtttgatgacaggctattgggtgttttgttgttgttgttgtttcgttttgttttgtgagacggagtctcgctctgtcgcccaggctggagtgcagtcatctgatctcggctcactgcaacctccacctcccgggttcaagcgattcttctgcctcagcctcctgtgtagctgggactgcgggtgcccatcaccacacctggctaatttttgtattttttagtagagacaggatttaaccacgttggttagcctgctttcgaactcctgacctcgtaatctgcctgccttggcctcccaaagtgctgggattgaaggcatgagtcaccgcgcccggcccttttttttgagatggagtctcactttgtcacccaggctggagtgcagtggtgtgatcttggctcactacaacctctgcctcccaggttcaagcgattctcctgcctcagcctcctgtgtagctgggaccaaaggcgtgcaccaccacgcctggctacttttcatatttttagtagagacagggtttcaccatgttggccagattgttcttcaacaccagacttcaagtgatctgcttgcctcggcctcccacagtgctgggatgacaggcgtgagccactgcgcctaacatgacagctgttactcagcatgtgggatgtttactgttctcacatctggaaaactctgaattctgaaacacatctggttccaacagtttcagctaagggactgtgggctgtgcctcttctgagtactgaaggaaaaggtcttgcatacagcaggcactcaataaatgttagctgagatcagcagtagtcccagcccctagacagacagacaaactgatggaccctctcctctgtctccctctccgtctccctctccgtctctggctctgtctgtctgtctctgtctgtttctctgactctctccctgagcgactctggaagtctgggcagggtgtgttctgggattgaagaccaggcgcatttcctcttctgtggccctcaccttaccctgtaccctcagagatgaccaagcgagacgtgcctggcttcgccatcgggggcctgagcgggggtgagagcaagtcgcagttctggcggatggtggcgctgagcacctctcggctgccgaaggacaagccccgatatctgatgggggttgggtatgttgtggatagggaagccagagccctacctgtgggaagtggattcctggggaccccctaccctgcttggggaggtggcatttgggggaaacggacacaggtctgatctgaggagactaggaagacatggctgtcccttgggggccattctgagggaatatggcccagtctggggcagtgtgagggttgggaggggccctgggaagcccctgaggttctctgccccctcccgtcatggctgcaaccccagctatgccactgatctggtagtctgcgtggctcttggatgtgacatgttcgactgcgtcttccccacacggacagcggtgaggctctggcagaaggaggtcagggcgggagacgggtgggggactagggaggcaaggttaggggtggggggtggggagaatgaagccctgggtgacgcccctttccctgcccttcctctcccacagcgctttggctctgccctggtgcccactgggaacctgcagttgaggaagaaggtgtttgagaaggacttcggccccatagacccggagtgcacctgccccacgtgccaaaagtaggcaggatggcactgggagctggggcagggcatggaggggacagggcctggccgtgctgagctgtcccctgccgctctacaggcacagccgcgccttcctgcacgcactgctgcacagtgacaacacggccgcgctgcaccacctcacggtccacaacatcgcctaccaggtgagccagtgcccggggcaaggtgggcgggggtgtcctaggtgcgtatgccccacgctgacctcccctccccgcagctgcagctcatgagcgccgtccgcaccagcatcgtggagaagcgcttcccggacttcgtgcgggacttcatgggcgccatgtacggggatcccaccctctgtcccacctgggccactgacgctctggcctctgtgggaatcacactgggctgacctggcattgggagagggagggaggaaggaagggagggaggggctggaagatactgaaggattcctttttgaaaggttttttttattgtaacttacagagtgtgtctgtgtcttcttgaggaagtggcctgtctgggtccccctcccagtctgagcgtcattgcagtggaatatctccccttctcaccaatcataacacgtcactgtggcagcagcggatagctggaaaccacctgccagtgcccagcatgtagggcgtgcccctagagcgggagctgccacctgcttcctggggcccaggccccccagccaccttggagggaggtactgttggcctctccttttttacagctgaggaagcaggcccagggaagggagggaacttgcccaaggtcatcaccatcaaagaaatggtatcttggctttaaggcatacactcctagtctgacttttataaatatgaggcttaatctcctatttttttctttcttttttttttttttccgagactgagtctcgctctgtcacccaggctggagtgcagtggtaggatctcggatcactgccacctccgcctcccgggttcaaacgattctcctgcctcagcctcccgagtagctgagactacaggcgcgtgccagcacgcctggctaatttttgtatttttaatagagatggggtttcaccatgttggccaggctggtctcaaactcctgacctcaagtgatctgcctgcctcagcctcccaaagtgttgggattacaggcatgagccacagtgcccagcctcttttttttttttttttttttttttttgagactgtctccctttgtcatccaggctggagtgcattggttcaaacacggctcactgtagcctcgatctggagccgccacacccggtctactcttgcaacttgatgttgcatgtacagtcgtgttccattttacggaggaggacactgaggcacagaggaatgaagtttacatggtcactgtcactttcttagtccgttctggctgccatatataacaaaataccat

SEQ ID NO: 2027 - DNA, 6000 bp, Homo sapiens
cttcccggacttcgtgcgggacttcatgggcgccatgtacggggatcccaccctctgtcccacctgggccactgacgctctggcctctgtgggaatcacactgggctgacctggcattgggagagggagggaggaaggaagggagggaggggctggaagatactgaaggattcctttttgaaaggttttttttattgtaacttacagagtgtgtctgtgtcttcttgaggaagtggcctgtctgggtccccctcccagtctgagcgtcattgcagtggaatatctccccttctcaccaatcataacacgtcactgtggcagcagcggatagctggaaaccacctgccagtgcccagcatgtagggcgtgcccctagagcgggagctgccacctgcttcctggggcccaggccccccagccaccttggagggaggtactgttggcctctccttttttacagctgaggaagcaggcccagggaagggagggaacttgcccaaggtcatcaccatcaaagaaatggtatcttggctttaaggcatacactcctagtctgacttttataaatatgaggcttaatctcctatttttttctttcttttttttttttttccgagactgagtctcgctctgtcacccaggctggagtgcagtggtaggatctcggatcactgccacctccgcctcccgggttcaaacgattctcctgcctcagcctcccgagtagctgagactacaggcgcgtgccagcacgcctggctaatttttgtatttttaatagagatggggtttcaccatgttggccaggctggtctcaaactcctgacctcaagtgatctgcctgcctcagcctcccaaagtgttgggattacaggcatgagccacagtgcccagcctcttttttttttttttttttttttttttgagactgtctccctttgtcatccaggctggagtgcattggttcaaacacggctcactgtagcctcgatctggagccgccacacccggtctactcttgcaacttgatgttgcatgtacagtcgtgttccattttacggaggaggacactgaggcacagaggaatgaagtttacatggtcactgtcactttcttagtccgttctggctgccatatataacaaaataccatcaactgggtggcttataaacagcagaaatttatttatcacagttctagaagctgggaaattcaagatcaaggtaccagcagattcagtgtctgttgagggcaaacttcctagatggcgatcttttctctaatctcacatggcgggaggggcaaggcagctctctggggtctcttttatgaaggcgcagtgagaagctcagcaggtttgtgaaaagaaaaaaaaatacataagggcacaaatcccattcacctaatcacctaatcgccttccaaaggctccacctccaattaccatcatgttggggattaggtttcatcatgtcaatcttggtgtggtgggtgatggggtagagggctggtctataaacattcagaccataataatcagtaaataaacaggcccaggatctaacccagatatgatcagttacagagctagtgatcttcaccagcctgggcaacacggtgaaactccttctttacaaaaaatacaggtggtgtgcatctgtgctcccagctactgaggaagctgaggtgggaggattgcttgagcccaggaggttgaggctgcaattgcaccactgcactccagcctgggcagcggagtgagactctgtctcaaaaacaaaaaccagtgctcttcaaaaatgaagtttttgaaatggaaaaagtaggccaggtgcagtggctcacacctgtaatcccagctactctggaggctgaggcaggagaatcacttgaacccaggacgtggaggtggcagtgagccgagatcgcaccactgcacgccaccctgagagacagcgagatttcgtctaaaaaaaaaaaaaaaaaggttggacgtggtggtggctcacacctgtaatcctagcactttgggaggccaaggagggcagatcatgaggtcaggagttcaagaccagcctggccaacatggtgaaaccccatctctactaaatatacaaaaattagctgggtgtggtggcacgtgcctgtaatcccagctactctggaggctgaggcaggaatatcgcttgaagccaggacttggaggttgcagtgagccaagatcgcactactgtactccagcctgggagacagagcaagcctccatctcaaaaaaagaaaagaaaagaaaaaaaaagtccaagcgcggtggctcacacctgcaatcccagcactttgggaggccaaggagggagggtcatctgggtcaggagttcgagaccagcctggccaacatggtgaaaccccatctctactaaaaatacaaaaattagccaggtatggtggcaggcgcctgtagtcccagctacttgaaaggctgaggcaggagaatcatttgaacccgggaggcggaggttgcagtgagctgagattgcatcactgcactccagcctgggctacagagcaagactctgtttcaaaaaaaaaaaaaagtgaaaaagtaatacatgtatgtaatccacaattcaaatcacatcaaaagtgcaactacttttatcaatttatgtatttttccagcaattttccgtgtgtacatatggttttcatgcatgtcagcatccttcacacacagttctgtaccttgcttgttttttcctcttagtatatctcaaattatttatacttcagtacatgaagagtttcctcaacgtttttgtttgtttgtttatttgtttttgagacggggttttgctcttgttgcccaggctggagtgcagcggtgcgatctcagctcaccgcaacttctgcgtcccgtgttcaagcgattctcctgcctcagcctctcgagtagctgggattacaggcacgcaccaccacgcctggctaattttttgtatttttagtagaaacgtggtttcactatgttagccaagctggtttcgaacctctaacctcaggtgatctgccctccttggcctcccaaagtgctgggattacaggcatgagccaccgcacctggcgctttttgcctatttctttgagacctggggttttgggtcacaaaacaggcaaatgccatgagccaccctcctcctctttctccatcttcttgtgctgcctcaggtcagagcacttacctgctcctgccttctcactgggtttccttgtctctggcctatttgtctccagaggggtcaaaacacttcaaatcctcctatttgtctctgtccactgtcaggagttccagttcccagaaccccaattttgcctacaaaatagcgtgtcttttcacggggagaggatttgttgagttttagtgggtactcaaaaagatctaaagccagttgggggggttcacacatgtaatcccagcacttttgggaggccggcctgtgagggtcgtttgggcgcaggagtttgagaccagcctggacaacacagcaagaccctgtctctataaaaaataaaataaaaataattagctgggcatagttgcgcacgtctgtggttccagctactcgggacgctgaggcgggaggatcgtttgagcccaggtgcttgttgaattgagctatgagtgcactactgcaccccagcctgggcaacagagtaaggacccagtttctaagaaaagaagattcattagctagacgcggtggctcacacctgtaattccaacactttgggaggccaagacgggcggatcacttgaggccaggcgttcgagaccagcctggccaatatggtgaaaccccgtctactaaaaatacaaaattagctgggcgtggtggctcacacttgtaatcccagctattcgggaggctgaggcaggagaattggttgaaccggggaggcggaggttgcagtgagccaagatcgcgctactgcactccagcctgggtgacagagtgagtaccccgcctcaaaaaaaagaaaagaaaaaagattcatgatctgctaaagttgaagaagtgggggaaaacattggagtgttagcggcgtcaagatcgggcgtgagcagaaagggcacagcatttgcaaaggcgtggaggagtgattttattgcgttctatccctaggaagcaatgacttggcctctaccatttgcagagcgcattgggaccctgctcccagagctggtttgcagtctgggaactgagatgcgctctgggacttgtagttttccccagtgccaggaaactcaaaaatcgagacatcggatcccaccacgaggtgtcgcccttgagcgagtacggtgggatctatcctatacttcagaaggctgttgcagacatccaacaatcacaaggaagaacgggagtttttctgattgacagatatggttctcaatgatagtcaagattcggatgttaaagcccgccctcttttgcctggttggctggagcaacgaagtgatatttatatgaaccaatgggaaattcttagggaacgaggtagtagctcaatccccaacaccattggtccacattgtctactggcacgtctgcctgccaataagatggtggaacttcgccaatgggcagagccaacgtgcctttttcggaaacacccccttcctctcttgacaacttgctttctgccgctattggctgttgcacaacagtgacggttcttttgtccaataagtcagcaagacggtccccagggggaaggtttactcaaccataggcccgtgcctagtttttattggctagtgtatccgagtggcggtgcagcaggccagtcgcgtgcggcgcgagtgctttgggcgcagcccccggggccggggcgggaggtcgctcgggtcgggtgtcgcctgagaaccggatgaggcggcgaccgtgaggccgagccgggagcgggcgtcttgccgaggcccgggcgggcggggagcaacggctacagacgccgcggggccaggtcgttgagggtcggcggcgggcgaggagcgcagggcgctcgggccgggggccgccggcgccatgggcaaccgcgggatggaagagctgatcccgctggtcaacaaactgcaggacgccttcagctccatcggccagagctgccacctggacctgccgcagatcgctgtagtgggcggccagagcgccggcaagagctcggtgctggagaacttcgtgggccggtgagcgggcgcggcagggatcgcgggcgggtggcggcctagggcgcggagggcggaccgggaatggcgcgccgtgcgccgccggcgtaactgcggcgcttgcgtgcccgcggcggggaaccggacggggtcggggaggcgggccctgtgggacgccctgggcagaggactccctgcaggggctccggagcaggcccgggccccaggggcggtgtcacgggccagggcgccgtaggacaggaggtgcgctggaaccctgcggtccatctggtcccagctttcgtgggtgaagtctgccatctggttggccgtgggtctggggtagatccctcttctgctctttcgggctgtccatcagaggtgaaaccggccatctagatatctattggggcgaccgctgcggtctggctggcttgttcttgtatctggagctgcccccgccgtctggttggctgtctctctgtcctgggcaagcctccctgccaccaccatttggttgtccatctgtccagtcccacctggcagccccctgctgtctggctagctgtccagggtgacctctgctgtctggccgcccatccgtgcccctcacagactttaacactgagcagtccctctgttgggtgacaccagctggcctctactgtctgactggctagctgactcctaggggaccctgtttgattctctctggctgactcttacagcttgattcctggctagcgctggctcctctcttccgtgtgaattcttctgtc

SEQ ID NO: 2028 - DNA, 6000 bp, Homo sapiens
tttcattttattttatttatgtatttggtggttttttttgtttttgttttgagatagagtctcgctctgtcacccaggctgaagcgcagtggcatgatctcagctcactgcaacctcccaggttcaagcgattctcctgtctcagcctcctgagtagctgagattacaggcatgcgccaccacacccagcaaatttttgtatttttagtaaagacaggggtttcaccatgttggccaggctggtgtcgaactcctgaccttaggtgatctgcccacctcggcctcccaaagtgctgggattacaggcatgagccaccatgcccggacctcatgtatttgttttttaaacggggtctcgccttgttgcccaggctagagtgcagtggtgcaatcccggctcaccgcagcctcaccacttgggctcaggtgatcctcccaccacagcctcccgagtagctgggaataatacaggtatgcgccaccatgcctagctaatttttgtatttttgtagagacaaggtctcactatgttacctaggctgatcttaaactcctgacctcaagcaaaccgcctgcctgaactttccaactatgagatcgcagacgtgaaccaccacgcctggccttgtttttttaatttttatttattttattttattcttttgagacaaggtctcttgttctgttgcccaggctggagtgcactggtgcaatcacggctcactgaagcctggacctcctgggctcaagcaattcttctgcctcagccacctgagtagcctgatcctcaggcgtgcaccacagcacctggctaatttttaaagtatttctagagactggatctcactatgttgcccaggctgtctcaaactccttagctcaagcgatcctcctacctcagcttcccgaagtgatgggattacaggagtgcaccaccatgcccagcccaactccccctttttataaggacaccagttatattggctatgagcacaccctgtgatattctcttgactgattacatctgcagtgaccctgtttccaaataagagtacattccgaggtacaggggggcaggattcaacccgaattccgcgggacaccgaccagccggtcacaattgtccagaatgctctgattgtgcagcgtgggttgggcctgtaaatcacctccagggcccccaggaggctggtgcccaggtgtgctttgtcccctgtggctgagagcaggtccccagagtctccatccttgcctaaccctccccctccccccgtcgcccagtctgttgtctgtcattagtttagtgctatgcctttgctgaccttggtcctggtttggtccacaattcaaattctccattccaggctgggtgcagtggctcatgcctgtaatcccagcactttgggaggccaaggcgggcggatcacttgaggtcaggagattgagagaccagcctggccaacatgccgaaaccccatttctcctaaaagcacaaaaattagctgggcatggtggcgggcacctgtattcccagctactggagaggctgaggcaggagaatcacttgaacccggcaggcggaggttgcagtaagctgagattgtcccattgcgctccagcttgggcgacagagtgagactccagctcaaaaaacaaaaaacaaaaaaaacaaattccccattccaggtgaagcattaacctaggcctttgtgtgtctcctggaaggaaattaaatgtgcacaccctttacttcatgtgaggaaagagattttggggatctgggcagcttgtgcttgcctctcccagttggggtatgaaggagacccccctttctttggcagcccagccttggtggccctgacagtggtcaccatttgagcagttcccctttaggagcaagtccccaggtacttcagtagatcatgatttttgggagggaaactgatgaagggagacagcccagtaccctaaggagagcaattaggaatgcttaggaaaactaaaacgtgaacaagatcatcctacttttttactattcacgatgccaataggcaatgctgagagactctttttaagggccaggcccgttctaaggggcgacacatgttattaccactttttgtccattagatgagcaattgtttaccaacaaaaattttctttcttttttttcttctttttttgagacagggtcttactctgtctcgcccaggctggagtgcagtggtgcgatctcggctcactgcagcctccgccacccagattcaagcggttctcctgcctcagcctcccgattaactgggactagaaacgtgcaccaccacacccagctcgtttttgtatttttagtagagacggggtttcgccatgttgtccaggctaatctcaaactcctgggctcaggtgatctgcctacctcagcctcccaaagtgctgggattataggtgtgagccaccgtgtccagtatatatatatattttttaataaaatgtggtctcactgtgttgcccagggtggtctcgaactcccagactaaagccatcctctcacctcagcatcctaaagtgctaatattgcaggcatgagccaccgcacccggccaataaaacattttaacttgtgtgaaaccaggtgtctttgcagaattaccattagtggcagcattttttctttttttgtgggcacacaaaataacagtgcattttaggatcagtgacttcttggaggtaatgagatctaaaaacatcttcagtctccacgaaggaggtagatgttgttaccctcaacccattttgtagatgaggaatcggaggctcagaggggcaaagtcctgtccaaggcctcacatcccatcgatgggtcaggaccaaccccagcaggctgggaggtggcgggaacctatggaagccacctgaattgtggggaagtggctacctttccttcccagcatcctgtaaatcaagttgagcttcagggcagaggtgctgagctttgacccctgaacttcactcctgtcttctgcaaagtgggaggaataagtgggccttctcagatcgaatgggtgaataatcggaacaggcttagcttgagcctgactcgtagccagcatttgccattgggagctcttgaatttggtttatttgtcttaatatagacagaagacattttgctgctgaaaaatggtaaaagaacagtaaaccctggcttgacttggaacatcattccagagtagtgtggaaacctccgttttgatgcttgctttttccttttcctcataggatggtccagcagtttggggtggattttgagaagaggatcgagggctcaggagatcaggtggacactctggagctctccgggggcgcccgaatcaatcgcatcttccacgagcggttcccatttgagctggtgaaggtagtgccccccggggctgggccctcccgtctctggtcaggcaccctcctgctggcctcaagccaggcctcctcccaggcaataaggtctcaagctcctacctctaggcctgaacttgtggtgggcagggtgtggcctggatgaggtgtccccatgggcttccttttctgacactcagctttgaggttttgggcagaacaatatgaaaacccctgtgtttttcctctgacaaaagccaatatacattctttgcaaaatacatagaaaatacagataaatttacatgagaagatgtccctagcatgtcattgaagaaggaaaaaataggcattggagccagcatgtgcaacatagcactgagctgatatatacaacatccttatgtatgaaactgaacatggatgtctgtctacaagtgtttctttgtatttgcaaggatgtttgcaaaaatgtcagccctgggtgctaggatttgggacttctttttccgtgtgtgtgtgtgtgtgtgtgtgtgtgtgtgtgtgatttgcttgaagttttatactgtttacaatgagcacatagcattttttattaaaaaaacaaacagttttttaaaatcagaggagcaagaccaaatgcagtggctcacgcctataatccgtgggaggccaagggggcctgatcacttgagcccaggagttcaagaccagcctgggcaacatggtgaaaccccatctctactaaaaatacaaaaattatccaggtgtggtggcatgtgcctgtagtcctagctacttgggaagctgaggtaggagaatcacttgagcccaggaggcagaggatgcagcaatgagccaagatggcaccaccgcactccagcctcagtgacagagccagaccctatctcaaaaaaaaacaaaaaaaacaaaaagaaagaaaaaagaaaaagctgggtgtggtggtgcatactgatagtctgaaaaatctaagtttacatgaatttatattcccaccaatatgatgagagagttggtgtcatgtcatgctttctgaaactgggttttaattaattaatttgtttgtttatttttattttttttgagacagggtcttgctctttcacccaggctggagtgcagtggtgcaatcacagctcactgcagcttcgaccttcctgggctcggatgatcctcccacctcagcctcccgagtagctgggactataggcgtgcaccagcccacctggccaatttttgtatttttagtagagatggggtctcactatgttgcccaggctggtctcaaactcctgggctcaagccatctgcctgccttggcctcccaaagtgctgagattacaggtgtgagccactgtatctggccagttttcaattttttaaataaaattttgacgagttaaatattctgccttgtgaatatagccacacgtgggagagaacgttccccagatgcacgcctgccacgggggcgccccgggtgcctccatgcatgtgcttggtttgtctcttctcagatggagtttgacgagaaggacttacgacgggagatcagctatgccattaagaacatccatggagtcaggcaagttccacgaggagagtcaccactgttccttcctctccgtggtgcgaccccccagctaattgggtcacccacacctctgagtccctaatcgttaggccttaagagggctcttggatggttttctgtagctgcgagcccctccctgagggtctccaagggcacatgagggtggatgtgtcttagtcctgcgtccattgcaggcttcagggctgtctgcagctcctgatcaaatagggcttagttcctgcccagtcggttggtgtgaacctcatgctaaactaagaatgctcactgcagatttgcctggggaggggcggggcggcactgaatcagggttttgggaagccagcatgagtccccatcatggcttcctcgtgagcctcttgggtcccctccttattctaacaaaggtagttgctccaggtgtctgcccttccatcgccgtggggtcctcgggtcaccctgagggtttccgggcagtggactcaggcatccgaccccacacatgacacaaccttcattccttgttggggacccggccagggccaatgaaattgctgaccatgctttgtttctctctgacttatctcccctgcccccgggtctggacggtttcaggaccgggcttttcaccccggacttggcattcgaggccattgtgaaaaagcaggtcgtcaagctgaaagagccctgtctgaaatgtgtcgacctggttatccaggagctaatcaatacagttaggcagtgtaccagtaaggtattgctccctcggcagggtgactcctgaccttgtggaaacgggggtacgggggtttggtatcaggctcccagcgcctcattggcccccactggtgccttttctccccatatcgctttgtgtccgtgaacttggcctctccccagaggctggggcaggagcatgtaggcctgggcccaggcacacaggggagtgccaggcctcctggactggccagacagatgcacagttgtccctggga

SEQ ID NO: 2029 - DNA, 6000 bp, Homo sapiens
agagtctaactagttgggggttggtgcctaccttggggctggaggccggctggtgggcgactgtcagggccgtggctgctgggccgagcacctagagagagtgaagatgtgaggtgatgaacagtgtgggggttctcactcccgtctccccttgccctcagctggcagcaggggcttgtggccagcaccaggcccagcctacctgctcagcaggttaagccctgtgtgccttctctcccctgcaggacgctgaaagggaaactggccaggcagcacccagaggccttcagccgtaagtgtcacgcagggttcctgctcccgagcacgtcagcactctccacccagggcaggcttctggaaggccaccttggggcctgatactgagaccaggctgtaatgggcagtgggtctggggaaacctggggtgggggcagggtcagggtgctggcctggtcctgtcagcagctggcagagtgggcactaggacgggagtccgtgccccgtggggaggccgcacaggagaatgtggataagcagcatgacaatccttatccctgtgtgcattatgagccatctcagaacagagcacgggctcatgtgacaccagccccgacatcgtctcgccttccctgagccccagcttcgaggatctgtcccatgtccagctgttacccacagtcacccatggggtggggactgtgagtatcaccgtttcatggagagggaaacagaggcccagaggggcaggacttgagttcgcatctgtctggctagagagctcgcgtgttctctggggtaccattccatgttgccaccaccttaaagggctctgcaggctgagcctgggttcacaccatctgttgaaaaggccgacagctctccatcccagggcctccaacagcagtttacagagcagggagctgggctgaggggaggtcatatacctagcccaggtagtgcagtgagccaggttcgccctcagggctcctgtaggcctaaccccagatcttgtgtcccttcctcacctcaccttgaagggagggctcttccctgcctgggcctcagttttctcctctacaaaataaaaatgggccaagtctgccaggcgcggtggctcatgcctgtaatcccaacactttgggaggctgaggcgggtggatcacctgaggtcgggagttcgataccagcctgaccaacatagagaaaccccgtctctagtaaaaatacaaaattagatgggcgtgatgatgggcatctgtagtctcagctactcaggaggttaaggcagaagaatcgcttgaacccgggagacggaggttgcagtgagccgagattataccattgcactctagcctgggcaaagagcgaaactccgtctcaaaaaaaaaaaaaaaaaagggtcaagtcatacccccatggggtgagggcagccgttaggggtcacatggacaataagtcctacatcacagagcttggcaaggtgacaaaaccaactcttgggcctccttcccccagatatcccagaggcatccttcctggaggaagaggatgaagaccccatcccacccagcaccacgaccaccattgccacctcagaacagagcacgggctcatgtgacaccagccccgacaccgtctcgccctccctgagccccggcttcgaggacctgtcccatgtccagcctggctccccagccatcaacggccgcagccagacagatgacgaggagatgacgggcgaatagccctgctgcccggtgccttgagggggtctcagggcagcagcatacaaggtggcagcgggtaaccctgccttgttctgtcatccagggctcctttgctgccccgttctgtcacccagggctcctagggggacaaggctctctcccgaggggtgtggaattcctgggggggtctttaattctggctccttccttcctcagaacatctctattctgcaagacccctctgccatgccagggcacgcccattccagctggagtcgtggggctgggcacaggggaatttttccagagctgagcctgacgtctgctctgaagaatgcttagaaggttcccagacaccagagccagatgtcccccaccaccggtcaggacctccttgaggtgcacaagcacggtctcctctgagttcaccccagcccacccccgcacccactaattctgcttttcctgccccttgctccgtaaaagtatcaaatactttctccttggtatctcaaggaggtttctgagataggtagaagtcttgagacggaggctggccatccattcagccctgagcgtgctgagttctgtgtttctctgaatagaggtgtggaacctgaggggccagcaggcctctctgaaggcctccatggagcaaacggagccacctcgggaaagagtttaatggaatatttttgtacccgatgtttacagatgctgttgggaagttatcaataaaaagacaccattactaaaaagggaaaagtacacctagctgtggcttcttcagtccttaagccaagcaacccaaaaggagggcaagtgctggatgtggggctgggggccctgctggagggaggtgcagacaatcaggcactacagggctagaaagagatgtggcccttttttggaaccccccctggtgggagctataacaacccaagttcccgtcaccagctaggtcttccctcacgctgctgtcactgctcacaatactagtgttcccatcctcatttcataattccttctccagatctcagccttcctccagataggggagccacactagatccattccccatcagacacactcccagggttacctcatcttctgagtacttagaaattatgttgttatgaccgggcttggtggctcatgcctgtaatcccagcactttgggaggccgaggtgggtggatcacctgaggtcaggagttcgagaccagcctggccaacatggtgaaaccccatctctaccaaaaatataaaaattagctgggtgtggtggtgtacacctgtaatcccagctacttgggaggctgaggcagaattgcttgaatccaggaggcagaggttgcagtgagccaagatcgcaccactgcactctagcctgggcaaaaagaccaaaactgttgtctcaaaaaagaaaaggaaattaggttcttaaaggcatcttcccagacgtgagagtgtctgcttttgcctggtatagtagtgcctgcaaatgttcaaggaaataaacaggtacccctgttaagcctataggtaacttctcattgctccccatcttctctgtactcagcactttttttttttgttttgtttttgagacagcacctctctgttgcccaggctggagtgcagtggctgaatcatgggtcactgcaatctcaaacctatgggttcaggcaatcctcctgcctccgaagtagctgggactgcaggtgcgcaccaccacacctggatagttcaaaataaaacttttttttgtagagacagggtctcactatgtcttccaggctggtcgtgaattcctgacctcaagtaatcctccctctttgaccttccaaagtgctgggattacaagtgtgaaccactgcacccgccgtggcactttttttttttttttttttttttgagatggagtctcactctgtcacccaggctgggtgcagtggcgtgaactcagctcactgcaacctccacctcccggattcaagcgattctcctgcctcagcctcctgagtagctgggattacaggcacccgccaccacacctgaaaaatttttgtaattttttttttcttttttgagacggagttttgctcttgttgcccaggctgtagtgcaatggcactctctcggctaattgcaacctctgcctcccgggttcaagcgattctcctgcctcagcctcctgagtagctgggattacaggcatgcgccaccacgcccagctaattttgtatttttagtagagatgcggtttctccatgttggtcaggctcgtctcgaactcccgacctcaggtgatccgcacatctcggcctcccaaagtgcaggcgtgagtcaccggacccaggtcccgccctggcactttttaaccacccacaaatctggatcctacactgaaaagagacactgcagtggctcacgtctgtaatcccagcactttgggaggccaaggcgggcggatcacctgaggtcgcgagtttgagaccagcctgaccaacatggagaaaccccgtctctactaaaaatacaaaagtggccaggcatggtgtcgcacacttgtaatcgcagctactcgggaggctgaggcaggagaattgcttgaacccaggaggcggaggttgcggtgagccgagatcgcgccattgcactacagcctgggcaacgagagcgaaactccgtctcaaaaaaaaaaaaaaaaaaaatcctgagtcccgcttgacaccttttgtcaggcaccaccacctttctgggcgaatgcggtagtaccgtctgctctccctgctgctgtcctgaaatccattcaggcacagcggccgagagctttataataaccgattccaggtgttaggtgctttcccagccccgactcctgcgtcctggacccgcagtcctctgcttaatacctttgctttattagaaaacattctcctctactccgttcagctattcgctgagggcccgccaaccgccagcggttgtcagtggcctagaggcagcggacgcaaacacggggagaggtgcaatcgtctcaagtgactcggcgggcggggcccacaaccggaagcgggtgggcgaccttcacccacgtgcgctgcggcttcgttcgccagcatccaagatggcggcagggcggggcccaaggcgcggcgcgaattgtgacgcaggcgtccggcgtgctccgtgcgcaagcgctttcggcggcgattaggtggtttccggttccgctatcttctttttcttcagcgaggcggccgagctggttggtggcggcggtcgtgcgggttcgcgccgggccgagagcgggttgggggctgcgggaggctgcaggggcctgggcggcagaagaggcggccctgagctggctcatgcgggccagtctcggcagggtggctgggcagggctcgcgaggccacggctcggagcccagaccggggcccaggaggcgagcgccgttttggagaggagcctgcctgctctgcctgccagcgtgaccccacgaggcctcgggcgggaagaggtcctcggggcagatccgagttaatgagagaggggtattgagcgtgtagcgttaactctgccagtcactgcgtcagtcgctttggaaatactaaatttctcgagctgagtcttcatacctggctccattactacgtctgtaaggaggagctggtggtagtgtctgctttttagacttttctttagactatttgtatttttttcagatggagtcttgctctgtcgcctaagctggagttcagtggtgcggtctcggctcactgcaatctccacctcccgggctcgagcgattcttctgcctcagcctcccgagtagctgggattataggcgcctgccaccacgcccagttgatttttgtagttttagtagagacggagtttcaccatgttagccaggctcatcttgaactcttgacctcaaatgatccgtctgcctcggccttccaaagtgctgggattacaggcatgagcccctgcgcccggtcgattctttgtctttttaagtcaacttttatatgtgaacaatgcttggcaggtggttggtagatactaagtgatgttcgtggtttggggtcaaggcaagaagtggggtctggagagttttggtgtaattgagaaggaagctaagagtgttgggtgctccagcttggagttagagaggagagaggctgcgacaggaaggcatgtgtgttgtaggggatggcttcccatccaggctggcagcaggagcagcctgtgcaga

SEQ ID NO: 2030 - DNA, 6000 bp, Homo sapiens
gatataattttgagcccagagaacaaacccatgaatccatgagaggaccgcaaagccaggtcctcagaacttctctgcagtcccaggagagcatcctgcgctcctgcccctgtaaatttcccttctttttccccgttggtacacattagacctgtgattctccacaagtgcacgggaatcactgaaaaccttgtcagatacagccagtatgggagggtaagattctgcatttccaacaagcccccaaagtgctcctctgatctcactttgggcagcaagaccccaagagggcataacgcaggactctgacattcgttactcagtcttcaaattcagaaattgcaaacaagcacccctagatatgtctttttgtccccatggagtatgagaggcagtgggagggcaggccttgtgagccctgctcacataagggactggaggagcactcaggcctgggggtccctgctctggctaccctgtgccctgggtctcccaaaacctggtctcctgctttccaggccctgcccagctcctttgcttgctgacaggttgaatgcctcctccttctccccagaagagaacccccttccactattccagtggtcaagatttgtttacatacaaatgtctaaacgataaaatggcattataacagtgtcaggactgaacaggcagaagccacctggaaatggggagacggagcgcagaacctgatttatccagtcaccatggtcctgaaaagctatcacacaaacaaaatgacatagatagctagatagagatatacagagaggttttttttttttttttttttttgagacagagtctgctccgtcacctaggctggagtgtagcggcgcgatctcggctcactgcagcctccgcctcccacgttcaagcgattctcctgcctcaacctcccgaatagctgggactacagacatgcaccaccacacctggctaatttttgtatttttagtagagatggggtttcaccatgttggccaggctggtcttgaactcctggcctcaggtgatctgcctgccttggcctctcaaagtgctgggattatgggcgtgagccactacgtccagcacaaaatgagatatatttgaagtacatattaaagtaaccaaaggaaataattttacagtaaaatcttacaaaaagctcaaaatcctggtgtaaaatatctaatcacctttgagcttagttctggtttatatccagcttttcatctgtcaattatattggaaaaagagaggcactgcccaggtctcaggagggcccctttggaggctgcaaggaacctccctttccccgggcgtgaagaccctgagccctgccatgcttggtctgcaaggctggcttccaggccagcacccagacaccactcccaaaacaggttttctgcagttttgggtctgcactctcaaaacagtttctgcacagcaagaaaatgcatgtagaagtggaaagaaggaaggcaggaaacagatacataaccactttagctctactggcttccccccccaaaaaaaacctagcttccgacctgctccgaatgacttgaggtgaaaatctacagaggctaaagagatgtccttgcaaaaatgctacttccagctctacctgctccagccaggccagcatcaatgtgagaggagagagagaaatcaattaggcaaatagttagggcaagggtccttggcagaattcccttctaacaaaaagcagcctaagaagtcgttgccctttcaggaaacacagataaggaaggcaagctctaacacagaaagcgggtcccctgtgtgacatacagacatatggtgggccccagtaagcacagtcctctcccttcttagaaatactcaagacacggccggccacggtggctcacgcttgtaatcccagcactttgggaagccgaggtgggcagatcacgaggtcaagagatcgagactatcctggccaacatggtgaaaacccatctctactaaaaaaatacaaaaattagccaggtgtcatggtgctcgcctgtaatcccagctacttgggaggctgaggcaggagaaccacttgaacccgggaggtggaggttgcagtgagctgagatcacaccactgcactccagcctggcagcagagtgggactccgtctcaaaaaaaaaagaaaaaagaaatactcagacacagaggcttgcatggcactgataagaagagctaccctggaccaggcatgtctaccttggagtgttcttcccccccaccacccaacctttttcacacatgcacagtaggaagaaataagcaacatggagtagtaactcaggctaagaagcccacatgtgcactagaaacagtggggcgggggactcagaaattcgcaccttatgtaaatgaagcacccctcccaccagcttttctataaaaacccttgcatttcactgtaaaatggcaacccatctttctgggacccctctctgatccagagagctttctttcttttgcttattaaacttctgctctaacctaccctctggagtgtctgcgtccttgatttccttggccatgagacccagaacttcagtgatatctcagacaatgaggcaggtttcactgagacacaagcccagggttctgcagaatgggagggccagcagctatcactgcgtgtgtgagggcaggcagaggaagtcactgtgttttaatagtccagcaccacgggtagagatgttgtggctgactccatccaaggttcaatttctttgtagtaatcatttcagaagttagagcattaacaggctcttgttggggaagaaaggttagtaactccatctcctgagcccttgctaaaaagctcagcttcctgaattctccaggctcaccagattgagagggaagcccaccctgctccttctcccaccgcaaggctgcctttgtctgtaaatgacagggaagtgggtgaggagggaggatggggacagaccttagggggtgggagtgtggctccccctcccccactgtatcacacctatttcacactcagatttatccacataccaggccttgatcacaggaagcccatctgccagccacagggaaggcaaatgccaactggaagccccggtttcttgcaggcgcccaggctgctctgacaggtacagagagacggagacaagcccatctcaccgagagcggcctagctttctgagtttggaccagattgtaagagataagggagaggaaggcttcagatagctatgaagagagctatctgacctccaagtacccttttctttaacaaaaaattagatctggctcttgtcaacattgacctcccacctctccataccccagcgcaaaggcagtaggtggatcccaccagcaaacagttttggattagctcatagttgttgtttttttaaaacaaattagttgccaatatttaaaaatcaggagattttgcatgcacctcagattcctgatttctcctgaaaaatcagaagaccagatcacattggacctgccattctgtgtagcaatggaggccagggctgagcaggggccgtcccctgcccacccccatacagcagggccctgccctccctaccccagctcctcctggcagcatgcaccttacctatctacttgatcaataaacagatcacttcaaagcttctcaaagtatccctctttctttttttctttctttccttccttccttccttccttttctctttctctttcgttctctctctctctctttctctttccctctccccttccttcctgctttttgttgttgctggtgttgttgttgttttttccagaaacgcagtctccctgtgttgcctaggctggtcgggaactggcctcaagcaattcttccgcctcggcctcccgagtagctggaactacaggtgctattccaagatggtgaaaccccgtctctactaaaaaatacaaaaattggtcggggtggctcacgtctgtaatcccagcattgcagaaggctgaggcaggtggatcgcaaggtcaggagtttgagattagcctggccgatatggtgaaactccgtctctactaaaaatacaaaaaaattagccaggcttggtggtgtcgcctgtaatcccagctactagggaggctgaggcaggggaattgcttgaacgagggaggtggaggttgcagtgagccgagatcgcgccattgcactccagcctggacaacagagcaagactgtctaaacaaaagctcaacaaactacctgccatccccaaaactaatctcacctcctaaagcattaacgacccttcctgaccaaatctaaactagcgcccagattttcttcccatatggctcagcccagctccgctgccccacaggtgtcctgtcaggatccgcttcacatttataatacctagcaccccacccccagccccgcccctgccccaccagccacccccactctaccccacccctacccatcacattccgcaccccacccccgccaaacccacatccccaccccacccaacctcacccactcccaccacatccaccacccgcaccccacccccacccaccacacccatgcctacgccactcctgggtgacagcgagccagggcccgggactctagtcccagctctgctgcttacttgtgtgacttcagcctctccatgcctcagtttctccatagggacaatgactacactaacagtgtccaccccggcaccgggagggccgggctcccggcagggcggggaccctctccccaaggcactcccgggtctccaggcctgctcttggggtgccccctcctctcgcggggcgcggcctgggaggcgccccgccccggctccgggcgctcctttacctgggggagcggaggtctacgcggcgcgctcggcgatcagacgcggctgcagcccgggcctggcaggccccgggctccccgcccagctccccagccccgcggagggtcgcgcaggccttggtggcggccccggcgctggccccgccctccgtcccaccttccggctgcgccgggccttccgggaagccacgcgccgggccagctcctggctccgagctgcgcccggccttagggggagccgggggtcgctgctgggcaccccctccccggtcctggcccaccccgccgctgtcaccggggccctggcttgggttgcgggtggcgtaaggagacgaggcgcccggagaagagtcctgggaaccgcaaggccgcgctcccgcaggcccagccctgcctttctcccacgcgcacgcatgatcacatccgggccccgcgcacctgcctccaggaccgcggggacctcccggagacctccctccctttggcctggaggacccctctctccccgcagcctgggcacagaagagagcacaggggcatctggaggtcaagggtgctgcgtcagtatttggtgaatgtgtgggccggagccagatttcctctgttccagagcctgctctggagcctctgggtctgggggttgcaaaaggagaagcaggttgggtgggactcgtaatcccagctgccagtgaggctgaggagggaggattgcttgagcccagcagttcgagcgtgggcaacacagtgacatcccatctctacaaataataataaaaattaggccgggtgggtgagtcatacctgtgacctacagcattttgggaggctgaagcgggaggattgcttgagcccaggagttcgaggctgcagtgaactatgatcccaccactgcacttcaacctgggtgacagagtgagaccgtctcttaaagaaagaaaaaaaaggaaaagaactggctttgctcttaggagtcttggatggggaccaaagctgaggcaaggcagcctcttaggaaggtgcaaagggcatgaggctggggttgcagaactgcctgggaatactactttattgaggcctgtggaaagctgtccctactcttgtcatgcaaggtctggcct

SEQ ID NO: 2031 - DNA, 6000 bp, Homo sapiens
tgcacgtgctcagattataataatcacagctggcatctggtgaatacttcgtgctagggtttgcatgtttcctttaaaactcatgttgaaattcaatggccgttgtggtgagatagatatatattatattaaatattatatataatattgtattatatataattatatataataatataatatataattatatataatatataaatacatatttatatatttaatatttatatatttatatatttattttttatattatatatataatatataatataattatatataatttatatatatatataatttatatatatataattatatatatataatttaatatatataaatatatataattatatataattatataatagtacaattatatatactgatatattatattatatattatataattctatatctttgtccaaacttatatattatataattctatatctttgtccaaacttatatattatatatattttatatatatataaatatatatatttatattatataaatatatatatttatattatataaatatatttatatattatatatataatatatatataatatatataaatatatataaatataatatatatataaatatatataatatatatataaatatgtatattatatatataaatatatatattatatatatatataatttatatatatatttatatatatataaattatatatatataattatatatataatatatataattatatataattatataatagtacaattatatatactgatatattatattatatattatataattctatatctttgtccaaacttatatattatataattctatatctttgtccaaacttatatattatatatattttatataatatataatatatgttatatatattatacgatatatattttatatatatatattttttttgagatggagtctaccctgttacccaagctggggtgcagtggcattttcttggctcactgcaacctccacctcccgagttcaagagactcttctgcctcagcctcccgagtaggtgggattacaggcatgtgcctccatgcccggctaatttttttatttttaatagagatggggttttgccatgttggcctggctggtctcaaactcctgacctcaggtgatctgcattggcctcccaaattgctaggagaacctttcagcagtgatgaggtcatgagggctttgccctcatgagtggattaatgctgtgatcacaggagtgggctcttgataaaggaataagggtggccctcttccctctcttatgctccctctttatgtgataacttctgccatcttatcatgtagcaagaaggccctcaccagatgtggcccttagatcttggaatttccagcctccagaactatgaggcaaataaatatcttctctttataaattactcagtcagtggcattctgttgtagcagtagaaaacagattaagacacctggtattaagggttgaattgtataaagatgtgttgaagtcctaaccccatcactgggaatgtgaccttatttggaaatagggtctttgcagatgtaatcaagttaaaatgaagttattagggagggctcttaatccaatatgactatcaatcagaagagagaagtttgggctgggtgcagtggctcgtgcctgtaatcccaacactttgggaggctaaggtgggcggatcacctgaggtcgggagtttgagaccagccttaccaacatggtgaaaccctgtctctactaaaaatacaaaaattaaccaggcatggtggtgcacacctgtaatcccagctactcgggtgactaaggcatgagaattgcttgaacccgggaggtgggggttgcagtgagccgagattacaccactgtactccagcctaggcaacagaggagactctgtctcaaagcaacaacaaaaagaaacaacaggccgggcgcggtggttcacgcttgtaatcccagcactttgggaggccgaggcgggcggatcacgaggtcaggagatcgagaccatcctggctaacacggtgaaaccccgtctctactaaaaatacaaaaaaattagccgggcgtggtggcgggcgcctgtagtcccagctactcgggaggctgaggcaggagaatggcgtgaacctgggaggcggagcttgcagtgagccgagattgcgccactgcactcccacctgggccacagagcgagactccgtctcaaaaaaaaaaaaaaaaaaaaaaaaaaaaaagaaacaacaaaagaagctatagggtttttgggtgtggcccacattgcggatcatccagccctggtctaggtgggtggctttagcctgaaggagccatggaagttttaggagctggtgcactcagctttgggagaaagtgagggcatagaacgctggccccgtctgagttttgactctggctggccgtgtgaacaccacctagcaccctagggcattgttgggcccatcagcaagagaatgttttgtcaaggtgggggtagaactggatttcccactaccttgggcccatgaggctcatgggactttggagaagccgctcattttcacattctgtaatgtaaacaagaataatctagattcatatatattacctccttttatgttgagaacaaccctataggataagtactactcttgttgccatttcccagatgaggaaactgaggcacggagacgtggaagaactttccctaggtcactgtaagcagcataaagcatcgctgtgtgctgggccagtgccatttccgcgccaccaccgagaccccacggcacgccttgctcactgtgcaggaggccgcagttgcctttaggagcatgaggcactgtgtgctccatctctggggttcagagtgtgcggtcatgttatgcctgcattcgtatcagaatgaggcccaggaggctgatgggttgcagatttgcatgcaatggcgcgatctcggctcactgcaacctccatctgccgggtccaagcggttctcctgcctcaacctcccgagtagctgggactacaggcttgcaccaaccatgtctggctcatttttccatgtttagtggagatggggtttcaccatgttgcccaggctggtctcaaagtcctggcctcaggtgatctgcccgcctcggcctcccaaagtgctgggattacaggtgtgagccaccgcgctgggctgcatgaacctcttacatgcttgccttctctggagggcctggactttgaagcttctttcactcccagcatctttccctacacaggccctcttccccactatctctgggggaggagtctgcaggccagttctgcaatgtgccgccagagggagctgcccgcagagaaacgggagcgccacactcaggccccaggaaggcagcaagctgagttcccctggcctcagttcactttccctcttgaaagtcacccaaactcaagcaaaagctccgattcaggaataaatggggttgttttatcccagccaaggcctggggaagcttggtattaagagcgtttgttccattcttttaaaaatggaaaagggtccgtcctctgggtgcccatggcaccctggaaagcaggcagagtgctggtcacaggcggagactttgagataccgagaccgaggctggagtttgggccctgaaactttctaaccaggatggccttgggcagagcagcctgtgtttagagcttcccatctgtaatatagcagtgacaaccatgcctgctttgcagggttcctgttaggattaattctctatagagccccccagaagccacttttggatttgagatggttcaaggccagaccttgcatgacaagagtagggacagctttccacaggcctcaataaagtagtattcccaggcagttctgcaaccccagcctcatgccctttgcaccttcctaagaggctgccttgcctcagctttggtccccatccaagactcctaagagcaaagccagttcttttccttttttttctttctttaagagacggtctcactctgtcacccaggttgaagtgcagtggtgggatcatagttcactgcagcctcgaactcctgggctcaagcaatcctcccgcttcagcctcccaaaatgctgtaggtcacaggtatgactcacccacccggcctaatttttattattatttgtagagatgggatgtcactgtgttgcccacgctcgaactgctgggctcaagcaatcctccctcctcagcctcactggcagctgggattacgagtcccacccaacctgcttctccttttgcaacccccagacccagaggctccagagcaggctctggaacagaggaaatctggctccggcccacacattcaccaaatactgacgcagcacccttgacctccagatgcccctgtgctctcttctgtgcccaggctgcggggagagaggggtcctccaggccaaagggagggaggtctccgggaggtccccgcggtcctggaggcaggtgcgcggggcccggatgtgatcatgcgtgcgcgtgggagaaaggcagggctgggcctgcgggagcgcggccttgcggttcccaggactcttctccgggcgcctcgtctccttacgccacccgcaacccaagccagggccccggtgacagcggcggggtgggccaggaccggggagggggtgcccagcagcgacccccggctccccctaaggccgggcgcagctcggagccaggagctggcccggcgcgtggcttcccggaaggcccggcgcagccggaaggtgggacggagggcggggccagcgccggggccgccaccaaggcctgcgcgaccctccgcggggctggggagctgggcggggagcccggggcctgccaggcccgggctgcagccgcgtctgatcgccgagcgcgccgcgtagacctccgctcccccaggtaaaggagcgcccggagccggggcggggcgcctcccaggccgcgccccgcgagaggagggggcaccccaagagcaggcctggagacccgggagtgccttggggagagggtccccgccctgccgggagcccggccctcccggtgccggggtggacactgttagtgtagtcattgtccctatggagaaactgaggcatggagaggctgaagtcacacaagtaagcagcagagctgggactagagtcccgggccctggctcgctgtcacccaggagtggcgtaggcatgggtgtggtgggtgggggtggggtgcgggtggtggatgtggtgggagtgggtgaggttgggtggggtggggatgtgggtttggcgggggtggggtgcggaatgtgatgggtaggggtggggtagagtgggggtggctggtggggcaggggcggggctgggggtggggtgctaggtattataaatgtgaagcggatcctgacaggacacctgtggggcagcggagctgggctgagccatatgggaagaaaatctgggcgctagtttagatttggtcaggaagggtcgttaatgctttaggaggtgagattagttttggggatggcaggtagtttgttgagcttttgtttagacagtcttgctctgttgtccaggctggagtgcaatggcgcgatctcggctcactgcaacctccacctccctcgttcaagcaattcccctgcctcagcctccctagtagctgggattacaggcgacaccaccaagcctggctaatttttttgtatttttagtagagacggagtttcaccatatcggccaggctaatctcaaactcctgaccttgcgatccacctgcctcagccttctgcaatgctgggattacagacgtgagccaccccgaccaatttttgtattttttagtagagacggggtttcaccatcttggaatagcacctgtagttccagctactcgggaggccgaggcggaagaattgcttgaggccagttc

SEQ ID NO: 2032 - DNA, 6000 bp, Homo sapiens
tccaaaaatgtcagctgccatcattatcctatcatacactaagttaaaaggccaattttaattttccctggaagttttcattggtcacagcctccatctgaagaagcgatggctaggcttgctccccaatgtaagaggaggttaggccgggacagaagcaccctttcactggttttcatccttcccaccttggtggctttacacagcagtgtgcgctggttctgagcaggaaccaagccttggggagcatgggttgggcccttgcctggctggctggggggcctgtgcaggcagattgtcccgcccagggaggacaggagccaagcctccagggctttcccatgctcacgttccctggcgctgggccgcagacactctgtggttgacagcctggtcctgttcatcttgcccggctcccacttcacagctcacactggtatagtgtggccccctcctcttctagtatttccatgtgtagcctcacaagataactggctcatccaggtggccacagatgtccagcttggccccacagcaaggccttagccagctccactgccagccacagcccacaccttccctgatcaacctttgctagcagcggggctctttaattgtccgctaagacgcctttgaggacctggtagaagttaggctccagctgcctggggaaatgcacatgggcccaacagtaggcaggctcctgggtctccaaaggctgtccagggatcccatgttaaggaatcctatctgggaaggacttcccccttgcaatcccttggtcttccttctccttaacctttatgtcctggtgcccgtcctccatcatcagagcctgaaccatataggaagctaagcaaataacccccaaatctctttatgagtaataacaacacaaattgagcagttaccttgtgccagatactgttgaaaacacttgaggggtattaatacatttacccctcaccgcaaccccatgacgttgggacaattagaattatacccattttacagatgagaagattaaagcacagagaggttggagaaccttcccaaagtctcatagcaaaggggaggtgttgccctccctacacagcagctggttcaccacctctgatgcaatccacagtctccctcaaggctgggccaatgctcgggagctctggacttgaggcaagcacagaatggaatgaacccaaacacccaaaggtgagctgccctagaaaggcggacattgggccgggtgcggtggctcatgcctataatcccagtactttgggaggcccaggtgggcggatcacctgaggtcgggagtttgagaccagcctggccaacatggtgaaactccatctttactaaaaatacaaaattagccaggcatgatggcacatgcctgtaatcccagctacttggtaggctgaggcaggagaatcgcttgaacccaggaggcggaagttgcagtgagctgagatcgcgccattgcactccagcctgagcaaaaagagcaaaattccgtctcaaaaaaaataaaaatgaaaacaaaagacatcagtggtttctgaagactccaagctgctgtataggctgtgtctgccatcttggacacaacttttctattgttcctattaaatgtgttcatccttctggcttacatgccattttcttcatgcaaacttcttgccatccaaggatgggttggatacatccttctccacatgaagtcatagccccaagactcttcccttcccagccctatcatgctacactgcaaatgcatgacagcctcccttccacaccggaagctcccaagagggcagggattgtgtcttgctttgctatgtcttgaattaaaaaataataataataattattggctgggcgcagaggttcacacctgtaatcccagcactttgggaggccaaggagggagaatcacttgaggccaggagtttgagatcagcctggccaacatagtgaaacactgtctctattaaaaatacaaaaattagccgggcgtggtggcaggcgcctataatctcagctacttgggaggctcaggcagcagaatcgattgaacctgggaggcggaggttgcagtgagctgagatagcgtcatcacactccagcctgggcaacaagagctaaactccgtctcaaataataataataataacaacaataataataaggccgggcacagtggctcactcctgaaatcccagcactttgggaggccaaggcgggcggatcacgaggtcaagagatggagaccatcctggccaacatggtgaaaccccgtctctactaaaaatacaaaaattagctgggcgaggtggcgcatgcctataatcccagccgctcgggagactgaggtaggagaatcacttgaacccaggaggcagaggttacagtgagctgagatcgcgtcattgcactctagtctggacgacactctgtctaaaaaataaataataattattattattatttaatttttattgagtaaaagatacattcagtaaagtgcacaaatcctaggtgtgaacttttatgtatgtatcaatcaatgagcttttatgtatgtatacagtcatgaaaccaccactcagatcaaagcatacatgtctagcccctagaagtttcccctggtctcctcccggtcattactcctcaccctaggggtaaatactgttacggtgactgctgtcttttcttaaacttcaaataaatggaaacttcaaataagtgtgtctggcttcttgggctcaacatgttgtctctgaaattctcatgttgctgcatgattccttggtttgtcctttttattgctgtgtggtattccattgaattaatataacaacatttatgtatccattctattcttgatgaacatgtcagctaggatgtggaggatttgggctctatctttgctggtgggtgtatacattgctgtaatgactaaggaaaactgtcttgtctaccatcattataataactcatttagtgagcatttactgtgtgccaggtactgtacaggagtcagctacattatctcaatcttcacaatgatccttgggagtagatagttgccatctgtgaaacaggataattgtggcatcaacatgaataggattattgtgaagtttaattgagatgatactttgaaggacttagcccagtgctgccattttggaaacactgtttatgatacctgttactggtgattcctaacgggcacaggatggggggttcaggtgcctgggtccctgctgagcaagtagcccagcagccttggcctcagagcacctgggggaatcatgaatttgtgagcctctttgataagaccctggctctaacttcaagaaaacggtcactaggggagggtgagggacaggactgagactttagcttaagaagggccctgggagcattccagagccttcttttacgcacatcttcctgaagctgagtacagagggtactctgaggtgatgactgttccttacctgtctctctcattagccggtaagccctgcaagggcttggccagtgcctgtctttcaaatgttcattcagaaacaatttaagtgtctcccttggtccaggcactatgccaagaactgacagatacagcagtgagcaagatgggcaaggtggggagagagacaagaaacagagaggcaccaagactgtgtaggggctgggctcccagcactttgggaggccaaggcgggaggatcgcttgagctcatgggtttgagaccagcctgagcaacatagcaagaccctatccctacctgccaccccccaccccccgccacaataaaaaatacaagtcttgagggagaaaggacagaggagctgtggagaggaggcctgaggtctgagggtgggggatcagggtcaggtcctgtggagcctgtagcctaggacacggagtgtggatttgacccttatgcgaaacaactggaaggctttttgtttctttttctgtagaaatgggggtctcactgttacccaggctggtctcgaacaccccaagggatcagccgtctcggcctcccacaatgctgggattaaaggcgtgagccaccgcgcccggcctcaactggaaggctttaagtgagagatggggtgcaagggaatcccagagtcagaaaggtcttcagagagccaggaagggcttgcgggggaggggcgcatatggaaggggcgcatggaaggaactcacagattccttgaatgaatgaatgaacgacccaatgcactgacggatgaatggacaggcggccaggaatagcagccggcccccagggagccccagaccccgcggcctgaagccttggttctaggccaaggcacaggcgcggtgaccttggggatgtccccgcccaggactcagggcccggaactcggcgtctcgggggcggggagggcgtgcctggcgggacagcgcgcgcggaggaacggcgggcggtgctcctcgggtaggccccccacacatccccttggctcagccctgccggggcccgaacccgcgccgcccgccgtgtttacattccacccgcgccagccacgcggctttttgccgctccagcgccgctcggccccgcccccggcgcccgcggcccgcccctcgccgccgcgcgccagacttctcccgcgtcccgcccgccgccccgccccgcgtcccgcgccccgcgccccgcgcccggccctcggcgcgcaggccctgtcacttggccccgccctgtccgccggccccgcccctgattccccgtccctgcgcctcgcgggccggcgccgtggaggggcgggtccgggggcggggcgagggacggggcgggacgggctctgggtcccgcgcggccgctgaggggctgggagccgcggcggggcggtgcgagggcgggccggggccggttccgcgcgcagggattttaaatgtcccgctctgagccgggcgcaggagcagccggcgcggccgccagcgcggtgtagggggcaggcgcggatcccgccaccgccgcgcgctcggcccgccgactcccggcgccgccgccgccactgccgtcgccgccgccgcctgccgggactggagcgcgccgtccgccgcggacaagaccctggtgagtctactgccgcgggctgcggacagggactcctggggcccagaccgcgccggggagctgggtgggggcggggtgcggccgggtcgcgggtccccgggcggcgtcgcggggcgcccgggagggtgctgagagcgcggcggggtggggtggaggggacactgaggcagcccgggccccgggaggcgacgggccggtgagggcggcgggggcggcgggaccccgggtcgggggtcggcgggtgcccgggtcgcgggtgacaggccaccccgccatcggccatcttcctggctcgcccggccgcccgcgcgcaaagggggaaggggtactgggcccgcggcctgaccccgccgccgcctcaccccgcgccgccccgcaggcctcaggccggagcagccccatcatgccgagggagcgcagggagcggtgagtgcccgcgccgcggggccggacgggacgggacgggacgggacgggtggcgtgggggaggggcggccgcgggtgctcacccggcccggtgccacccgggtccacagggatgcgaaggagcgggacaccatgaaggaggacggcggcgcggagttctcggctcgctccaggaagaggaaggcaaacgtgaccgttgtgagtacaaaagagacaggttggggagcatcccccccatctcacctgggtacccgacttggctctgcctacgggggcgggggtcccttgggcaggaacggagctcataacctgatcagctttctcttcttctctctgtttttgtcttgtttggtgtgtttccttggggtcatgggggtggcttcatgttagtttttgcaggatccagatgaagaaatggccaaaatcgacaggacggcgagggacc

SEQ ID NO: 2033 - DNA, 6000 bp, Homo sapiens
ggctccagctgcctggggaaatgcacatgggcccaacagtaggcaggctcctgggtctccaaaggctgtccagggatcccatgttaaggaatcctatctgggaaggacttcccccttgcaatcccttggtcttccttctccttaacctttatgtcctggtgcccgtcctccatcatcagagcctgaaccatataggaagctaagcaaataacccccaaatctctttatgagtaataacaacacaaattgagcagttaccttgtgccagatactgttgaaaacacttgaggggtattaatacatttacccctcaccgcaaccccatgacgttgggacaattagaattatacccattttacagatgagaagattaaagcacagagaggttggagaaccttcccaaagtctcatagcaaaggggaggtgttgccctccctacacagcagctggttcaccacctctgatgcaatccacagtctccctcaaggctgggccaatgctcgggagctctggacttgaggcaagcacagaatggaatgaacccaaacacccaaaggtgagctgccctagaaaggcggacattgggccgggtgcggtggctcatgcctataatcccagtactttgggaggcccaggtgggcggatcacctgaggtcgggagtttgagaccagcctggccaacatggtgaaactccatctttactaaaaatacaaaattagccaggcatgatggcacatgcctgtaatcccagctacttggtaggctgaggcaggagaatcgcttgaacccaggaggcggaagttgcagtgagctgagatcgcgccattgcactccagcctgagcaaaaagagcaaaattccgtctcaaaaaaaataaaaatgaaaacaaaagacatcagtggtttctgaagactccaagctgctgtataggctgtgtctgccatcttggacacaacttttctattgttcctattaaatgtgttcatccttctggcttacatgccattttcttcatgcaaacttcttgccatccaaggatgggttggatacatccttctccacatgaagtcatagccccaagactcttcccttcccagccctatcatgctacactgcaaatgcatgacagcctcccttccacaccggaagctcccaagagggcagggattgtgtcttgctttgctatgtcttgaattaaaaaataataataataattattggctgggcgcagaggttcacacctgtaatcccagcactttgggaggccaaggagggagaatcacttgaggccaggagtttgagatcagcctggccaacatagtgaaacactgtctctattaaaaatacaaaaattagccgggcgtggtggcaggcgcctataatctcagctacttgggaggctcaggcagcagaatcgattgaacctgggaggcggaggttgcagtgagctgagatagcgtcatcacactccagcctgggcaacaagagctaaactccgtctcaaataataataataataacaacaataataataaggccgggcacagtggctcactcctgaaatcccagcactttgggaggccaaggcgggcggatcacgaggtcaagagatggagaccatcctggccaacatggtgaaaccccgtctctactaaaaatacaaaaattagctgggcgaggtggcgcatgcctataatcccagccgctcgggagactgaggtaggagaatcacttgaacccaggaggcagaggttacagtgagctgagatcgcgtcattgcactctagtctggacgacactctgtctaaaaaataaataataattattattattatttaatttttattgagtaaaagatacattcagtaaagtgcacaaatcctaggtgtgaacttttatgtatgtatcaatcaatgagcttttatgtatgtatacagtcatgaaaccaccactcagatcaaagcatacatgtctagcccctagaagtttcccctggtctcctcccggtcattactcctcaccctaggggtaaatactgttacggtgactgctgtcttttcttaaacttcaaataaatggaaacttcaaataagtgtgtctggcttcttgggctcaacatgttgtctctgaaattctcatgttgctgcatgattccttggtttgtcctttttattgctgtgtggtattccattgaattaatataacaacatttatgtatccattctattcttgatgaacatgtcagctaggatgtggaggatttgggctctatctttgctggtgggtgtatacattgctgtaatgactaaggaaaactgtcttgtctaccatcattataataactcatttagtgagcatttactgtgtgccaggtactgtacaggagtcagctacattatctcaatcttcacaatgatccttgggagtagatagttgccatctgtgaaacaggataattgtggcatcaacatgaataggattattgtgaagtttaattgagatgatactttgaaggacttagcccagtgctgccattttggaaacactgtttatgatacctgttactggtgattcctaacgggcacaggatggggggttcaggtgcctgggtccctgctgagcaagtagcccagcagccttggcctcagagcacctgggggaatcatgaatttgtgagcctctttgataagaccctggctctaacttcaagaaaacggtcactaggggagggtgagggacaggactgagactttagcttaagaagggccctgggagcattccagagccttcttttacgcacatcttcctgaagctgagtacagagggtactctgaggtgatgactgttccttacctgtctctctcattagccggtaagccctgcaagggcttggccagtgcctgtctttcaaatgttcattcagaaacaatttaagtgtctcccttggtccaggcactatgccaagaactgacagatacagcagtgagcaagatgggcaaggtggggagagagacaagaaacagagaggcaccaagactgtgtaggggctgggctcccagcactttgggaggccaaggcgggaggatcgcttgagctcatgggtttgagaccagcctgagcaacatagcaagaccctatccctacctgccaccccccaccccccgccacaataaaaaatacaagtcttgagggagaaaggacagaggagctgtggagaggaggcctgaggtctgagggtgggggatcagggtcaggtcctgtggagcctgtagcctaggacacggagtgtggatttgacccttatgcgaaacaactggaaggctttttgtttctttttctgtagaaatgggggtctcactgttacccaggctggtctcgaacaccccaagggatcagccgtctcggcctcccacaatgctgggattaaaggcgtgagccaccgcgcccggcctcaactggaaggctttaagtgagagatggggtgcaagggaatcccagagtcagaaaggtcttcagagagccaggaagggcttgcgggggaggggcgcatatggaaggggcgcatggaaggaactcacagattccttgaatgaatgaatgaacgacccaatgcactgacggatgaatggacaggcggccaggaatagcagccggcccccagggagccccagaccccgcggcctgaagccttggttctaggccaaggcacaggcgcggtgaccttggggatgtccccgcccaggactcagggcccggaactcggcgtctcgggggcggggagggcgtgcctggcgggacagcgcgcgcggaggaacggcgggcggtgctcctcgggtaggccccccacacatccccttggctcagccctgccggggcccgaacccgcgccgcccgccgtgtttacattccacccgcgccagccacgcggctttttgccgctccagcgccgctcggccccgcccccggcgcccgcggcccgcccctcgccgccgcgcgccagacttctcccgcgtcccgcccgccgccccgccccgcgtcccgcgccccgcgccccgcgcccggccctcggcgcgcaggccctgtcacttggccccgccctgtccgccggccccgcccctgattccccgtccctgcgcctcgcgggccggcgccgtggaggggcgggtccgggggcggggcgagggacggggcgggacgggctctgggtcccgcgcggccgctgaggggctgggagccgcggcggggcggtgcgagggcgggccggggccggttccgcgcgcagggattttaaatgtcccgctctgagccgggcgcaggagcagccggcgcggccgccagcgcggtgtagggggcaggcgcggatcccgccaccgccgcgcgctcggcccgccgactcccggcgccgccgccgccactgccgtcgccgccgccgcctgccgggactggagcgcgccgtccgccgcggacaagaccctggtgagtctactgccgcgggctgcggacagggactcctggggcccagaccgcgccggggagctgggtgggggcggggtgcggccgggtcgcgggtccccgggcggcgtcgcggggcgcccgggagggtgctgagagcgcggcggggtggggtggaggggacactgaggcagcccgggccccgggaggcgacgggccggtgagggcggcgggggcggcgggaccccgggtcgggggtcggcgggtgcccgggtcgcgggtgacaggccaccccgccatcggccatcttcctggctcgcccggccgcccgcgcgcaaagggggaaggggtactgggcccgcggcctgaccccgccgccgcctcaccccgcgccgccccgcaggcctcaggccggagcagccccatcatgccgagggagcgcagggagcggtgagtgcccgcgccgcggggccggacgggacgggacgggacgggacgggtggcgtgggggaggggcggccgcgggtgctcacccggcccggtgccacccgggtccacagggatgcgaaggagcgggacaccatgaaggaggacggcggcgcggagttctcggctcgctccaggaagaggaaggcaaacgtgaccgttgtgagtacaaaagagacaggttggggagcatcccccccatctcacctgggtacccgacttggctctgcctacgggggcgggggtcccttgggcaggaacggagctcataacctgatcagctttctcttcttctctctgtttttgtcttgtttggtgtgtttccttggggtcatgggggtggcttcatgttagtttttgcaggatccagatgaagaaatggccaaaatcgacaggacggcgagggaccagtgtgggagccaggtaggtccgcccggggttgggcctctgtggaggtccttctccccctgggtcacatggggtttcatgctgtcttgtctcttgctggagacactctggtgagagtgaacttctctaatgcagccacagcccatatggcccagcactgtacctgtcagtgggcactggcctctgccagtcctgggattccaggaagcttggtgttcctgactggcaccgtctgagattacagatatgtgcctagcctggaagaaccagaatggacatcacagtattcagtcctccccttctgcccaggaggaaactgagactcagttagaggaagaaagtaacccagagtcctgtgccatccaggggcaaagttgggctctcggccttgtctgtaaaagctggtgaactgggggagggttcctgggtgtttataagcaacaactttccccctatctacacctatttttcttgtcatggtgtttaaggacctcctccgtcttctgtaggtcagatttcaaattcttctcctctttctggccctggaagttcttatagcccctccagcaattacctgcattgatccccagctcagcctgacctcagcaagagtatcagtggaacattcagtgtaatgataggtggtgtctcaat

SEQ ID NO: 2034 - DNA, 6000 bp, Homo sapiens
aatgaatgagtgaatgaaggaatgaatgagggaaggcatgagattgcacccatttggtcctcaccgaaaacattgggtggaggaagaaattgggagttggcacagactaggcatggttggtagcacaactgcctgatctttggcttgcaggtggctctgtctggagaatgccccatgctatgacaatgttccccaaggcatctttgcccctgaattcttcttcaaggtgttggtgagcaataggtgagccaggcaagtggcccaggtgcgggtcaggggctgcccatggaatgcctggcttctcctctaatcctggatcccctcccaacccctgcagaggagtggacacgagcacctactgcaactaccagctcaccttcctgctgcacatccacgggctgccactcagtcccaagcgggcccttttcatcatcatggtgagtggctgtccgggagctgccctactgggtgggcaggggcccacgcctccatacctatgcttgttataccttcgctcattcattcctttattcactcatctagccatgctgactgaacgcctgccatgccacaggctgtctactcattcatttcctcctgctgtcatgcctccatctgtcaatttccctgtcactgtggatgcagattgtggactgtgtaccttatcatgtgccaactccttactcattctttgctccctgcaggtgtcagctagcgtgtttgtgggcctggtgatcttctacatcgccttctgcctcctgtggcccctcgtggtgaagggctgcacgatgatccggtggaagataaacaacctcattgcctcagaatcctactacacctacgcctccatttccggaatctcgagcatgccgtctctgagacattccaggatgggctccatgttcagctccaggatgacagaggacagggctgaacccaaggaagccgtggagagacagttgatgacctgagtgtcccacctgccccagcccccagttactgtcacgcctctcttatgaggcccatcttgaagatgcaacctgtcacccagcccaggcctctctttctgttttgcttgatgtttacttctcgttcagactcaaataaagccttttttcaggaccagcagtgggctctcttaaaagctcgagttcagaaggtttgtaccagcatagctgcacattaaaatatcataaacctggctgggcatggtggttcatgccggtaatcccagcacttcgggagatcgaaggaggcagatcacttaaggtcaggagtttgagaccaccctggcccacatggtgaaaactcgtaaccctgtctctactacaaatacaaaaaattagctgggcatggtggtgcgtacctgtaattccagctacttgggaagctgagacaggataatcccttgaacctgggaggcagaagttgccgtgagccaagattgcgccactgcactccagtctgggcaacagaccaagactccgactcaacaaaacaaaacaataaataaaatatcaaaaaccttctaggccacctgttaaatagtggcttctctgtgtgcctgttggctgagcctctccccagtgtaccccagacctccctgtggtccagcaggatcctccacaatccaggcccattgctatggccgaccatctgttctgattgttcagtgttaaatattctgaatgtcaacacctatctaatgtcttaaggaggggaccctggagacgtcaggattcttattttagttgcaagtagcaaatatttccctcaaatggtctacatgaaaatggtaatttacaggcttcaggtacagtttgatccaaagtcccaaggtccacaggattcagccttcatttctctgtagttttttcttctctgtcctcctcagagtgcagtctctgacctcaggacaactcccctcaccatctgaggctagttatacagtccataatctggatggatgcgtagtgaccaatgaattgacaagatggaggaatgaaggcaggaggaaataaatgagtaaaaaaataccctgttgcatggtaggcatttggtcagcattaatagatgaatgaatgaaggagcgaatgaggaaaggtatgagattgcacctagttggtgctcacccagagtgttgggttggaggaatacattggggttggcattgactaggcatggttggtagcacaaaaacctgatgaaatttgacaataacaagagttggcaacactcatgtgtgtaagggctgctggctaaggttgtttccaccaccaagattctaccgagtcacctcatggtccaggtgaacacatcataatcctgtatcagccaagtcaacatgttatttaaatatcaccatctgcacttccagccaagatagagtgacagagactggatttcccctcatacttgaaactatttatgttttttgagatggagtctcgctctgttacccaggctggagtgcagtggtgtgatctcggctcactgcaacctccgcctcctgggttcgagcgattctcctgcctcagcctcctgagtagctgggactacagacgcatgccactatgcccggctaattttttgtatttttagtagagacggggtttcactgtgttagccagactggtctccatctcctgacctcgtgatctgcccgcctcagcctcccgaagtgctgggattacaggcatgagccacctggcctggccatatcaacgtggtattttgtttatttgtgtctttttctttttttttttgagatggagttttgctcgttgcctaggctggagtgcaatggtgcgatcttggctcactgcaacctccacctcccaagttcaagtgattctcctgcctcagcctcccgagtgagtaactgggattgcaggcacccgccaccatacctggatagataattttttgtatagtagagacggagtttcaccatgttggctaggctggtctcaaactcctgacctcaggtgatccatccacttcagcctcccaaagtgctgagattacagacttgagccaccacacccggccatcatttttgtttaaaacattttttaccaccacaacttctttcacatattaatttactcattaattcaacacatatataatttctttctttttctttttttcttttttctttttttttttttgagcacagtctcgctctgtcacccaggcaggagtgcaatggcgatctcagttcactgcaacctctgcctcccgggttcaagtgcttctcctgcctcagcctcccaagtagctgtactacagatgtgcaccaccacgcccggcaaatttttggtatttttacatttatttatttattttctctgagacagagtctcactctgtcacccaggctggagtgcagcggcacaatctcagctcactacaagctgacctcctgggtttaagcgattctcctgcctcgggctcctgagtatctgggattacaggtgtgtgccaccacgcacagctggtttttttgttttttttttttggtatttgcagtacagatggggtttcgccatgttggccaggttggtctcgaactcctgacctcaagtgatctatctgcctcggcttcccaaagtgctgggattacaggcatgagccaccatgcctggccaacaaatatttattgactgtctactaatatttgccaagcactgagatactgggaattcagtagtgaaggaaatcgtcctgccttcatggagatgacattctaaatggtggagacggagagtgaaagtcgggtttgagaaaaacgtgctgcccaggcgcagtggctcacacctctaatcccaacactttgcgaggtcaaggcaggaatatcgcttgagctcaggagttcgagaccagcctgggcagtataatgagactctgtctctataaaaaatttaattttttttaaaaagagagaaaaagcgatgttgaatgtgcagatgtaatatcaatcagtggaggaagaagttggtataagaagttgtgaatactggccaggcaaggtggctcatgcctgtaatcccagcatttcgggaggccagggcccagggaatcgcctgagttcaggagttggagaccagcctgaccaacatctactaaaaatactaaaattacgtctctactaaaaatacgaaaattagccaggcgtggtggcacatgcttgtaatcccagctacttgggaagctggggcagaagaatcacttgtacccaggaggcggaggatgcagtgagccaagattgctccattgcactccagcctggacaacaagagctaaactccgtctcaaaaaaaaaaaattgtgaatcctccacttacacatgacattgaaagccatagagctggatgagttttgtaactagttagttcatataagcttgggaaaaaaatgtggaaggatgcattgaaaaagactggagagggagccccaggtacacatcctagctgttagtcctttggaaggttacccagcctctcagtctgtctataaaatgagaataacacagctctccaaatggcacgacacccgctaccttttggcttggagacgctgccccgaaggcggaacctccaggacagctacgtagcgtcccgagcactcagactgaagccagggcagccatgttcattattggaaccgtgaggtgggtagggggggtggtgttgagacagctgtcattttcagttagggcaaaagccaacttccggtcaccatcttgagtgacgacagaggcggagctccaactgacatgttcattaagggcagggctccgagggcgccacctcgagagcgacggcgggctacccggggcgggctgaggcaggttgtagccccgccccgggccttgggctccacctctcggccccacttccgccgggcaagcgtttgtaggcggcgctgccgtaaatcaggcggtctgcttgccgcatcacgcaagatggcggccgcggcggtgaacggggcggcaggcttctcgagctccgggcccgcggcaacctcgggcgctgttctgcaggccgcgaccggcatgtacgagcaactcaagggcgagtggaaccgtaaaagccccaatcttagcaagtgcggggaagagctgggtcgactcaaggtaaagtcggcaggcccaggaaaccgagtgttgcgggcgtgggaggcgctacgaggtgtctggacccaaccaagtcccgggccgcggaagccacctcggtgccagcgagactgaggcgggctgggggatccgatggggtgaaagatttggaacagccaaagtgggggctcggagggcgtcaagaagcgagagagggacagggagcgttgatggtcacgcctgtaatcgcagcgctttgggaggccgaggcgggggagcgtcgcttgagcccaggagttcaagatcagcctgagcaacatagcgagactctgtctctacattttttttttaagtgagagatgactggaatggacccacgcgggggtggtgggggaatgattggaagacttatggcagaactgagtgaggggttagatttttggtgcgtggaggcttaactggtcggagtggcaggattgggattcgggcttttcctgatggtggattccaggcaagaccaagtgggaagtgaggactgcccggagtgataaaagaatgaggctgaaaaggtgggctgtgtagagggtgtgtggttaagaccaggctgggttaggatctgagagatctggggcttaggctcgcatctgttgggagagggggcagcctagttgtgaaggcaggactgaacctagaagaaatattcttacaagtagagaacaagaatacggggcccagagtgcttcagaccaaacatctgttgggagggagtgtaaatccagtggcttggaacaagctgctgagcctgctaaggaaagatgtatgggctgaactgtggggggagatttggacctccccctcccagatatagattttggggatag

SEQ ID NO: 2035 - DNA, 6000 bp, Homo sapiens
gccagcgtggctagagtcacaggacagagtacaaaacagagttgccaaaggagagattgctggggaactgcaggaggttctcttgtgtattccggagaatacggatcagccatgcctgtgagtctgtggggatgggaaaaccatccaaaaggatttcagaaaagtgctcgttactcacacagggccaggaatagtgagtgttcccaccagccaggctggaaaaacatcatcacaggctatcgggtgggatactcaggaaggtcttgcctcaatagtggggaataattaactgtagatggggcactgctcaacacccacctaacaaatcataaaagcaaaactggaaagactcaaactacttccgagtaatttaactccatcccagaataatattcaagaatatttatttatttatttatttatttatttattttaatttttattttttgagagagagtcttgccctgtcgcccaggctggagcgcagtgacacgatcgtggctcactgcaacctccacctcctgggttcaagcgattcttctgcctcagcctcccgagtagccggaaccacaggtgcgtgccaccacacctggctaatttttgcagtttttagtacagacagggtttcaccatgttggccaggctgatcttgaactcctgacctcgtgatccacccgccttggcctcccaaagtgctgggattacaggtgtgagccacggcgcccggcctcaagaatatttataggaatacagaattctccagactaacaaggcaaaattcacaatgtctggcacctaaccaaagattatcaggcatgtaaagaagcaggaaaacatgatccataataggaaccatcagtgaattgaaactgacccagaaatgacagagatgttagaatttgcaaacaagaatattaaaacagttcattatgctgggcacggtggcccacacctgtaatcctggcactttgggaggccaaggcgggcagatcacttgaggtcaggagtttgagaccaacctggccaacacgatgagaccctgtctctacaaaaaatacaaaaaaaatttagccaggcatggtggcatgcgcctgtaatcccacctacacaggaggctgaggcaggacaatcatttgaacctgagaaatggaggttgcagtgagctgagatcgtgccactgcactccagcctgggcaacagagtgagactccgtctcaaataataataataaaataaaataaatttcttttactctatgtgaaatggcataatatcactttaaggtagcccatgataacctaaagttgtaaactatcaaccctacagcaggagtcagcaaactttttctgtaaggagccagataactattttagtctttgtaggtcatatggtttctctttttggttttgtttttctttttctttttttgtttgtttgttttgtttttttgagatggagtctcgttctgctgcccaggctggagtgcagtggcgtgatctcagctcactgcaacctccgcctcccgggttcaagcgattctcctgcctctcaagtagctgggattacaggcgctcgccaccactgccagctaactttttgtatttttagtagagacaaggtttcaccatgttagccaggatggtctcgatctcctgaccttgtgatctgtccgccttggctcccaaagtgctgggattacaggcatgagccactgagcccagcagccatacagtttcttttgactactcgactctgctgtgtcagtgcaaaagcagccactgacaatatgtaaatgagtgagcttgcttgcgttccaaaagaactttatttatggagcttgaaatatgaatttcatacactttcacttgccatataatattattattcttttgatttttagaaactgtttaaaaatgtaaagaccattcttagctcacaaccatacaaaagccatataatattattattcttttgatttttagaaactgtttaaaaatgtaaagaccattcttagctcacaaccatacaaaagcagatggctggctagattttgcctggaggccatagtttgccaacccccaccttaaagcaaccactaacataacaaaaagaggaatatctaataagcaaacaaaagaaataaaatgaggccgggcgcggtggctcacgcctgtaatcccagcactttgggaagccgaggcgggcggatcacaaggtcaggagatcaagaccacggtgaaaccccgtctctactaaaaatacaaaaaaaattagccaggcgaagtggcaggtgcctgtagtcccagctactcgggaggctgaggcaggagaatggcatgaacctgggaggcggagcttgcagtgagccgagattgcaccactgcactccagcctgggtgacagagcgagactccatctcaaaaaaaaaaaaagaaataaaatgaaaaacactatacagaaggagcaggattgaaaaaaaagtaacaaaaactatacccaataaaaggcaaaaaggagggaggaaaaagaaaacataggtaagtagaatatatataatagacatgggataaatttacacaatcatatcaatatcaaattaaatgtaaatggtctaaacactaattaaaaggcagagactgtctgggcacagtggttcatccctgtaacccagcactttgggaggccaaggtgggaagaatgcttgagctcaagagtttgagaccacagctgcacacagtggctcacacctgtaatcccagcactctgagaggccacagcgggtggatcacctgaggtcaggagtttgagaccagcctggccaacatggtgaaactgctgttgctactaaaaatacaaaaattagccaggtgtgggggcacgtgcctgtaatcccaaatttgggaggctgaggcagtagaactgcttaaacccaggagtcagaggtttcagcgagcagagatagtgccactatactccagcctgggtgacagaacaagactctgtctcaaaaaaaaaaaaagagtttgagaacatagggggacaaaaaaatttaaaaatttgccaggcatggtggcatgtgcctgtggtcccagctactcaggaggctgaggtgcaaggatcacttgagccaggaggttgtggctatagtaagccatgatcatgccactgcactccagcctgggcgacagagtgagacttcgtttcaaaaaaaaaagtcagaacagagaccaattgaatagaaagtaaaaaaaaattaatgaaaccaaaattaattaatgaaatttaatgaaaattaacgagactataaagctggttgagatcaatattcagtgcctcctggatcaggccctgcttgcatcactgggcatacagcagtaaacacaacagacaaaaaacccagtacaatccctcatctgggcctttgcaactgcagttccttctccttgaaatgctcttatcttgtttatctattgcctcattttcctgctttatttttctccaaagtacttaactacctctgactttatttccttttcttactttctatgtttctttctttctgcgtgtctttctttgtttcttcctgtctttccatttctttccttccttgtggtcttatcaatctgtttatttagctccactaaaatgtatgctccacaagggcttaagtttttgtttgttttcttcactgcctttatcactagcacctaaacggagcctggaacgtggtaatgtgtaaagaatatttgtttaacagatgaatccttggtctcatggagctaacattcttttttttaattttcctatttttttactttaattaggaattcaacatagaagagcttacattctctctctttgaatttaagatttgaagaacactgctcagaagacaggatcttagagtcagggaccaagtattaatttcggaaatcaaactctagggctcaaatcgggaactaagaatcaaagatcatatttggaggttagaagtcaggagaagccacagttctaacagaagtctcaggactggagtcaggtttgggtatcagtggatacaatgtggattccaggagctgagaatcatagttcaagaaaagaaggtaagaaatgattgggttaggatcatagctagatagaagattggttttgttaaaagttaggactcgggggttagaggtcaggaagttcagcatcggaagtcagatttaggagtatgaggttaggaagcctcagggatcagagattaatgaggaatgtgacgccgggtcctagggctccgtttggcagcctaaggttcactcacgtgtccccatcctcagtgacgtagccgaagacgaggggagcccacgacagccccgggcccaactccgcgcccaacccaggtcctccgggggccgctgcgtccggacccagggagcccaggccgctgtcgcaccattcatctgcgtcggcagcttttcccaagcacgcgaccccagccatggcccccgccgcctcaggggccccccgcagtcgcccgcctgtagctgggctttgccgggagttctggagcttccgccctgcgggaaattccccaccacgccccctgattcacccaatgataatatgctgaatcgctcacaccccgccctcgtactgcatcctgaccaatcagagtattcgggaggactacaactctctagccgttcccacattttccgggcgccctttaccaacatggctgctgacgccacgccttctgggactcgtagtccggtcctcgcgcgctttcttacctaactggggcgctctgggtgttgtacgaaagcgcgtctgcggccgcaatgtctgctgagagttgtagttctgtgccctatcacggccactcccatttctggtgccgtcacgggacagagcagtcggtgacaggacagagcagtcggtgacgggacacagtggttggtgacgggacagagcggtcggtgacagcctcaagggcttcagcaccgcgcccatggcagagccagaccgtgagtcggggatccgggtaggagggtcgggccgcgccggggcctggctgaatgctgcaggccccggggcccaagggtggccgcggtggggcgggaagtagggagcgcttcggggagtgggattctgagggctgttgcttagcgatctgtatcgctaggctggtgggtttctgggtcgcagtgtgttcagggttcgtttaccacatccacttgccaagttgccaatgatcgcgtgtttctcgcaccttggttgctaaggtccctcgctgcaaagaacataagttgccccggtcccgcttgctatgggtacctgattgttagaggcaaccagaggatgctgagggacccctgctgacccctcctatggcttccccttgttccgcgcctctcctaaacctaccgcctccactgcaccactgcacctccctcctaaacctgcctcccagccaaagcgtctcttcccttctcttttcctttctaaacttccctctgccttgtaaatctaaccctccccgcacacacactcacacactgtcgtgtccttcctaactcctcctgagtgttccttcatgccctgaatcccctaggtaggaggaggaggatcgcttgagcccaggaatttgaggctgcagtgagctatgatcgcactattgcactccaacctgggtgacatgagcgagaccctttctctaaaaagtaaaaaagaaagaaagtaagtcagggccagaaacaatggctcatgcttgtaatcccagtactttgggaggccaaggtggttggatcgcttgagcccaggagttcaagaccagcctgggcaaaagcccctactttctccctgtccccctaaatcttcctctccagcctctctgcccctcactaatcacctctcccggcatcactttgcatgtagataagatcttttctccgtcccctccctccctctgctccatttttaccaccatcccatcccagtgtaactaggttggtg

SEQ ID NO: 2036 - DNA, 6000 bp, Homo sapiens
cagccagatgtttcctgcccccgcctccctcctcgccctcctgccacagcccttcagctccagagcatgtacgctgagcctcctaagggtctgtccaccaaccccctttccctccccggcgctccacctggtccagcctgtcctctcctccgggggtcctgccccagcctcctcccccagcctcccagcctcagtctccacctcccatccaccctgctgccctgcatgtgaggctgtctgggtcagctcgcccctctccacttcaaaggcccttctctctggcttctgcagtcttcccagacatctatggaattgccaggatgtccacaagggcagggactttgtctgggtgcccagcactgagaacagggtctggctcctggcaggagctccaggagctcctctaccttggaatgaatgcctgcttcaggctggaccacggctgggccctgcaatggatttcaccaaaatgcagttctgaccaagccaccacctcagacaactcccttccccggatactcactgctctgcgtccaagtctttttgaataagaccctcccttccgaacatacgacaatttaaaaaattgctttttaagactgtgcaactccggctgggcgtggtggctcatgcctgtaatcccaccactttgggaggctgaggcaggaaggttgcttgatgccaggagttcaagaccagcctgggcaacacagtgagactctgtctctatttaaaaagagagagaaaggctgagcacggtggctcacgcctgtaatcccaacactttgggaggctgaggtgggtggatcacgaggtcaggagatcgagaccatcctggccaacatgatgaaaccccgtgtctaataaaaatacaaaaaattagccaggcatggtggcacgtgtctgtagtcccagctattcaggaggctgaggcaggagaatcgcttgaacctgggaggtggaggttgcagtcagcgagatcaccccactgcactccagcctgggtgacagagcgagactccgtctcaaaaaaaaagagagagagaaagagagagtgagaatgagagagagagagagacagagagaaagagagattggacaacctctgcaaaaaccttgattatactcatgtatacttcaacaacatataacttgcggcactcaccttgtaattgcccaagcccacccttataaagataaccactgttagctaagcttaatggaaattactccagttttctctgcataaaactaatattttttacagaaataggtcatagtacaatacaacatcttgagttttcggcagaacaatatgctacagacccacctaatttaaaaaataattttttaaaaaagagacggcatcttgctatgttgcccaggctggtctcaaaactcctgggctcaagtgatccccctgcctcccaaagtgctgggattacaggtgtgagccaccgtgcccggcctcacctcgtttttcagagcagctacatagtattggattgtatggatgaaccatagttcatttaacccatccactgacagccatttggactgtttccagttttgccctgtgacggacaatgctgcattttacatcctcgcctctctctctttgggactgaggatcctttttaacattcaacctttttctctgacagtggtcgtgctttgggagccaggcgagtgagttgccacagcctaacaggaggctcttatatccttagcaaagctccactgtgcatttgtgaggtattctgatgcccgcttctgcaccaccccacgtctgaaaggcaatctcaggggtgtgggtgggctggcactctttcaggctgtacacagtgaggctgtgtggaaggcctgtgcccagcatgtgtctgcagcttggcctaagggagagccggaggtgctgacgggggccttcaagctcctatgagactgcctgtccacctctcctggcagcctctgacaggtggcgtgcccagtgctgggggactcaaacccttccctgctcctgtagccgagggacgggggataagtgacttaacaactctgcctcagattctgcatctgtaaaatggccgtgataggcgtttctcttcacagggatgccaggaagatgaaattgagatgaggcacgtttggcactaaacagtgggcccagctttagtaagccgtcagtaaatgctaaccacgactataacaagctgaccaccaccagccacccaattatggaacacatcacaccccttcatgccccccaggtctttgcacaagcgatacctgttgtgtggatcaccatttctcaccttgtctaagaaaattctaagtcactcttcacttatgctgtgtctgtatcttggtctgacagctagaccagcctgtggattcctccagggaatggcctggctagaatcttctttgacccagaaaattttctctgtgctcccacagtaccctgagtttctttacttttcttcctttttttttttttgagaccgtgttttgctctgtcgccccggttggggtgcagtggcacagtcaaggcacactacggccttaacctcctgggcttaagcaatcctcccccaactcagcctcctgagtagctggcaatgcaggcatgcaccactacacatggctaatttttaaatattttgtagaggtgggggcctccctatgttgccaagactggtctggaactcctgggctcaagcgatcctcctacctcagcctcccaaagtactgggattacaagcatgagccactgtgtctggccctgagttactttctttcttttttactttttagagaaagggtcttgctctttcaccccggctggagtgcagtgatgcaatcatagctcactgcagcctcaaactcctgggctcaagcgatcctcgcgcctcagtctcctgagttattggaattacaggcataagccactgcatctggccccctgagttactttcgtcatcacgctgtgagatcattttttcccatcacttgtccacgagatctgtgcgttccaagaccaaatgggatacctgtctcttccagtcccaggacaaatgtggttcagaagggatggcaggcagtggcaaggaagaaggaaagtttgggaggacaggcctggacttgaggctggaaactcttctctgacaatccccagaatctgcctttccccagaaagctgcactgggtggtgtgagggattggggcaatgagccgagggccctggggtgactgtttcccctttgccacctccccccagtgtgggatgtggaacaagtccgtctctctcctcccctccaccctttcccccatctcacctgagcctcctgcaccttccctgcctgggtctccagagggtgagaggctgggggaggggagcagaggtggttacagtggggagaacgattaaggggggaataaaggggttcaaatggtcagtgagggggcaagaacacccaccaacctagttacactgggatgggatggtggtaaaaatggagcagagggagggaggggacggagaaaagatcttatctacatgcaaagtgatgccgggagaggtgattagtgaggggcagagaggctggagaggaagatttagggggacagggagaaagtaggggcttttgcccaggctggtcttgaactcctgggctcaagcgatccaaccaccttggcctcccaaagtactgggattacaagcatgagccattgtttctggccctgacttactttctttcttttttactttttagagaaagggtctcgctcatgtcacccaggttggagtgcaatagtgcgatcatagctcactgcagcctcaaattcctgggctcaagcgatcctcctcctcctacctaggggattcagggcatgaaggaacactcaggaggagttaggaaggacacgacagtgtgtgagtgtgtgtgcggggagggttagatttacaaggcagagggaagtttagaaaggaaaagagaagggaagagacgctttggctgggaggcaggtttaggagggaggtgcagtggtgcagtggaggcggtaggtttaggagaggcgcggaacaaggggaagccataggaggggtcagcaggggtccctcagcatcctctggttgcctctaacaatcaggtacccatagcaagcgggaccggggcaacttatgttctttgcagcgagggaccttagcaaccaaggtgcgagaaacacgcgatcattggcaacttggcaagtggatgtggtaaacgaaccctgaacacactgcgacccagaaacccaccagcctagcgatacagatcgctaagcaacagccctcagaatcccactccccgaagcgctccctacttcccgccccaccgcggccacccttgggccccggggcctgcagcattcagccaggccccggcgcggcccgaccctcctacccggatccccgactcacggtctggctctgccatgggcgcggtgctgaagcccttgaggctgtcaccgaccgctctgtcccgtcaccaaccactgtgtcccgtcaccgactgctctgtcctgtcaccgactgctctgtcccgtgacggcaccagaaatgggagtggccgtgatagggcacagaactacaactctcagcagacattgcggccgcagacgcgctttcgtacaacacccagagcgccccagttaggtaagaaagcgcgcgaggaccggactacgagtcccagaaggcgtggcgtcagcagccatgttggtaaagggcgcccggaaaatgtgggaacggctagagagttgtagtcctcccgaatactctgattggtcaggatgcagtacgagggcggggtgtgagcgattcagcatattatcattgggtgaatcagggggcgtggtggggaatttcccgcagggcggaagctccagaactcccggcaaagcccagctacaggcgggcgactgcggggggcccctgaggcggcgggggccatggctggggtcgcgtgcttgggaaaagctgccgacgcagatgaatggtgcgacagcggcctgggctccctgggtccggacgcagcggcccccggaggacctgggttgggcgcggagttgggcccggggctgtcgtgggctcccctcgtcttcggctacgtcactgaggatggggacacgtgagtgaaccttaggctgccaaacggagccctaggacccggcgtcacattcctcattaatctctgatccctgaggcttcctaacctcatactcctaaatctgacttccgatgctgaacttcctgacctctaacccccgagtcctaacttttaacaaaaccaatcttctatctagctatgatcctaacccaatcatttcttaccttcttttcttgaactatgattctcagctcctggaatccacattgtatccactgatacccaaacctgactccagtcctgagacttctgttagaactgtggcttctcctgacttctaacctccaaatatgatctttgattcttagttcccgatttgagccctagagtttgatttccgaaattaatacttggtccctgactctaagatcctgtcttctgagcagtgttcttcaaatcttaaattcaaagagagagaatgtaagctcttctatgttgaattcctaattaaagtaaaaaaataggaaaattaaaaaaaagaatgttagctccatgagaccaaggattcatctgttaaacaaatattctttacacattaccacgttccaggctccgtttaggtgctagtgataaaggcagtgaagaaaacaaacaaaaacttaagcccttgtggagcatacattttagtggagctaaataaacagattgataagaccacaaggaaggaaagaaatggaaagacaggaagaaacaaagaaagacacgcagaaagaaagaaacatagaaagtaagaaaaggaaataaagtcagaggtagttaagtactttggagaaaaataaagcaggaaaatgag

SEQ ID NO: 2037 - DNA, 6000 bp, Homo sapiens
acagaaatcagagttagctacagctaggactcgtttggttggggttttttagtttgtctttctaaagtcatgtggaccttaatttaattacaaaagtctaccctggtggtcataaaataggcaggcctatgaagaaaggccttttactcttccatctcatcccagccccgagttgacccacgttgctgctcctcacaccatggtgatgcaggtctcgtagtgtgggcacaggcctggctacctcatctttttagtgcctctctcctcttccacaggatggggtcccacagctgcagcagctggccccgtagttgagcatgtgtggttatcctgtagagcttttcccaagaagggtgtttgaacttagagtcttaataaaatcttaccaaataaattttgagtagaataatcgtcttttgcaatgtacattttaaaaatttcacacattcttttttgtatataaagaacagtgactgggcacagtggctcatgcctgtaatcccagcaatttgggaggccgaggcgggcgggtctcttgaggccaggggttcgagaccagcctgggcatcatagggagaccttcatctctacaaaaaatacaaaaattagctgggcatggtggtgcatgcctgcaatcccagctaacttggaaggctgaggtgaggtgggaagatcacttgagcccaggagtttgaggctgcagtgagctatgattgcggcactgcactgcagcctgggacaatgagactgtgtctctaaaaataaaaaaaaaaaaaacatgatacatgctattaaaaaagacagcaaagcaggagtataagaaaggaaattcacccgaggtcgcagggccttgagtactcattttggtgctgattacctctctgcaaatggacacggcatcataaattggtagtttcctgctctttttgtgtaatcttttccagttaatgtgaagcctctgggggctgccctcgtgcactgatggttgtgtggagtcgggggcggcagtgcgattcccttttagctgctgcatggggggaactcaggctttccagctgcttcctggggttccatggggtagacccctcaaccgcttcagctgccccgttaacaggaattgacttggtttcgtttggtgctaccagcagtcctgtaataaactagctatccatctgtactgtgctggtgcttttgtttgtctacatcccaggattttaatgtccagtacctttccaaaaaagtgtagccattcagatactttaaattttgaaataattgcagacttgcagaaaactttcaaaaatagtgctgtactaagattattccaggcctggggcaggaaatgtacaagatgagcctggggcatcttgcagtgcctgaaagcacgcactgatatgcttaagtcacagggacacaggagccaacagaaagcttccagtggccaaagctgaaaagaatttgaacaacaaaataaatagcataatattgggttttcacctaaaatgtgaaataagtctattgctaagtggcaaaatggggagaatatgcaaatctacacaaaatcataagtaatttctgtagacagccttcaaggagggctatggaacccccacttcttaggcgtgggctgcagtgactcctccaaagagtgcagtgtggagagggggaaaagtaacttttcagtgaaggtccctggcaaacactacatcatccagccaatcgaggcaaacactgctgatgaatcaccttcacagtgtccctttaatgtgatagaatggcactttccctctgatcctcctcttgcagacacacaccacctcactgagaggaagcagacatcagacagatctcagttgagggatttgtctgccaaggtggttaatcagaaaattctgagaaagtgacacatccaagatcaaccaaaagagtcatggtgactaaatgtaatgtttcctgaaatagaaaaagaacgtagggaaaaaggaaggcttgaataaagcatggacttaatagatgaatattggtctaacggattgtgacaaatggggcacactaatatgagatgttcattggggaaattgggtgtggggtaggtgggaactgtcaatctattcaaaaaagttatgtagaagaattacaaaatatacccttcgccaggttcgtcatagcattttacttaaaacggacaaaaatgggatcagaatgttaaattcacccctccacctcccgctccacattgtatacctgtcctaaagaacattctgctacataactgctctccagttaccaaggtcaggaagctaacattgaaactgctcttctgtacagattttatagtgttcgctaatggtcacgcttaatgtccttgtatgttaaaaattcctagctaatgaccaggctcacatgttgcattcagttggcaggtgtgaaactcacagggcagttattttgcagttattttccctcaaccagggttggttgcctcactttttttttttctcttttttttaagacggagtctcactctatcgcccaggctggagtgccatggtgcgatattggctctctgcaacctctgcctccagggttcaagtgattctcctgtctcagcctcaccagtagctgagattacaggcacccaccaccacacccagctaatttttgtatttttagtagagacagggtttcactatgttggccaggctggtctcgaacttacctcaagtgatctgcctgcctcaccttcccaaagtgctgggattacaggcgtgagccactgcgcctggcctaaaagatatatatatatatatatatttttttttaaagctacttacgtctctccatttgcccgcaaggaaattccttgtggacagaagacaggcagagttcaaagtcatccctgtgctcacatgagaccaatgcatatctgatggcttcctccgtcctattgtttgacccagactaggcatggatggctcttcctgtaaattgtgcattcagtaaaaggctaatcaaactcaaaagaatgcagccgtttgtctcctgtctatgacctggaagccccctcccctgcttcgagttgtcttgcctttccggaccgaaccaatgtacagcttacacatattgaggacgtctcatgtctccataaaacgtataaaaccaagctgtgccccgaatacctcctgaggccgtgtcacacgcacacccttaactttggcaaaataagctttctaaattgattgacacctatctcagataccttttggtttacacagttaataaacatcttgtgtagagacattttgtagatatcccgattcctatcagatgttcacccactagtttgaacatctattgatatttcttgcatgaaacgatgctgtggtggttgccaaataggattttccaaccttctacattattagttcggccagtcatggcggcccacacctgtaatcctagcactttgggaagccaaggtgggaggattccttgaacccaggagttcaaaaccagcctaggcaacaaagtgataccccagtctctacagaaaaatttaaaaattagccaagcatgatggcgcacacctgtagtcctagctacttgggaggctgagatgggaggatcacttgagcctaggaggttgaggctgcagtgagccgtgttcacaccactgcactccagcctgggtgacagagcgagaccctgtctgaaaacaaaacacatttattagttcactttctaaagattagaagagcttttctttcccactgcctgagttatatcagaataaacttgtattttaattttattcagtggtttgtgatctatgactatcatcttgatgctcacattttctagatttagctagtgacttctgcatctatgtgacttgccctgctgttgggacactttctgccacacaaaaatattccagatcttgtaccttctcttgtatgaccctgggatcagccatttctccaggtagccctggttccttttagtggagaatgggatgtggcggccagggtttggatgttaggggtgcttctcactattggggtgtcgctgctcttaagctctcccagtggattaagctaggaaatacatgtttgcatacacaccactttttaaaaaaaatttttttttttttgagacggagtctcgctctgtcgcccaagctggagtacagtggcccaatctcgctcactgcaagttccgcctccagggttcatgccattctcctgcctcagcctcctgagtagctgggactacaggctcccggcaccacgcccagctaactttttgtatttttagtggagatggggtttcacagtgttagccaggatggtctccatctcctgacctcgtgatccgcccgcctcggcctcccaaagtgctgggattacaggagtgagccaccacacccggccacacaacacttaacttctatgtaaacaaccatgtgttcacacaattttatctccaattccattgcgacaccgacaccacaagggtcattctaacctccgatctatgtttgtacatccatcctctgacggtgcaaaccctgattctacattttgaaatcatcccgactttatggtcaggaaagcgaggcccagaggggctgcttccgggcagcaggatgaggatctgtctccagctgtccgaccttagagggcttcgagaggacagagccagcctgcggggcactcacctttgtgcacctgcccgggcgaggcgggctcagtgcgcacgcgcccaggggcctttaaagcgcccgccgcgcgtctcttcccctagctgcaagggtcggtgcttggcctcgcccgcaacaccctcctggaggatgctggtgagaggcagggaccaggggtccggctcccggctcgggcctatcgttaggcgctgggcccccaggccctctcctttgcagagtctcgctgcctccctcgacgcagagccttcaagcgccgcagtccccgacggcttccccgcgggccccactgtctccccaagacgcctggcgaggccgccggggctggaggaggcgctgagcgcgctggggctgcagggagaacgcgagtacgccggggacatcttcgccgaagtcatggtgagcctacccgccgcctgccctggtgagggcgacgccggcccaccgcccggcacccactcaacaccactctgaactcccaccgctccagcctctcctccctatcactggcagccggcgttccttccctgcaacgtccaggcttttgttttgttttcacacagcgccgtttctaccgctgggaatgccctttcccaccgtccccgggctctttgcagtccctcctggggtgtttatggtcccctgtacttgtcctccacatttatttgtttaacaaatatttaatggtttagtagcaaatgttttaggtgctggagatgctgcaatgctggcctcgttctggggagatgagcaaacacatagaacaactagggaaaggccacgcaaaccaaaacattggcctcgccagccttcagatatccctatgagagggttgctgcggaaggaagactgaagggaggagtttgttgaacgtcttgcctgcgactctcctgggccaggatctctgttaggacctgagagacacttgtgttgtgggcagaagtccctgccctcgtgggactggcagcctagcggccaaatagacaaagcacacagggagacatcttcacagtgaaaatgctgagacaaagagatagtgatcgggtggtaggagtatagacaaagtcatggagatgttagctgaatgacggaaaggtcgagtaaggggctggggaaggaccctctctgtagaggaaacaggaagtgcaaagggcctggggtaggaatgggcttggtatagtctaggagctaaaaagaaggcagctgtggctgacgcatgggttgtggggagagagagggaagaggtgatgctggagcagagcctgaaagaaatcagagtt

SEQ ID NO: 2038 - DNA, 6000 bp, Homo sapiens
gctaatttacttcagatctcaatcatagcctgagagaagccttcccccatcatcctctctaaaacagcacccacacctctcactatcccctgctttcttttcctttttctttttttgtttttgtttgtttgtttgtttgtttgttttttgagatggagttttgctctgtcgcccaggttggagtgcaatgaagcgatcttggctcaaagcaacctcctccattggggttcaagtgattctcctgcctcagcctcccaagtagctgggattacaggtgtgtaccaccacacccagataattttgggtttttaaaattttttttttaagacggaatcctgctctgtcacccaggctgtagtgcagtggcgtgatctcggctcacttcctgcaacctctgcctactgcattcaagcaattctcctgcctcagcctcccgagtagctgggactacaggtgcgcaccaccacaccaagataatttttgtatttttagtagagacagggtttcaccatgttggccaggctggtctcaaactcgtgaccttgtgatccgcctgtctcagcctcccaaagtgctgggattacaggcgtgaaccacagtgcctgactaatttttgtatttttagtagagatgggtttcaccatgttggccaggctggtctcaagctcctgacctcaggtgatccgcccacctcggcctcccaaagtgctgggattataggcatgagccactgtgcctggcccttgctttatttttcttcactgcacatcttgcaacatgataagtatttatgtgagtgttatttctcttcccctttgaatggaaactccagtaggatgtggacttgtcttgctcattgtagaaaccccaccccagcaccacctgtccatcttttcttttcttttttttttagagatagggtctcactctgtcatccagactggaatgcattggcaccatcatagcttgttgcagcctcaaactcctgggctcaagcgatcctcctgcctcagtctccccaagtagccaagactatgtgtgcaagaacacctggctaattaaaaaaattttttggaagacacagggtctggctatgttgccaggctggtcttaaacccctagcctcaagcaaccctccaacctgggcctcctaaagtgtgggattataggtgcgacccactgcacccagccccgaatctttttctcttttttggggggggaggggggatggtctctgctgtcacccaggctggagtgcagtggcataatcctggctcactgcaacctccacctcccaggttcaagagattatcctgcctcagcctcccaagtaactgggactacaggtgcacaccaccatgcctggctaattttttttgtatttttagtagagatggggttttaaaatgttggcaaggctagtctcgcgctcctgacctcaaatgatccacccacccgggcctcccaaagtgctgggattacagatgtgagccaccaagcccggcccccgtctcattttttaaaatgcatttcaaagtaaattgcaggcacatagcaggtgctcagcaaatagttcatatagttcatgagtgaatgaattcacaggttcaagtaggccatcaaccagctgggtccactgagccctagggtgggcaggggccccccaacatatctaaacaagtgaacagatctttgcacatatttgcacccctcaaaaatgccacaataggccgagcgtggtggctcacacctgtaatcccagaactttgggaggccgaggcaggcacatcacctgaggtcaggagtttgagaccagcctggccaacatggtgaaaccccatttctactatgaatacaaaaattagccaggcattacggtagttcctgcagtcccagctactcaggaggctgaggcaggagaatctcttgtacctgggagttggagtttgcagtgagcccggattgcgccactgcactccagcctgggtgacagcgagagaccatctccccaaccaaaaagaaaaaaagagatcgggctgggtgcagtggatcacacagtgggtcacgcagtgggtcacgcctataatcccatactttaggaggcccaggtggaatgattggccaggcttacctcgtgatccactcgcctcggcctcccaaagtgctgggattacaggcttgagcagccacgtctggcccctaaaacagttttttaaaattagccaggtgtgcttgcacacatagtcttggctactcggggaggctgaggcaggagggtcacataagcccaggagtttgaggcttcagcaagctatgatggcgccactgcattccagtctggatgacagagcaagaagacagaatgcttgaactgggaagtggagtttgcagtctgctaagatacagccaccgcactccagcctgggcgacagagtgagactctgtctcaagaaaaaaaaaatgccacaataaggaattgtcccctttatggcaggccttttacagggcggtgaagatgcagcagttcccaaaatatacccagtcccttcccccgcagagcccacaggccagtgggaggagacagatgtgagacacataatcatgccaataaatatataatgacaacccaggcaaagtgttgccaaggaaagggacagcatgttgggagtgaacaatatgaggacctagattgggctgggggggccaggcagtgatgcgatggagaagggatgatagagttggggacaaagtgctgcaggaggttgctccaagtcctctgagggggctctttgggtgagaaagcgagagaagcctggggaggcgaggggagggtcacagaaacataaggagtttagggttctgctgaaaggtttggggcagaggtgggaaagggtttggtttgagattgggaagaagccttctgactgttgagtgggagacaggttggaaggagcaacagaagccagcagcccatggccgggcacagtgacccacgcctgtaatcccagccctttgggaggccgaggcgggcagatcacgagttcaggagttccagaccagcctggccaacatggtgaaaccccgtctctaccaaaaatacaaaaattaacctggcatggtggtgcacacctgtaatcccagcaactcaggaagctgaggtgggaggatcacttgaacccaggagatggaggttgcagtgagccgagatcgagccattgcactccagcctgggcaacaaagcaagactgggtctcaaaaaaaaaaaaaaaaaaaaagacacagcccagggagacaacggtgaagggccctaagtggccagtgacaaggagctgggagcttgccctgagggcagcaggaggccatgggcaagcagagaagggacagggtaggatttgactttcagaaacagtcctctggttgctaaatgggagaaaggagtgacagtagaggcaggagaaggcaggatcagacgggggtgctgggaaggggcaggtagaagagacatcaggaggccaaacagataggactttatgatgcaccgtaggtataccagtacccaaacacaggtggccaagagcagagggatagacgcccagcctcctcctcacagacatccaggcatgcagagccctccacgtgccaaacacacagggccgaggaatggaagtgcagcagagccgatacgcaggcagcagatctgcaataaccaggacacacagtcccaccagaaggagagagcagtggaatgatcagggctcactgcagcctcgatctcttggactcaagcgttcctctcactccagcctccctagtagctgggaccacaggcacacgccatgatacctggttaagttttaatttttaaacttcttgtagagatgggggtctcagtgcattgaccagtctggtctcgaactcctgggctcaagcgatcctcccaccttggcctcccaaagtgctgggattacaggagtgagttactgtgcccggccaacaactattcttattcccattttacagatggacaaactgaggctcaggaggccagtcacttgcctgtagcccacagttagtggtagcactgggattccaacttgggtccccttcatgtcgcctgtatttggtgtcccatttaggcgtccatgcaggttttggcgtgtctgaagatctgtgtctccccaagtaagtgtcccccatggatgcccacccagccgtgtcctcctgtctctgaggtttctccaggaatcgagctcctggcctggcttgtctgagtgtgtctgtgggccagtagcatgcccctgcccgtctgggtccctctgcgtgtctctgcttgtcctagcctgtgtgtgtcagtgacgtctaagagtgtgtgtgcgtgcgtgcgtgcgtgcgtgtgtgtgtgtgtgtgtgtgtccttgtccgaggagccgagagagtgagggggaatgaagggccaaggaggcctggctggggctgggctgggggtggaggcggggagaggggcgtcacggcctgagctgagaggggagtggagttctggaggaatgtttaccagacacagagcccagagggacagcgcccagagcccggatagagagacacggcctcactggctcaggacagggggcacagccaccagggtccccttccccctcctcagctccctccctggcccctttaagaaagagctgatcctctcctctcttgagttaacccctgattgtccaggtggcccctgggctctggccctggtgggcggaggcaaagggggagccaggggcggagaaagggttgcccaagtctgggagtgagggaaggaggcaggggtgctgagaaggcggctgctgggcagagccggtggcaagggcctcccctgccgctgtgccaggcaggcagtgccaaatccggggagcctggagctggggggagggccggggacagcccggccctgccccctcccccgctgggagcccaacaacttctgaggaaagtttggcacccatggcgtggcggtgccccaggatgggcagggtcccgctggcctggtgcttggcgctgtgcggctgggcgtgcatggcccccaggggtgagtgatgggggctccttggggcagggatcccctcggaggggctggggcaggggtaggaggtgggggatgatggcaggtgtggggggcctgggctggcttagggagtttccttgggaccacagaaaagggacttcaagggagggagacacagactcagagacaccaagtgcggcagagggagagaaagactgagagaggaactgaagggcaggggggacagaagagaggacccggagagacagacagacaaggagaagctgagggcaggggtgggggctggacctgagaagggggccatggggagaggggctgagctgagggtcgccaggaaggaagaaatctttccgaaggggcaccgagtcaggcagtgggatgaggagggctctggagccctgggggaaaacgcttctccctgccaacaccacccccctgacccgccacttgtccctaccccaccagtccactccatctctggggaggaggctctcactttgtctctctgtctctgcctccagctctgctatctctgtgggtctctgtttctctctctttcacagtctctgcctttatctctccctgctctctgagtctctctctctcttctcagcctccctctgtgactgtatcccccctccgcccccaccttttcttctctcttgagggctgtttcttcattttttctgtcttgccttgtatctgtgctcctctctgtctcatctcccctgcctttctctggcttctccctccgccaccacccttatctccccccaccaccacccttatctctctcccccaacccctgattcttcccctccatccaccagcaccagcgcgacctgttaagtctctagagacctaagagaggacggagggggcaggggctggccctgccaggcagtgcagggcgtggg

SEQ ID NO: 2039 - DNA, 6000 bp, Homo sapiens
ggaccttgtaaccagccgacccacagccacccccttggtcacagctcaccctctccagcccatgccctgaccttccttctggctcatgtcctcacctggtacagctccacgtgctgctccacttttaacttgagcctcagcagacgcagctctgcccgggagagcaacacgggttcaggtaccgcttctcggagctctgatgtgttgaagaacatatatatgctgtgtgtactctgcttgaacttgtcatagatttctagcagggagaaatgaagggaggcgatcaggggtttggcagaggtgaggggagctggtgctcccaactctaggagttttggagctgacagctctggggtggagtcagtctctgataccttttatttatttatttatttatttatttatttatttatttatttaaatgaatttttttttttttttgagacggagactcgctctgtcacccaggcttggagtgcagtggcgcaatctctgctcactgcaacctccgcctccagggttcaagcaattctcctgcctcagcctcccgagcagctgggactaaaggctcatgccaccatgcccagctaatttttgtatttttagtagagatggggtttcaccatgttggccaggatggtctcgatctcctgacctcgtgatccacccgcctcggcctcccaaagtgctgggattacaggtgtgagccaccacgcccagccctgactgtgatactttttagctgtgtgaccttgaggaagtggtttctccccctaggtttgtttcctcctctgtaaaataggtcctaaccacattcctctctcatgtagcatcatctctcaagtcgactaaggctggcaccaaggggaaccactctgtttgctctggccttccttgccccaaatgcaagagcccctaaaatgcagagtaaggatcaaaggcacaggctttggactcagatagtgcctctgctgcctcttggctgtgtgaccatgggcagttaacaccctctttctgaatgtcagtttcctgttattctttgaaaaacagcaataacattaagctccctgcattcccacacagactctcctaatttaagcgctgtgtaaccttgggcaagtgaattcctctctctgagccaggtgtaagacaagacagagtgactctagaacccattccagtattatagtgggaaattagatgacccaggtcaagccatgtggcaccaattctgcatacactggtcactcaatcatgtatacgtctaagagtgctggctgggcgcagtggctcacgcctgtaatcccagcactttgggaggccgaggtggattgattacttgaggtcgggagttcgagaccagcctggccaacatggtgaaaccccgtttctactaaaaatacaaaaattggccaggcatggtgccggacggctctaatcccagctacttgggaggttgaggcatgagaatcgcttgaacctgagaggcagaggttatagtgtgccgagattgcgccactgcactccagcctgggtgacagagtaagactctgtctcaaaaacaacaacaacaaaaaaccacaaaacagcgctatttaccagatgctatctaaagcactttacaaagatgaagacatttaaacctcacaaccttatactattattatacccgtttaatagatgagaaactgaggcaccgagattaagtaatttgccccaaggtcacatagctgcagactgggattcaaactcaagctgtctcattccagagactgtgctttttttttttcttcccccaagagacagggtctcactctgtcccccagacggaagtgcagtagcacaaccatggctcacggcaggctggaactcctgggctcaagggatcctcacgcctcagcctcccaatatgttgagatcacaggcatgagccaccacacccacccagctagagactgtgctcttaacccctaagtgattcttctacttatttttattattagttttccacccttaactcccttccccagctggttagggaaagtgaagttcattctgggtaggaatggctgtagtggggagaaaaggaattaaggtgttttcttttctttttttttttttttttttgagatggagtttctgtcgcccaggctggagtgcagtggcgcgatcttggctcatagcaacctctgcctcccaggttcaagcgattctcctgcctcagcctcccaagtagctgggattacaggcgccgcccgccaccccgcccagctaatttttgtatttttagtagagaccgggtttcaccatgttggccaggctggtctccaactcctgacctcaggtggtccacccaccttggcctcccaaagtgctgggattacaggcgtgagccaccgcgcccagccaaggtattttctagtttaggaaaagtttggggatggggatgagggaacaggccatgaactgctggatcaactggggcaactgcttccagcctcccatagtgggggtgtgaaaagagactggtgagaaaggcagaggaaacccctcccctacggcccccttcgatcctcctcctcctccccagtctccctccccacccagccccagtaagccctattcttggcccggaggttactcagcaaaccccaaaggaaaggcagagccttggctggggaagacagatagggaggaagacagagaggagggagaggaagggttggagggtgatgcagagagggagaggcggggagatgtcagagacggagacgaggcaacaggaccgtggaggagaaaaatagaaagggagagaaaatagtcggagagacaaaaaccaggagacccatgcgtggacagaaagactaacggagacgaaaagaaagaggcagatggggagacacgtgcgagacgagacacatgtgcatttgttggggagaagaggattggaggtgtcagtgttaaaggaacctctacaacgaaggtgaagccacggaagataaggtaaggctgagacttgggtgcggagtgcgcgtcattgggctggagctgtaaactggcgcagaaatgggcagggaacccgcaagcccacaccgcccaagagtcagtgaaacctgagggatcttccccaaggctctgaaccacgcgggacgcctgggtcctcgcatggatgccgacggggccggctgagtgggagccccgcccgtagctggggtgaggagggcgggaggcgccgcagccaggagggcggggaccagacctgccccgtctcgccccgggctccgcgagcgatccccgcctccgccgggggcatgggaaggaaagggaagggagggggatgaggccgccggacgctggggtttccccagccaccctgagaggaactgggactttggggtccagactgccagcgtttagcgcagcggggtcctcctgccccttggtggaagcgcaggctcctccccccgcgcgtggcacccacgtggggctttctcactcctcccagcttggttttctcacctcggtcttgtagagtcaccccccacccagcacttcccctgcggctggactccgctcagcccattcccctgcatcctgcggggaatgcagcgtggatggcgctgggtatctctcctcctccccgctcacaccacctttcccacgcctgtctcccctctcggtaaagcccttcccatgacccaggactctaggtcttctggaagctcgattcctccgctgggctccccactctgtccctcacgtccctgtgtgaaacaccgaggacacctctgcatcccgggcgccctcccgagtctccgctcctctcccgcttgcctcctccttccaataacctcccgtccctttctccccacatttatcacacgcacctctgtttctctttctacgactctcccccacccccgcatcccgcgtgttcctggcagcctctggaagtgggtccgctctcactttcctggcaccctctggggttgccttcatctagcttttctgtccttcttgaatctttccacctcaggacccccaagctctgggtcaactttctccagcgcctctcctttcccaaatgctggggtcttcgcttctcccacaccaggctcccttctctgcacctggcaccccacgacccccccccccattcaacgcgtcctggaagagggagccttctaccctccccctattgcttgtctccctctaggggactgcccccacgaccccgcatgtttctgtcgcactctagaagcggtccacttcgctatctcctcctctccaagaccagacacctgggtggtagggggctcagtgccatcctctttcggacacccccctcccaccatcacacgttccctttgccccggggtgtcctcttcctccagccagtttcttctgccagtcacttcctacccgtggccccggcactccggcgccccctgggggcccccctcccggctcccctgcccctccgagctcaccgttgtgggtttccaccattagcacgcgggtgacctccttggcgtagtagtcggcctcaggctcgggctccggttctgcactctccccggccacccggtcgcgggtgctgttgtacagggcgagcacggcctcgggcagcgggccgggcggcacctccccctggctcggggggctggcgagccgcagcttggacaggatctggccgcggatggcctcgatgcgcttccgcttcaccagctccatgtcgatagtcttgcaggtggatagtcccgcggccggccggccaggcgtcagcaccagtagccacagcagcggtagcagcagcggcagcagccgcagcccggagggcggcatgggggaggcggcgccccccggcactgccgagagcgcgaacagggctggtgtggtggggaggccccgcccctgcaggggctgggggtctcccggcaaaaggtaggagggcctcgagggaaagctgaggtcctcagggagaagggcgcagtggtggaggggaggcttggaccgggggtgtctcagtatcccacggaaataacctagatgggcgcgatctggtaccagaaggtgggtggtcttgaataggggatctgtggcaggtcggagagagatccgtctcctggaggagaaagggtctaggatgcgcgggggctcaggagacaggccggggatgaaggcggcgtgcagggggtgcgcccgaggtctggggaaaagtctttgcgggaggccgggtcggcgactcccgagggctggtccggaatgggggcgcctgagggacgccgtgtagggggcagggagggagcaagcgtccccggcggcaaagggaggcggtctggggtccccaagtcctgcctcctcgcggggcagcgtcgcgccaagaggtccccgcgcctccggctcccagcggcaacggaaaagtctcaaaagtttttttcctcttctcccgaccagctcgtccctcctcccgctcctcctccccctcctccccgcagtggcgggggcggcggcggctcgtctcagactctggggcctcaggctgctcctcggcgactccttcctccgctccgggccgaggccggccccgcgggcggctcagagccgggggggtgccccggacggggcgtcccccctgcccccggccggggccctcgctgtctggctgctccgcggagggaggtgggagggagatggcccagggcgcgaagggcggcggcggcggggaccggctgggtcggcagggggttttgaagccgcccccggccccacccaggaagcgcacggggcgggagcgggggcggcccccagggggagggcatgggggggctgggccaccgtcctcatctcgcgtgggcgggctccgaggggggtcccttcagccctgggggaaagggggcgggcaccccggctccgccccgcaaacagggtgctgcctcctggcggccaagcgccaccaaagcgggtgatccagatgcgctgtggctttgcgggcggtgt

SEQ ID NO: 2040 - DNA, 6000 bp, Homo sapiens
ttatccagttttggatattatgttaagagtaacagaaaacaaatgaagacaatgaggaatgcattattactcagctcattttatagatggggagaccaaggcagagaaagctaacttgcccaaggttgcagaggcaggaagaggtagtgccaggatttgaacccagatacttggttccagagtccatgcttcgtaacccctaccagtagatgccacagagaaacagtcctatagccacagcggcatccccttcccgatggctgcctcccacccctctatgtcccggctctcactgcaggggcggcatggaagctcctgtcaggcgtgcgggagggccaaacgcaagtggacaccccgcagataggggacatggcttactggtcccaccccatcgacctgcacttcgccaccaaaggtcttcaaggtgggtatcacacctggacccgggtccaggctgaggggagggggccagtagcctctgaggtccctggggctgggaacaccaagacctgtccctgctccccataccacgtaggtcccttttgcagccaagtctggccctggagaggctgagctaaggccttcccaggcctgctcaataggcgatcccaagtttgtatgattagggcagaggccagggtggagcaggaggtgggaaggtggggggtcagggtgggaggggaggtggcattcaagtaaagagacaaaacgagagtctccaataaagaggaagccgggaggcagggtctgagagaggcaagggctgtttctccaggaagggctcctcggcttgaaagtagagctgctgctcaaaggggaaatcagtactgggggaggagcggcatcagaaagcctttctagtagaaaatgtgggttcctggagatgagttgattctgagaaattgcctaggtaaatgtgccatatatttcaccaatataaagaacgtctacctggtacctgccctgtgtccagcctgtgttgggtgatgccagggagacattgaggatcaaggcagtgtcccttagccttgtcctcacagggttcaccgtcctatggggggacacacctctctccagacagtggcacctcagagtgggcaggactaagataggtgatttggagaggctgtgggagcccagaggaagtggctgactctgtcagggaggtcagagagggcttcctggaggagggggcttctgaactttgctgtgaagggccagcggagctaataaggcagagggatagaagaaggttctaggcagagggagctacgtggaagactcaaaggggaaagtgagccaagggcatctagtggattgagggagagcgggacggcagaggggaaaggcagaaggggacaggccatgcagggccttgagtgccaggctgaggagctgaggccatctcctgaaggcacttgggagccagagcaggtaatggacaagtgagatttcacctttttttttttggagacagagtttcactctgttgcccaggctggagtgtagtggcaagatctcagctcactgcaacctctgcctcccaggttcaagcaattctcctgcctcagcctcacgagtagctgggactacagccacgtgccaccacatctggctaatttttgccttttttttttttaatagagatggcgtttcaccaaggtggtcaggctggtctcgaactcctgacctcaggtgatccacctgcctcggcctcccaaagtgctgggattacaggcatgagccaccgcgcctggctgagatttcacttttaaataatctttctgtcttttaagctggagctggggaaaaaaaaaatctttccggtgctgtgtgggtgaggtgggcagctctaacctttcagctcttggggcctccagtcccccagtggtggcaccagccttgctttctcttttctcaagcccccattttgtccatcaggaaatcttaaactgcctctacttttgaaatacatcctaaatcccacttcttacccttttctcgcccagcaccttgatctgtccaagttcttctctcacatggactatgacaagaatcttgtctctggagtccccttccccaacccccctggtctgcaccccacatgcagctgggaccctgtgaacacctaagtcaggtcccatctctgctctgctcagaaccctccaatggtccccatctcactcagggtgaaagccatagtcttagcatgcatcacaaggctctccacaaccaggctggcacctccttcccgtctccccacctcattctgctctagccatgctgtccccaccaggcacactccgtctgggctccagccatactgtccccaccagacagtccccccccagggccttggcacttgctgttccctctggctaggagcactcttcctctagatggccacatggcctactcccttccttccttttagcatttgctcaaatgtcaccttcttaatgaagcttccttgatccccttcttgctaaagcggtatccccaccctcaccctacccagctctgttttccctcacagcaattaccaccatctgatctaccctataatttgcttatttactacattcgttgtctaggatatcagcttcacgggggcaggaatttttgtctgccatccatgttcatgtctgccgtgtccccagctagctagaacagagtctagcacaggagaagggatcagcatgagatgagatggggctggatctccaagggctttgactaccagactgaggagctgaactgtgttctgaggacatgggcaaagctatggaaggagagaaagatgcttccagatgccaggtggaaggtggattagagaggggcaagaaagaaggccctgggcccaaagagagcagggcagggacatgagggaaggcaggaggtgtccctgacaaggcccatgatggttacctggggactggaggagcaatgggctgccctgacatggggtcatggaggaggataacacagagaggaaattcagcagaggtctgattagaagggccttgaatgttgaagaggttggactttatactgagggcactggggagctatggaaggatccttagcaggggagtaacatggatttggaaagatcactttggctgctgtgtggggatagataagacggtgggagcctagaaaggaggctgggttggaaactctgggacagaaacccagagaggaaaagactgggcctggggtctccagtgagtatcagggagtggggaatcagcaggagtctggtccccacccatccctcctttcccctctctctcctttcctgcaggctggccccggctccatttccaggtgtggtcccaggacagctttggccgctgccagcttgcaggctatggattttgccatgtgcccagtagcccgggcacccaccagctggcctgccccacgtggcggcccctgggcagttggcgagaacagttggcacgggctttcgtgggtggtgggccgcagctgctgcatggggacaccatctacagtggggccgaccgctatcgcctgcacacagctgctggtggcaccgtgcacctggagatcggcctgctgctccgcaacttcgaccgctacggcgtggagtgctgagggactctgcctccaacgtcaccaccatccacaccccggacacccagtgatgggggaggatggcacagtggtcaagagcacagactctagagactgtcagagctgaccccagctaaggcatggcaccgcttctgtcctttctaggacctcggggtccctctgggcccagtttccctatctgtaaattggggacagtaaatgtatggggtcgcagggtgttgagtgacaggaggctgcttagccacatgggaggtgctcagtaaaggagagcaattcttacaggtgtctgcctcctgacccttccatccttcaggtgtcctgttgccccctcctcccactgacaccctccggaggcccccatgttgacagaccctcttctcctaccttgtttcccagcctgactctccttccgttctgggtccccctcctctggtcggctcccctgtgtctcatcccccggattaagccttctccgcctggtcctctttctctggtgacccacaccgcccgcaaagccacagcgcatctggatcacccgctttggtggcgcttggccgccaggaggcagcaccctgtttgcggggcggagccggggtgcccgccccctttcccccagggctgaagggacccccctcggagcccgcccacgcgagatgaggacggtggcccagcccccccatgccctccccctgggggccgcccccgctcccgccccgtgcgcttcctgggtggggccgggggcggcttcaaaaccccctgccgacccagccggtccccgccgccgccgcccttcgcgccctgggccatctccctcccacctccctccgcggagcagccagacagcgagggccccggccgggggcaggggggacgccccgtccggggcacccccccggctctgagccgcccgcggggccggcctcggcccggagcggaggaaggagtcgccgaggagcagcctgaggccccagagtctgagacgagccgccgccgcccccgccactgcggggaggagggggaggaggagcgggaggagggacgagctggtcgggagaagaggaaaaaaacttttgagacttttccgttgccgctgggagccggaggcgcggggacctcttggcgcgacgctgccccgcgaggaggcaggacttggggaccccagaccgcctccctttgccgccggggacgcttgctccctccctgccccctacacggcgtccctcaggcgcccccattccggaccagccctcgggagtcgccgacccggcctcccgcaaagacttttccccagacctcgggcgcaccccctgcacgccgccttcatccccggcctgtctcctgagcccccgcgcatcctagaccctttctcctccaggagacggatctctctccgacctgccacagatcccctattcaagaccacccaccttctggtaccagatcgcgcccatctaggttatttccgtgggatactgagacacccccggtccaagcctcccctccaccactgcgcccttctccctgaggacctcagctttccctcgaggccctcctaccttttgccgggagacccccagcccctgcaggggcggggcctccccaccacaccagccctgttcgcgctctcggcagtgccggggggcgccgcctcccccatgccgccctccgggctgcggctgctgccgctgctgctaccgctgctgtggctactggtgctgacgcctggccggccggccgcgggactatccacctgcaagactatcgacatggagctggtgaagcggaagcgcatcgaggccatccgcggccagatcctgtccaagctgcggctcgccagccccccgagccagggggaggtgccgcccggcccgctgcccgaggccgtgctcgccctgtacaacagcacccgcgaccgggtggccggggagagtgcagaaccggagcccgagcctgaggccgactactacgccaaggaggtcacccgcgtgctaatggtggaaacccacaacggtgagctcggaggggcaggggagccgggaggggggcccccagggggcgccggagtgccggggccacgggtaggaagtgactggcagaagaaactggctggaggaagaggacaccccggggcaaagggaacgtgtgatggtgggaggggggtgtccgaaagaggatggcactgagccccctaccacccaggtgtctggtcttggagaggaggagatagcgaagtggaccgcttctagagtgcgacagaaacatgcggggtcgtgggggcagtcccctagagggagacaagcaatagggggagggtagaaggctccctcttccaggacgcgttgaatgggggggggggtcgtggggtgccaggtgcagaga

SEQ ID NO: 2041 - DNA, 6000 bp, Homo sapiens
acttacagagaatgagggccaggcacagggtcacaggccagggcaggccacagactggctcctcagcccaggcagggagaggccagggagccaagagtttgaacccagtgccactcctgactgcctggtgatgctggcaacccgcctgccctcccagagcctcagccatccctcctgtaaaatggggctaaggagagaacctacttctagggttctgtgaatgattacacaagaaaaagcgccaggtgctgggcctggctgaggctggggtgcaaaaatggaccgggaaggctgcgggaggaggggacgcctgcactgcttctggaaggagctgtctggacagcggtcctccagtgcctggaacaaacatccaaaatccagagagttcacagggccagagtacaaagtgcgtatgcgggagggggacaagagatggcgctgcagaggtgagaagggcctcccaggggtcttaccatcccagggagtctcattctcctctcccaggatatcctcacccaccccaaccaggtatgtcctctctccttcccaggggcttcttcactttcccgcatcccccctctccccaggatgtatcagcccctgtcaggggctctctctctccctccccacccaggagagtcctcaccctcttcccaggagtgctggaactgcaggggccagggctggggaaatgtgtcaccatccccagtccctgacccacccaccctgtctctccacaggccctgggtgccaggccctgtggatgcacaaggtcccagcatcattgatggtgagcctgggggaagacgcccacttccaatgcccgcacaatagcagcaacaacgccaacgtcacctggtggcgcgtcctccatggcaactacacgtggccccctgagttcttgggcccgggcgaggaccccaatggtacgctgatcatccagaatgtgaacaagagccatgggggcatatacgtgtgccgggtccaggagggcaacgagtcataccagcagtcctgcggcacctacctccgcgtgcgccgtgagtggcccagccctggcccctactcccactgtcccgctggggacactcggtttatctttgaagtggggatagagccagtaccttcaatgtgggtttcaaaccggcttggacagagggacggacattctcctctgcagagtggggtctctggggggtctggggccttgcaggaggtgggcggggccaggaggctagggagggcaagaggggccagggctctgagccatactacctccttgcagagccgccccccaggcccttcctggacatgggggagggcaccaagaaccgaatcatcacagccgaggggatcatcctcctgttctgcgcggtggtgcctgggacgctgctgctgttcagggtgagccccctcggacctctgagtcagccgggcgagggcctgggccgagggacccccaatacccaggtagccctctagagcctgaggttccccatccaaaacttgggagaatgaaagcacccaccatataggggctgtgggagttaaatgaatgaatataaagaagggacttgaactggcgctgagcccagggggtgtcttcaatttagtttccccttctgggctgtcctcacgtccacctccccccaagaagagtctcattcttctccctaagagtgtcctcactcccctcctgccctcacccaggagtgtggttaccctccaggtgtagccaagaccagggaaggtggggcctggtcctcccagaatctctgatctgtaccagcctctccttaggcactacagaaagtgtgactgttattgttattattcatggagaatagtaagggagtggagactcaagaagacgctagcttgggaggccgaggcaagaggatcacttgaggccacaagtttgagaccagcctgggcaacacagcaagaccctatctctacacacacaaagtcttaaaaaaaaattagccaggcatggtggcacacacctatagtcccagctactcaggaggctgaggtgggaggattgcttgagcccaggagttcaaggctgcagtgaaatatgatgttgccacagcacttcagcctgggcaactgagggagaagaaagagagagagagagaaagagagagagagagagagagagagagagagggcgagagggagggagggaaggaagggaagggaagggaaggaaggaaggaaggaaggaaggaaggaaggaaggaaggaaggagaacactggttgtagactcagagagaactgttacataaccagtatgtggccttggggacatctcttaccctttctggaaaagtacttcctggcatccaggagggtctgaaagatattcacctccccctgctcactgaggcacccaccccacccacccctacagaaacgatggcagaacgagaagctcgggttggatgccggggatgaatatgaagatgaaaacctttatgaagtgagtgaagggtggggatggggtaggggcagttgtgttaggggtgggggtgttccctctgggggtggctgggggcagggaccccaggtgtcagggtgctgatgttcgctgcctcatttccatcccagggcctgaacctggacgactgctccatgtatgaggacatctcccggggcctccagggcacctaccaggatgtgggcagcctcaacataggagatgtccagctggagaagccgtgacacccctactcctgccaggctgcccccgcctgctgtgcacccagctccagtgtctcagctcacttccctgggacattctcctttcagcccttctgggggcttccttagtcatattcccccagtggggggtgggagggtaacctcactcttctccaggccaggcctccttggactcccctgggggtgtcccactcttcttccctctaaactgccccacctcctaacctaatccccccgccccgctgcctttcccaggctcccctcaccccagcgggtaatgagcccttaatcgctgcctctaggggagctgattgtagcagcctcgttagtgtcaccccctcctccctgatctgtcagggccacttagtgataataaattcttcccaactgcagaccttggcaggagtcgtggatcttacggaaaccgcctctcccacatgtccctcagacccaggagtcccagcccaagccactccctgcccactccccacacctgggaccaggtagccagtctgggctgccctcctgggagaacaagatgtctcttgggaaggtccccagaccaactgaaggactggtttggccctctttgcagggcctcaccctagggtcatatccttaagcaagaagggggacaagatcaagatggctgtggctaccaaattacttacactttttttttttttttttttttttgagacagagtctcactctgttgcccaggttggagtgctcactgcaacctctgcctcctgggttcaagcgattctcctgcctcagcctcccaagtagctgggattacaggcgcctgccaccatgcccagctaatttttgtatttttagtagaggcggggtttcaccatgttggccagactggtcttgaacctctgacctcaggtgatccacctaccttggcctcccaaagtgctgggattacaggcgcctgccaccacgcccggccgctttttttttttttttttttttttgaggcagagtctgactctgtcgcccaggctggagtgcagtggcgcaatctcagcccacttcaacctccacctcaagcgattcttgtacctcaggctcccgagtagctgggatgacaggcatgtgctaccacacccagctaatttttgttttagtagagacagggtttcgccatgttggccgggctggtctcgaactcctgacctcaagtgatccaccatgcttcggcctcccaaagtgctgggattacaggcatgagccactttatgcgtatttaagccttggaaacacagggactatcttgtggattggggctagtacagaattcagactgcagccttttcccgatgcgttgacttacagaaggggcattttggagggtctgtggtcctaacctggggatagcagggagatcccggggcaatgacagagaggcacagagacacggatttcctgagaaagggagaggagagaggctgagacccagggatcatgaaggggacgagcaagggaaggaagagatgatgagaccctgggaatccgggagagagacagggacgtggagagaaagggacagagagagagcgagaaggaaaggaagagacagaagggagaaggggcaaccgaaaatgggcacgaagaggcccaggcacagcaacagctggggaaatgacagagactgagacggagatgcagaaagatacagagagagctggagagggtagagaagggctttcggggagaaagtgatggagggacagagaggagaggtggaggccaaggagggaaagaccccagtagagaaagacagagggacagagaaggggatgcagacgcaggcgggagcacacccacagaggcgaaggaagggcgcaagaccatgagaaccacagacgcggaaagccggggaggtcgtggctcggtctagggcgcacggggagcagggcttgccccccagcacctccggggaggtgaccccagccgggagatgcgagtcccgcggagcccgcgcccggcggacggaccgatggacaaagccggggagagctcgggcgcggccggggcgggggccggtgcccgcagggacccgggcgcagcggggaaaggaggggcgggcaagcggcgagaaggggaaggaagcggaggtgccgggcgggcgcggggcgcgggcaggaagcggggaggggcggcggggcgggggcctccggaaaaacgccccgacttcctgccccgccagagccaggaagcgggagccgggacccagggcccgggatcgccgagcccgacctcgggcgccccgccggtcacctccgcgcggacaccaggtactcggtccccggccccgcccggcctcctcccctcggctgttgggggaagtggggaggaggagggaggggctggggcgctgccggcagcggaggggcccccttcggaccccacggaaccagcggccgcccctccttgggcctcagttttcccatctgtcaaagggagcaaagaggggagaactcacacttgacgagtgccccataggtggggacgaacggtgcgaggccggggccaaggcctcccacctgctcagtggagaacggacgatcactaccattgtacgggtggggaaaccgaggcccggggagccaaaccgactcgtcccagggaacgcacatcgtgagaaagtgtggagttgggatttgaactcgcacgtgctttccgcaaagcgccatcctccaacccccgcatgctttagggccacctaaaaatgaaaaacaacgataacaacaacgacgagggtcgctgtgaagctgaaagttgcagagtgcatttgaaagagttttcggaaagctcttttctaggtcattaattataccgtgagagacaggtgtagggagagagctggaggccttctcccattgtacggatgggaagactgaggtctacagagaagtcattactttttgcagattacactgcatgtcagagggaaagttgtgctggaactcaagactattgcttttccggttccaaaggaaggggctgggggtgggagacggaggggattgatgtacgaggattggaaattcagcgggtcccctaagtggggagactaataggacggggagccccagtccgccgtccgagtgctcagcgctggggtgactaggagatctccgatcgaactcgggaggagttggacccatctgcacctccgggcgcggggcggggcccggggagtgacgggggcagtcgagatacggaaacgctggccctccaagacaggccagagcggc

SEQ ID NO: 2042 - DNA, 6000 bp, Homo sapiens
tgcaggaggtgggcggggccaggaggctagggagggcaagaggggccagggctctgagccatactacctccttgcagagccgccccccaggcccttcctggacatgggggagggcaccaagaaccgaatcatcacagccgaggggatcatcctcctgttctgcgcggtggtgcctgggacgctgctgctgttcagggtgagccccctcggacctctgagtcagccgggcgagggcctgggccgagggacccccaatacccaggtagccctctagagcctgaggttccccatccaaaacttgggagaatgaaagcacccaccatataggggctgtgggagttaaatgaatgaatataaagaagggacttgaactggcgctgagcccagggggtgtcttcaatttagtttccccttctgggctgtcctcacgtccacctccccccaagaagagtctcattcttctccctaagagtgtcctcactcccctcctgccctcacccaggagtgtggttaccctccaggtgtagccaagaccagggaaggtggggcctggtcctcccagaatctctgatctgtaccagcctctccttaggcactacagaaagtgtgactgttattgttattattcatggagaatagtaagggagtggagactcaagaagacgctagcttgggaggccgaggcaagaggatcacttgaggccacaagtttgagaccagcctgggcaacacagcaagaccctatctctacacacacaaagtcttaaaaaaaaattagccaggcatggtggcacacacctatagtcccagctactcaggaggctgaggtgggaggattgcttgagcccaggagttcaaggctgcagtgaaatatgatgttgccacagcacttcagcctgggcaactgagggagaagaaagagagagagagagaaagagagagagagagagagagagagagagagggcgagagggagggagggaaggaagggaagggaagggaaggaaggaaggaaggaaggaaggaaggaaggaaggaaggaaggagaacactggttgtagactcagagagaactgttacataaccagtatgtggccttggggacatctcttaccctttctggaaaagtacttcctggcatccaggagggtctgaaagatattcacctccccctgctcactgaggcacccaccccacccacccctacagaaacgatggcagaacgagaagctcgggttggatgccggggatgaatatgaagatgaaaacctttatgaagtgagtgaagggtggggatggggtaggggcagttgtgttaggggtgggggtgttccctctgggggtggctgggggcagggaccccaggtgtcagggtgctgatgttcgctgcctcatttccatcccagggcctgaacctggacgactgctccatgtatgaggacatctcccggggcctccagggcacctaccaggatgtgggcagcctcaacataggagatgtccagctggagaagccgtgacacccctactcctgccaggctgcccccgcctgctgtgcacccagctccagtgtctcagctcacttccctgggacattctcctttcagcccttctgggggcttccttagtcatattcccccagtggggggtgggagggtaacctcactcttctccaggccaggcctccttggactcccctgggggtgtcccactcttcttccctctaaactgccccacctcctaacctaatccccccgccccgctgcctttcccaggctcccctcaccccagcgggtaatgagcccttaatcgctgcctctaggggagctgattgtagcagcctcgttagtgtcaccccctcctccctgatctgtcagggccacttagtgataataaattcttcccaactgcagaccttggcaggagtcgtggatcttacggaaaccgcctctcccacatgtccctcagacccaggagtcccagcccaagccactccctgcccactccccacacctgggaccaggtagccagtctgggctgccctcctgggagaacaagatgtctcttgggaaggtccccagaccaactgaaggactggtttggccctctttgcagggcctcaccctagggtcatatccttaagcaagaagggggacaagatcaagatggctgtggctaccaaattacttacactttttttttttttttttttttttgagacagagtctcactctgttgcccaggttggagtgctcactgcaacctctgcctcctgggttcaagcgattctcctgcctcagcctcccaagtagctgggattacaggcgcctgccaccatgcccagctaatttttgtatttttagtagaggcggggtttcaccatgttggccagactggtcttgaacctctgacctcaggtgatccacctaccttggcctcccaaagtgctgggattacaggcgcctgccaccacgcccggccgctttttttttttttttttttttttgaggcagagtctgactctgtcgcccaggctggagtgcagtggcgcaatctcagcccacttcaacctccacctcaagcgattcttgtacctcaggctcccgagtagctgggatgacaggcatgtgctaccacacccagctaatttttgttttagtagagacagggtttcgccatgttggccgggctggtctcgaactcctgacctcaagtgatccaccatgcttcggcctcccaaagtgctgggattacaggcatgagccactttatgcgtatttaagccttggaaacacagggactatcttgtggattggggctagtacagaattcagactgcagccttttcccgatgcgttgacttacagaaggggcattttggagggtctgtggtcctaacctggggatagcagggagatcccggggcaatgacagagaggcacagagacacggatttcctgagaaagggagaggagagaggctgagacccagggatcatgaaggggacgagcaagggaaggaagagatgatgagaccctgggaatccgggagagagacagggacgtggagagaaagggacagagagagagcgagaaggaaaggaagagacagaagggagaaggggcaaccgaaaatgggcacgaagaggcccaggcacagcaacagctggggaaatgacagagactgagacggagatgcagaaagatacagagagagctggagagggtagagaagggctttcggggagaaagtgatggagggacagagaggagaggtggaggccaaggagggaaagaccccagtagagaaagacagagggacagagaaggggatgcagacgcaggcgggagcacacccacagaggcgaaggaagggcgcaagaccatgagaaccacagacgcggaaagccggggaggtcgtggctcggtctagggcgcacggggagcagggcttgccccccagcacctccggggaggtgaccccagccgggagatgcgagtcccgcggagcccgcgcccggcggacggaccgatggacaaagccggggagagctcgggcgcggccggggcgggggccggtgcccgcagggacccgggcgcagcggggaaaggaggggcgggcaagcggcgagaaggggaaggaagcggaggtgccgggcgggcgcggggcgcgggcaggaagcggggaggggcggcggggcgggggcctccggaaaaacgccccgacttcctgccccgccagagccaggaagcgggagccgggacccagggcccgggatcgccgagcccgacctcgggcgccccgccggtcacctccgcgcggacaccaggtactcggtccccggccccgcccggcctcctcccctcggctgttgggggaagtggggaggaggagggaggggctggggcgctgccggcagcggaggggcccccttcggaccccacggaaccagcggccgcccctccttgggcctcagttttcccatctgtcaaagggagcaaagaggggagaactcacacttgacgagtgccccataggtggggacgaacggtgcgaggccggggccaaggcctcccacctgctcagtggagaacggacgatcactaccattgtacgggtggggaaaccgaggcccggggagccaaaccgactcgtcccagggaacgcacatcgtgagaaagtgtggagttgggatttgaactcgcacgtgctttccgcaaagcgccatcctccaacccccgcatgctttagggccacctaaaaatgaaaaacaacgataacaacaacgacgagggtcgctgtgaagctgaaagttgcagagtgcatttgaaagagttttcggaaagctcttttctaggtcattaattataccgtgagagacaggtgtagggagagagctggaggccttctcccattgtacggatgggaagactgaggtctacagagaagtcattactttttgcagattacactgcatgtcagagggaaagttgtgctggaactcaagactattgcttttccggttccaaaggaaggggctgggggtgggagacggaggggattgatgtacgaggattggaaattcagcgggtcccctaagtggggagactaataggacggggagccccagtccgccgtccgagtgctcagcgctggggtgactaggagatctccgatcgaactcgggaggagttggacccatctgcacctccgggcgcggggcggggcccggggagtgacgggggcagtcgagatacggaaacgctggccctccaagacaggccagagcggccctatctggcctgcgtggcgcagtacagcgctagagcggccggcgggaggagtagagtcgtcggggccggagcccggcaggagccgggctagagcggctggcaggaggagtggagctgggcgcaaaggtggactcagggcggctagagcgacgcggcggcaggggtggggagagtgcggagcccgagcgcggaggcttcggttccggtggcggcgatggcttctctttccacctggagcaggtgagggacgcggtccccagcgggtgtcagaccctgactctgcacgtcctccccggcatccctggccgtgcacactgccacgtcccccgtaggatttagggcccgcgtaagacccgccacgtccatgtaagatttgggtctcgtgtagacccgcctcattccgtataaagtcttacagaccctccaggttcctgccagccccccatggagaactggcttcttatagacgtggggtcctcatagaccagtggcatcccctagaatccggggctctatagaccatgggtctcgggacccaccacgcacccctatggaattctgagtcccttttaagtctccagaggttccacagactggcagctgtccctatagaatcatgatcctgtatgatccctggatcctttagacccactgtgtgtcaaatagaatctggggagttacacattccaacgactcttttaggttctttaaggctccagaagttcttggagaccctgagtcacctgctcaacacattatagaccctgagacctccatagaactcaacacccatgtggccccccaacccatggaccttctaaaccagccctaaccccccagcgccccatgcacgcagtgttccctctgctggaccccccaggccttgtcagttgcctatagatccatctattctctgacagcttcacctgtaattctccagcctttgtgggactcccccatacccctcctcctaaacaggcgacactcctcgcctccatcatctccaacccccaagcctctgtggagcagccgtatccaacttgcactcctgcctaggccatagtgaccacatacccgtgacttttccaggcatccataagaagacatgatgtgtctcagagctttggttcagattttagtttctgaagggtagggtgggggctccccatgctctgaagcaatgctctctgttttattttgttttatt

SEQ ID NO: 2043 - DNA, 6000 bp, Homo sapiens
ccaccactcctcccttccgaccctcatagtcccttaaaaaaagtttgggccgtcacgtgaggttggggggtgcccaggagttttgtccccccaggcttgcatagtctgtctgggagaatccctaccccgcctctgtgggacccaggtgtgcttctgggacctcgccatcccagcccttgctgtctgactgctgccacttctgcactctgtctcgcagtctcctgaacccctctctccatgtgcctgctctctccctgcctcactggcccccatgttcccgaggtcccgcacccccaagcttcctccgtgcaggtctggtgtttccctgttttaagcacgtggacgcatacacagcacactcacacatgctccccttgcccgtgcctggctcctggctccaaggcctggggaacagagccccattgagacaccctgacgtcaccccctcttcattctcccccccccaaagccgggaacaggccttcatgtatgctgtgtccgatgaggaaagccgccgttgtggtgggcttgggagtggggaagggtccctgccagaagtgggagccagggtccaggccctggaggaggggttgctcagggaaggggtttaacaagggggcctgggacagctcccagaatgcggcttgaggcctttccagagcccccccacctcctttccgagttccctttgtgttgcatgtagtctctctcactccctctcttctgcaaagtttatttttagcctcctgctcccccgctcccaggactgtcgctgcacacacgttgcctggttaccgggacacggaggctggggcgggtgggctgggaagggtggctttaattttggggggagggtggaagtcagtacatcccccacccccagattgatgtctcaggggctttggccccccttctaggtctagagccagattggggctgaggtggaagtaacatggagcttggttccctgagaggggctgggagctttttggaggggatatgagggtccatgaagctggtggctgggtcacctgggttccaaaggaccctgggccttgcaggagaccttgtgatctggattctctagaagggtgaggataatgggttgaacacctagattcccaagagagcgatggtgctctggggtctctggaaggggttgtcaaaggctgtcacttttaaatggaacaggggctgttggtgctggtctgtgaacagctggaggtcatatccctggcaccctgaggggctggtggaaggctgggatatatctgaatggggcagggactccgggggctatgtggtactgcagcccagtctgggcaggagttgggggcctacagtgagctctggatttggagggggtggtccctgtgggagcaggaactactgattccctggattcccaaggggaaggatcccttgttggattccagacttgggtggagtctttgagggtggatgtgttgcctggaggccttgttggtacctgtttgagctggggccaagggaggcggattgacccctgcagcctgactggatttgggagccgcccatctttagctggccaccttggccttctctctctagtggcaccagggaccctgctctgcctccccactccttcccttcctcccctttccctcctcccacccctccattaccggctgcctggtgctgaattattgatggcccctgttgttgggaaatgacaacaaccgcagtccccccaccccccaccccccaccccaggctgcccaccccctccagagaccagccagcccaccgccaacctctacccaaggttaatgctgggggtgggcaggcaggtgggcagggaaggagctgaagatgagaaggcagaagtgggaagagggtgacagctccagggtgcctgctcaagctccaggcctgggctgggccctccagccaggtggggcctggatgcctgggtctggggagggcagtgtagctcagagggtccagggcttggggggcctctcagacagtctgggtttcactctccagggaagacagaagcctctgtgtgtgcaagcgctgacctcatcggcaaccgagtcaccccacccctcctggtccttttaagaaaaaaaaaaaaaatcttcctctcaggtcttggggttgggagtaggggctctgttgggtcttcggaggagacagtgcatgtttctaaggaggacatccgaggagctggggtggtgcaactggctctgaatgggagtgggggtaagctggggggctgtaccccaacccggctggccacgtgtgccccttcctgcccctcccccactggcagccctgcccgccagcctggcttggtgcctggccccctggcactggccccgggacccaccgccgacggtttcctgtttctcccggtgtcgctggagcgggctccagcttcccctcccccccagctcctgtctagcccctcacatgcagacagacagacacgcactgtcttctcttaaatcagatcttgacttggctgaggtgagacagatttccccatgttgaaggcagggcagaggtggaccctgggatgggacccagagccctggacttggcagcctgaccccaggccactccctgcctcccgtccccagggtttgccttcccggattgggcctacaagccagagtcgtcccctggctcaaggcagatccagctgtggcactttatcctggagctgctgcggaaggaggagtaccagggcgtcattgcctggcagggggactacggggaattcgtcatcaaagaccctgatgaggtggcccggctgtggggcgttcgcaagtgcaagccccagatgaattacgacaagctgagccgggccctgcggtgaggacgggctggggacccctgagcacatgtggagtgcccccccggggttgcacagccccttgcctgtgggaacaagcattgggtctgacccctggctttgccaaatcctagctgtgtgaccttgggccactcccagcccttccctgagccccttggtaacacagacgtatcctgaggagagattacagtcaccagtggatcctctagtcctgccttagatgtgaggagagagctggtacccaccctctgggcacttgatttgtcttttgtggcctacgttcctcagttggcctttgggaaccacacctaagtgcgtgttaaggtgtggagtctagacctgggtcccacgtacctgaccttcccaatggcatttctgtacccacagctattactataacaagcgcattctgcacaagaccaaggggaaacggttcacctacaagttcaatttcaacaaactggtgctggtcaattacccattcattgatgtggggttggctggtgagtaccagggatggttggtgtggagagggtctacatgccccttcaggctaggccaggggccttgacactgtctcccttctgccagggggtgcagtgccccagagtgccccgccagtgccgtcgggtggtagccacttccgcttccctccctcaacgccctccgaggtgctgtcccccaccgaggacccccgctcaccaccagcctgctcttcatcttcatcttccctcttctcggctgtggtggcccgccgcctgggccgaggctcagtcagtgactgtagtgatggcacgtcagagctggaggaaccgctgggagaggatccccgcgcccgaccacccggccctccggatctgggtgccttccgagggcccccgctggcccgcctgccccatgaccctggtgtcttccgagtctatccccggcctcggggtggccctgaacccctcagccccttccctgtgtcgcctctggccggtcctggatccctgctgccccctcagctctccccggctctgcccatgacgcccacccacctggcctacactccctcgcccacgctgagcccgatgtaccccagtggtggcggggggcccagcggctcagggggaggctcccacttctccttcagccctgaggacatgaaacggtacctgcaggcccacacccaaagcgtctacaactaccacctcagcccccgcgccttcctgcactaccctgggctggtggtgccccagccccagcgccctgacaagtgcccgctgccgcccatggcacccgagaccccaccggtcccctcctcggcctcgtcatcctcttcttcttcttcctccccattcaagtttaagctccagccgcccccactcggacgccggcagcgggcagctggggagaaggccgtagccggtgctgacaagagcggtggcagtgcaggcgggctggctgagggggcaggggcgctagccccaccgcccccgccaccacagatcaaggtggagcccatctcggaaggcgagtcggaggaggtagaggtgactgacatcagtgatgaggatgaggaagacggggaggtgttcaagacgccccgtgccccacctgcaccccctaagcctgagcccggcgaggcacccggggcatcccagtgcatgcccctcaagctacgctttaagcggcgctggagtgaagactgtcgcctcgaagggggtgggggccccgctgggggctttgaggatgagggtgaggacaagaaggtgcgtggggaggggcctggggaggctggggggcccctcaccccaaggcgggtgagctctgacctccagcatgccacggcccagctctccctggagcaccgagactcctgagggctgtgggcaggggacctgtgtgccccgcaccccccatgcttcttttgctgccttaagccccctatgccctggaggtgagggcagctctcttgtctcttccctgcctcctcccttttccctccccacattttgtataaaactttaatttcttttttttaaaaatggtgggggtgggtgggtgcccagggctaggggctattccctgtctctgtgggtttctaagctctgggcaaagtggtggtagggggagggagggggaagttaagggggtcacctccattctggggaatttatatttgaattgaggctttggccttaacacccaggaacttttctattacaatcgcttaggaagtaaagccttgtctccctccctgttctctgcctcttgtacccctctgacccacccgctctgccccactcccagccctcctcagccccagccctgcctgccctgcccctccagggggccatgagtgcctaggtttctcataccccacaaggtcacagcaggggagggagggacaattttataatgaaccaaaaattccatgtgttggggggtggggggcggaggagggtgaggggtgccgcccatgggccacaaatctctacaagtgcctgctatccctctcccactccccaccccagcaccggtccaaccccttcatccccagctgctcctaggactggcccatgggcaggcgggtggggggatgggaagggggtgccctgaaaccaaactggaagccccctctgcctcccagctggggcctctggggtggggtggggggctgtggtcaagccttattctgtattggggactgagggtggggggagtagaggggccgctggagaatgtattcaaaacaataaaactttggacctttggatgcagtgatcaatgtcctaggtgctcggtgcagccccctgagggccacagcttttgcttgattctgaaggaggggccccaccctggctgctagtgggtctgtggccagatcagtatagagggcctaaccctaatcagaatgggccaaatccaggcctgggaaaccgtctcctgacctcagaggcacatgagccccagagcttgatgatagtggtctcaggcatgcgccggcttcatcagactgctcctctgttccatggggaccttgtccttgaaagctcttcccactgtttttcaccacaaccccactgcccttgctcttctgattgcctggatgccttcccacttgtggctaggaattcttcccacaccccagg

SEQ ID NO: 2044 - DNA, 6000 bp, Homo sapiens
ggaggccaaggtgggcggatcgtttgagcccaggagttggagactatcctggtcaacacagagagaccccaactccactaaaaataaaaaaaaattagctgggttggctgggcatggtggctcacgcctgtaatcccagcactttgggatgctgaggcgggtggatcatctgaggtcaggagttcaaaaccagcctgaccaacatggaaaaaccccgtctctactaaaaatacaaattagctgggcgtggtggcgcatgcctgtaatcctagctactcgggaggctgaggcaggagaattgcttgaacccaggagacggaggttgcgatgtgccaagatggtgtcactgcactccagcctgggcaaggagagcaaaactgcgtctcaaaaaaaaaaaaaaaaaaaaaaagctgggcatggtggtgggcgcttgtaattccagctactcaggaggctgagacaggaaaattgcttgaaccagggaggcagaggttgcagtgggccaagatcgtgccattgcacttacagcctgggtgacaagagcaaaattccatctcaaaaaaaaaaaaaagtaactgggcatggtggcatgtgtctgtagtcccagctactcaggaggctgaagtgggagaattgcttgaggcagggaagtcgaggctgtagtgagccattattgtgccactgcaatccagcctgggcaacacagtgagacccccatctcaaaaaaaaaaaaaaaaaaaaaaagaggtgaactgagttcacttgccttgtcagagacaagaagtagcaaaggttgggtgtaacagccaggtgtggtggctcacacatgtaatcccagcactttgggaggctgaggctggcggatcacgaggtcagaagattgagaccatcctggctaacacggtgaaaccctgtctctactaaaaatacaaaagattagccgggcgtggtggggggcgcctgtagtcccagctactcagtaggctgaggcaggagaatggcgtgaacccgggaggcggagcttgcagtgagccgagatggggccactgcactccaccctggacgacagagtgagactccgtctcaaaaaaaaaaaaaaaaggttgggtgtaactcatctctgtcttgctggtgggagggtaggggtcactgggtttgttactgatgtgttatctttttgtttgtttgtttgttttgaaactgagtttcgctcttgttgcccaggctggagtgcaatggcgcgatctcagctcaccgcaaccaaccccctcccgggttcaagcgattctaccttagcctcccgagcagctgggattacagacatgcaccaccaagcccggctaattttttgtatttttagtagggacggggtttctccatgttggtcaggctggtctcgaactacagacctcaggtgatccacctgcctcggcctcccaaagtgctgggattacaggcgtgagctaccgcgcccagcctttttatttatttatttttagacggagttttgctgttacccagggtggagtgcagcggagcgatctcggctcactacagcctccgcctcctggattcaagcgatcctcctgggttcaagcgattctcctgcctcagcctcctgagtagccgggattacaggtgcgccaccacgcctggcaaatttctgtacttttagtagagatggggtttcaccatgttggccaggctggtctggaacttctgacctgaagtgatctcccgcctcggctcccaaagtgctaggtttacaggcgtgcgccactgcgccgggccctgatgtagtatctttgaaaatctgcatttttttttttttggagggggtagtaaaagaggtaataaagcataatggtaaagggtaaatgtggtggtttggaattggttagatctgggttcgaatcttagttccaatacttcctggctgtaagatttagtggactgattttccctcagagagcatcactttctttatctgtaaatggggataacagcagtaattcccctcgttgggattttgtgaggattaaatgagaagatgcccctgacaatgcttggcccggtgcctggcacatcatgaacactcggaattcgggagctgttattcgaacaatgaagatgattattattgctggaccacaccgctcccagagggttacaatatccgtgggggagctgtactgtccgtaggcaaggttacataattcccgggggttgtgggggaaagcttccctggagcccttggtctccccaaggaggaggcctgagacttttttttttaggcactggtgaggagcctgtctaaggtggactaggtaccccgcaagcgaggaggctgggattgaagccctgggtaccgggagcctgagctccgcaggccttccctatctgtgacttttctgtctccccgcccatcttctggattcgtcccccacccagcccccccaactcccgcccgccacccatacgcccctccttcggaacctcagagtcttttttgagactctgtttccaggctatgcctgtgaatattgcttctatttggcctctaccctgctgccggctcctgggctccatcagatctgcgctgtgatttcctgtttcccagagcctcaggcttcatccttccctcccggctgaggcagagaacggagacttaacacttctctacgctctggctttcgatcttaagccctgtcttcctctctcctggcgaccctcagtgccccttgggagcacatttgttcagactttggtcgccccctcgtatcccggccccgcctccggaacccccggtcctagtagtggacgtggggggacctccggcgccagccctatccccgggacagctgcagcctggggacggtggtggtgggggcttccaaatgcattctctctggtcacttcctccccagctggacgggggttatcagggaagccaagaccccatccccacaggagcggagggcacagccgcctccccatttccgatgctgggaaatgcatcccacccattccaccccacccctggacagctgcccccattcaggctcagggttggggggttgggtaaaaccaagctgggaaatgctgtggtcttcatcatcttctaaggtcctgaccccgcccctctgcagagaagattctgccccctccccacaaaagtttctgacccccgcttcctcggaagggccccccgttttcccatacaggctcccaaaagaaactctggagcccgcagtgggcaggagaggaggaggggcagcaggtagcgagtgccgaagacttaagttagctgcagactcggagcctctgactagggtcatgacccgcgggaccccatcccacccccaccccctccttcctccctcccccgccgcgcggcccctttaagcccagagccggccggtcctcagtggctgcgcgccgacgagcgtgtgtgtgagtgcgcggggagggggcgggcgcagtgtctccatggcgacgcggcggtgacgtcgccggccggggggcgtgggcgtcccggccccggagtgcgatattaacccgggaggcggcggcggggaggggagaggctctgagaggcgaggccgggtgaggcggcgagggcggcccgacgggcgcgggacgggacggggcagcgagggcgccgggagccgcggcccggaatcggggcgcttcgccccgggccccccagcatgaagaccccggcggacacaggtgggggcgggggcagcacgtgtgggggagacttgttgccccgggaaaccgaacggagaaactttgggggggctgaaggggtccgggggagcccgagtgatccccagttctgggggacccctcaagcactggagacctgttgcttctcgtggcgcgagcggggttgctgcctgggacccccgattcctggctccgggcggagtggtgtgggtgctgcgggtcttggtcctgtatccctaccgggaccccgcaggccgggctctcccccactcccgggatcacgggggtggcggggtccttcccctccgctcttgtcacgttgcactctgggggccgggacgtgtgcggggcgggggggctcgtccaccgggcccgctatccctggttctgcgctgcgcggtcctgctggtgaccttcacggcggcgcgtgccctgcaccaggttagcgggggatacgggatggcctctaggaggagggcgtgagtggggagcccgggactcggggtcctggctgcgccgcccctcccccgcccgcctctgtcggctcctcgctcccccgccctcgccgagtcgcaaagttccaaagcgcagcccgaacgttcgaaaaaggaactttttgtttccgaccttagaacgcgcggctttaaggtggctccggggagacctgggtaccctcctcccgcgccaccggtggcccggggttgaggagggtggggaaggtggggggagacgcagaggctcccccctcgccccccctcccggatccacctcttctctttcagcgggccgtctcttccctccgcccctctcttccccgccaacttgctcctccttaaggggccaaggttcccctccccctcggtcggcgggcggggggcagcgggattaactccccctcccactcggacttttccccctcccctcccccgccgcccccgggctcgcgcgggctggactttgcgcccgagcgcgcagggggaggggtcccagccgccccctgcccgtctaccccgtcggaatccggcccggggcggggacgggggagggggaagggggccgggcgccgctgttcaaacttgtttccttcccccggcggcggcggcggcggcggcggcggctcgggctcctgtgtgcgggtgtgtgccccgaccggcccacccaccccaccccatccccaccccattcccaccccattcccatccccatccccctgctcggcgggtgggggcggcttaatcttaaagggctccgagctgggatccggcgccaggggattgggacccggaccgaggaggggccctgggggtggggccggggtgcggagtgcggtagggtcagtcacgtgcgtcctacacactcccccggcttccactcgctcccgggtggctgggccctgggggcagcaggagcctaccctcgcccaaggaggaggccgaggcacccagacaacctcgcttcatcttctctccctgctaccggccttggcctgataggatccgcgggtcgcttccccaaccctgtcggggggcgggacagtgtgtgggttttccggctgggggaggggaggggaaggaggcctggaatggcctccgatcggtgcatctttcccgtctgcctcctggcctgccgctccgcacccctccatccagttctccatcccggtccctctctctgccgtggctgtttcccacttcctgttttcttcccggctctggcgccatagagggccgcctggagtgggggaggtggtggggccccccaggaggccggcgtgttcttcctctgccaccactcctcccttccgaccctcatagtcccttaaaaaaagtttgggccgtcacgtgaggttggggggtgcccaggagttttgtccccccaggcttgcatagtctgtctgggagaatccctaccccgcctctgtgggacccaggtgtgcttctgggacctcgccatcccagcccttgctgtctgactgctgccacttctgcactctgtctcgcagtctcctgaacccctctctccatgtgcctgctctctccctgcctcactggcccccatgttcccgaggtcccgcacccccaagcttcctccgtgcaggtctggtgtttccctgttttaagcacgtggacgcatacacagcacactcacacatgctccccttgcccgtgcctggctcctggctccaaggcctggggaacagagccccattgagacaccctgacgtcaccccctcttcattctcccccccccaaagccgggaacaggcct

SEQ ID NO: 2045 - DNA, 6000 bp, Homo sapiens
cataagcctgggctgccctttggacaccacggacacagatctgccagtaagaaccatcctcccggccaggcttggtggctcacgcctgtaatcccagctctttgggaggccgaggtgggcggatcacctgaggtcaggagttcgagaccagcctggccaacatggagaaaccccatctctactaaaaacacaaaattagccgggcgtggtggcgcaagcctgtaatctaggctactcgggaggctgaggcaggagaattgcttgaacctgggaggaagaggttgcagtgagctgagatcctgccactgcactgcatcctgggtgacacagggagactccatctcaaataaataaaaaaaaaaataaataaattttttgtagagagagtctcactctgttgcccaggctggtcttgaactcctggcctcttgaaattctcctgcttcggcctcccaaagtgctgggattacatgtgtcagacacaaactgcagccagcctgtttattgctgtttactctaactgttgttacagttggagtctgtagggtagagtgctcttgttatccatggggcatagagttcactctgctaataattattaacagtatttattgcatacttactttgcatctctgatttttctttttttcttttttttttttttttaagacggagtatcgccctgtcactcaggctggagtgcaatggcatgatctcggctcactgcaacctccgcctcccgggttcaaatgattctcctgccttagcctcctgagtagctaggattacaggcgccagccaccacgcccagctaatttttgtatttttaatagagacgggttttcaccatgttggccaggatggtctggaactcctgacctcaggtgatccacctgcctcggcctcacaaagtgctgggattacaggtgtgagccacctcgcctggccacatctctgatttttcacaataacttgatcatgtaggatctattaacacctccattttacaaatgaggaaaattgaggctcaaagaggtgaacttggccaggcgcagtggctcacgcctgtaatcccagcactttgggaggccaaggagggcggatcacgaggtcaggagatcgagaccattctggctaacacggtgaaatcccgtctctactaaaaatacacaaaattagctgggcgtgatggcgggtgcctgtagtcccagctactcgggaggctgaggcaggagaatggcgtgaacccgggaggcggagcttacagtgagccgagatagcgccactgcagtctggcctgggcgaaagagcgagactccatctcaaaaaaaaaaaaaaaaaaaaagaggtgaacttcgctaggcagggtgactcacacctgtaattccagcactctgggaggccaaggtgggcggatcgtttgagcccaggagttggagactatcctggtcaacacagagagaccccaactccactaaaaataaaaaaaaattagctgggttggctgggcatggtggctcacgcctgtaatcccagcactttgggatgctgaggcgggtggatcatctgaggtcaggagttcaaaaccagcctgaccaacatggaaaaaccccgtctctactaaaaatacaaattagctgggcgtggtggcgcatgcctgtaatcctagctactcgggaggctgaggcaggagaattgcttgaacccaggagacggaggttgcgatgtgccaagatggtgtcactgcactccagcctgggcaaggagagcaaaactgcgtctcaaaaaaaaaaaaaaaaaaaaaaagctgggcatggtggtgggcgcttgtaattccagctactcaggaggctgagacaggaaaattgcttgaaccagggaggcagaggttgcagtgggccaagatcgtgccattgcacttacagcctgggtgacaagagcaaaattccatctcaaaaaaaaaaaaaagtaactgggcatggtggcatgtgtctgtagtcccagctactcaggaggctgaagtgggagaattgcttgaggcagggaagtcgaggctgtagtgagccattattgtgccactgcaatccagcctgggcaacacagtgagacccccatctcaaaaaaaaaaaaaaaaaaaaaaagaggtgaactgagttcacttgccttgtcagagacaagaagtagcaaaggttgggtgtaacagccaggtgtggtggctcacacatgtaatcccagcactttgggaggctgaggctggcggatcacgaggtcagaagattgagaccatcctggctaacacggtgaaaccctgtctctactaaaaatacaaaagattagccgggcgtggtggggggcgcctgtagtcccagctactcagtaggctgaggcaggagaatggcgtgaacccgggaggcggagcttgcagtgagccgagatggggccactgcactccaccctggacgacagagtgagactccgtctcaaaaaaaaaaaaaaaaggttgggtgtaactcatctctgtcttgctggtgggagggtaggggtcactgggtttgttactgatgtgttatctttttgtttgtttgtttgttttgaaactgagtttcgctcttgttgcccaggctggagtgcaatggcgcgatctcagctcaccgcaaccaaccccctcccgggttcaagcgattctaccttagcctcccgagcagctgggattacagacatgcaccaccaagcccggctaattttttgtatttttagtagggacggggtttctccatgttggtcaggctggtctcgaactacagacctcaggtgatccacctgcctcggcctcccaaagtgctgggattacaggcgtgagctaccgcgcccagcctttttatttatttatttttagacggagttttgctgttacccagggtggagtgcagcggagcgatctcggctcactacagcctccgcctcctggattcaagcgatcctcctgggttcaagcgattctcctgcctcagcctcctgagtagccgggattacaggtgcgccaccacgcctggcaaatttctgtacttttagtagagatggggtttcaccatgttggccaggctggtctggaacttctgacctgaagtgatctcccgcctcggctcccaaagtgctaggtttacaggcgtgcgccactgcgccgggccctgatgtagtatctttgaaaatctgcatttttttttttttggagggggtagtaaaagaggtaataaagcataatggtaaagggtaaatgtggtggtttggaattggttagatctgggttcgaatcttagttccaatacttcctggctgtaagatttagtggactgattttccctcagagagcatcactttctttatctgtaaatggggataacagcagtaattcccctcgttgggattttgtgaggattaaatgagaagatgcccctgacaatgcttggcccggtgcctggcacatcatgaacactcggaattcgggagctgttattcgaacaatgaagatgattattattgctggaccacaccgctcccagagggttacaatatccgtgggggagctgtactgtccgtaggcaaggttacataattcccgggggttgtgggggaaagcttccctggagcccttggtctccccaaggaggaggcctgagacttttttttttaggcactggtgaggagcctgtctaaggtggactaggtaccccgcaagcgaggaggctgggattgaagccctgggtaccgggagcctgagctccgcaggccttccctatctgtgacttttctgtctccccgcccatcttctggattcgtcccccacccagcccccccaactcccgcccgccacccatacgcccctccttcggaacctcagagtcttttttgagactctgtttccaggctatgcctgtgaatattgcttctatttggcctctaccctgctgccggctcctgggctccatcagatctgcgctgtgatttcctgtttcccagagcctcaggcttcatccttccctcccggctgaggcagagaacggagacttaacacttctctacgctctggctttcgatcttaagccctgtcttcctctctcctggcgaccctcagtgccccttgggagcacatttgttcagactttggtcgccccctcgtatcccggccccgcctccggaacccccggtcctagtagtggacgtggggggacctccggcgccagccctatccccgggacagctgcagcctggggacggtggtggtgggggcttccaaatgcattctctctggtcacttcctccccagctggacgggggttatcagggaagccaagaccccatccccacaggagcggagggcacagccgcctccccatttccgatgctgggaaatgcatcccacccattccaccccacccctggacagctgcccccattcaggctcagggttggggggttgggtaaaaccaagctgggaaatgctgtggtcttcatcatcttctaaggtcctgaccccgcccctctgcagagaagattctgccccctccccacaaaagtttctgacccccgcttcctcggaagggccccccgttttcccatacaggctcccaaaagaaactctggagcccgcagtgggcaggagaggaggaggggcagcaggtagcgagtgccgaagacttaagttagctgcagactcggagcctctgactagggtcatgacccgcgggaccccatcccacccccaccccctccttcctccctcccccgccgcgcggcccctttaagcccagagccggccggtcctcagtggctgcgcgccgacgagcgtgtgtgtgagtgcgcggggagggggcgggcgcagtgtctccatggcgacgcggcggtgacgtcgccggccggggggcgtgggcgtcccggccccggagtgcgatattaacccgggaggcggcggcggggaggggagaggctctgagaggcgaggccgggtgaggcggcgagggcggcccgacgggcgcgggacgggacggggcagcgagggcgccgggagccgcggcccggaatcggggcgcttcgccccgggccccccagcatgaagaccccggcggacacaggtgggggcgggggcagcacgtgtgggggagacttgttgccccgggaaaccgaacggagaaactttgggggggctgaaggggtccgggggagcccgagtgatccccagttctgggggacccctcaagcactggagacctgttgcttctcgtggcgcgagcggggttgctgcctgggacccccgattcctggctccgggcggagtggtgtgggtgctgcgggtcttggtcctgtatccctaccgggaccccgcaggccgggctctcccccactcccgggatcacgggggtggcggggtccttcccctccgctcttgtcacgttgcactctgggggccgggacgtgtgcggggcgggggggctcgtccaccgggcccgctatccctggttctgcgctgcgcggtcctgctggtgaccttcacggcggcgcgtgccctgcaccaggttagcgggggatacgggatggcctctaggaggagggcgtgagtggggagcccgggactcggggtcctggctgcgccgcccctcccccgcccgcctctgtcggctcctcgctcccccgccctcgccgagtcgcaaagttccaaagcgcagcccgaacgttcgaaaaaggaactttttgtttccgaccttagaacgcgcggctttaaggtggctccggggagacctgggtaccctcctcccgcgccaccggtggcccggggttgaggagggtggggaaggtggggggagacgcagaggctcccccctcgccccccctcccggatccacctcttctctttcagcgggccgtctcttccctccgcccctctcttccccgccaacttgctcctccttaaggggccaaggttcccctccccctcggtcggcgggc

SEQ ID NO: 2046 - DNA, 6000 bp, Homo sapiens
cccactacccaatccaagcctcctcccctaggaccagcaggtctcgtgctgttcctattctaccccatgctccagagccagttactctgcacccctcacctttctattacagcggacctgtgccatcccatcactttaacatcacagctgtccccagatacgccccactccgctacactcccacctgccatcactaaccactcggcccggccgagctccgtaactttccccgtcatccctttactctgcctctactgttctctcccctactatacccccaccaccgttactccgcacttagcaccccgacaccttgacccctgcagtcccagggcccaggcgctactgaccgaacatgccgaggccacgggaggccgcgctggacgcgggcatcaggggcctgtgggccgaatacatggtccggcgcaggggggacccggcaggggctcgcacctcctcagcggccgacgccgctccgcccgcagcccgctcctcggccgtcgccgcttgggcccggggggagcgggaggccgtcgccgcatgcccccccccccgccgcccccctccggccgccccacgcgggggtctctgccgggcgcgcctgcgcacagcgccgcctgcctcccgccgcccggggggcgggggaggtcagcgcgcaccggccccgccccgccccccggcgcgcgcgggggccgtcacggggcgcgcggcacgggggccatcggcaccgccccctccctctccctcctccctcgcggagtccggcgggcggggcaggcggggcaggcggggcggggcgcgacgcgcgtgcgcgggggcggccccctcccttccccgctcgctggctcgctcgttccctccctccctcgcagctccggcgggtaacggctctggccccgcgcgtcccggctgccggcgccgccgccccgcctttccgggccccgggcccgaggctcagcgccgggtcgacctccggccccgggcgggcagacggaccagcgtgcgtgcgtccgtgcgctccgagcgagccccgcgccgaaccaccaccgcctccccgccccgccactactacgcgctcccctccccccgccgcgcctccccccgccccttccccgcttcccccgcggccttccgcgcaagcccggccccccgcgcgtgagcccattggctgccgccgccgcgcgcgggtcaggccccgccgcgcccgcccccattggccgccccgggggaacgtcagtcatatgcaaataagggcagggcggggcgggctccggttggccccgagccggccgggggcggggccgcggtaggagggtggcagggagggcgcactgcagtaaaggcaccgagccaggggggcggttcggggcgccgcgctgcggaggtctctgggttgtgcgtggtgctgttgtgtgtccagtccgcgcgaggaacacgctcacgcgcggctcggcccgcctcccgcacacccgcctgggcgcgcctggccccgctgggcagacaaactgcgcgtagggctgggcgaggcatcctgagccctcacctactcacactcacactcctcacagacatacagacacactttcgtgccacacccattatctcctacacaccccacgggcacatatgccctctgtcttacacccacgctgtcacacctcacatacctgctcacacagatgtacaacctcacacgctcacggtccatcgctccccacccaccatcgtgcattcacccatcctgttcacatcacccatctcatccatgccctgtcacacatgcttcgccaacccgcatcctcatcacacccccaccagcccacatgaatcatgcaaacagacaacatgtcaaacaggaggaactcagcatagccctgcttgtccactacacacactccacacccctcccacacaaccacacactcctccgtcacacacacagccttcctagcactcacaaagcgcctcctatccccagtgcacactcagctctcacagacaccatcataccgaccccaccctctatataatcctaccctaatgggtgctacctgcttcagtacccaggcccatcaggtatacagagctcagtggccaccgccatcattcagccacccaccctgacactcattggccactctggaccctctgtctagcagtataaggcagggaaccacagagcacaccatggctggccccaccacactgctctgccagccacccactaaccccgccccccctcccagaaaaaaagggccaggaagaaaggaaactaacacttactggggctgctgtgtgctgggagcttgtatgtattatctggttcattgaatcctcacagccacctagggaggtatgctttattacacccattgttcaggtgaaaaaatgagcctcagagattgaataaactgtggcaagatcatgcagtcaagatgtaccagcccagagctctaactcaagtgctgtttccattactcaaggcttaacctcagggtggacccagggagggaactccaaacagaggctggggaatatagttagacaatgatacagagccacgtggaccacagaaaggcgaggggggctcacacaaagacacaggcaaggatgtggagcccatctggcagagacccagaggccctggatcacccaagaggggccctggagccatacccagtaaaggcacaggactggggtcacacacttgggcacgtaaaggttgcacaggctcagatggaccaagactgggctcttacacaggttggatggtcaacaggagcagacgagccctttccccaacctgcctcatccactgacagagctgaaggaatggagagggggcaaaaactgggtaacctgagcccaaaagggaagggaaggtctgtagccctctgacctccagagactgcagggccagacacttggctgtgagcctggaggggcaaccagagggactattaggtgactgccccctccttcctatgcagccccagactcagaccctccattacttcactgccccagggactgcaatgtgaggcacgaattgaggctgaaatcaatgtggcctgctatctccccaccactgcccctaccactgccccctcctctccccaccggtgagtgagtcacctactggcaagttaaccccttctctactgcaatgcagtccaaggacagagctcagaggagctctgccccccagatccccgacttctgttggttgagaaaaagagccaggcatggcacaggagggaaagagggccccacacatctgggaggggtgcacatctggtagaatacacagtgcccacggaggagagatgggaagaggccccgtccggggcagggtacaaccaagtgggggcctagcctggcagggaggggcgggaatccgggcgggaagggcccccctgccctgggcgctgggccagccctatacttagcttctattgttcagggtggaggaaccctgggtgggggtggattaggagcagaggggagggagcaggtcctatccctagacagctcccactctcttgccatccccaaccctaattggggcctccctagttggaaaaaggtactgagcaggactgtgatggcagccaccccctgcaccaacccctaaccaactccacagaaggactgcccctaaacagcccccactgtgccaccacacccaggcctggggacagggaacccagacgaagacatcaacagccacccgggcgggcggtacaggctgaggcctgcccagaggcctggggcgagcagccagggatgctgacagaccgagggacaggcagacgcgcactctaaactcatggggcccatttattgagcccgcgaggcaccgcacccctgccggccgcctgcggctccccaccctgctctccaggcccgggtccccgcctcagctcaccaccccggtgtccccagctcccctcacccgctttccacatacacacccacccacccaccccgggcggcgtcggcgacggccagggttgcctggggaacgagcccaggattgggctggcgcggctcggcaaggatggggggctaaaaatagcgccggggtgagtcagtgtgagtggggctggggtaggcagggggaccaggaggaaaagagagactggggagagtgtgtgggggatggtccccagggattgggagatgggtgggatgcgggggtgggggggttgagagacgtgggtttggggaagggaaggtgcgggggcgggaaaggggtgtacaggcgcttgggctgggagggttggtcggcgcgggctgagggaggcgccaaggcccgagcagaggagggggcgccgccctgcgttcccctcccctccccgcgctcacgagattttccactcgccgcctggcccccagccaacccccggcaggctccacaaagccgctttgtgcagggagggcggacgggtgcccggccggcctgacacccacgcgggccgcggcggggcgccggccagctggcacccgagctgtctgcggtgggagggagggtaccccacccagcccgaggacgcggcagcgcaggggttaatcgctcaggggcggagaagcaggtctcggccaatcagcggtcagcgggcgagacggcagccaatgagaaggacggaggcccgacacaggaggtctgcacccaggggcgcgcgggaacccacacccctaggtgccagcgggggctgggcgcggccctcgctgggtgccagtccgcttctacacagcccccggagcacccggtttccccgactacttcgcaagaaacaggctcagaggggggatagcatcttgcagccgcgaggtggcacggccgggatttgaacccaaatctatctggcttcacaatcagcttttccgctgaaatagggggacgggagttccctgcccgggccctcgtggggagcgggaacaggggatagggtgggggtggaggaggcggcgcggcgggctagggtccagccgcctgcggtgcagccgctgccgccggtggtaatgggagccagacgccgtcgccgccgctaatgcgcctccctcccggccactaatggagccattaatacccgggcaccgggggctccgggacgtaccccccaaccccctctgccgcgcatgcgcgcgcctgctgtcccgccgccgcctgccgccaggaggcagcctgacgcctcgcagctcctggtgctgggggctgctaagctgggggagctggggtctcttctacagttaccaagactcactcctgcaccttcacaagctcttcctcctctcctcctcttccccaagccatcttcttcccaactcctgcctttccagggcggtctccaggggtctctgacacctagatccaacattttccctcccctgctctaaatgccttcttgactctttactggcccgcgtagagccccagcttctcagcctggcattcaagctgggcctgtcgtccacggcacccttctgctaagcctggactctggtgtcagctccagcctcaactagccactcggagttcatgcactttcactcttcctggtctttgctcatgcagctgtttcaggtggaattgccttttcctttctttgactattctgaaatctactcattcctcatacttcagctcaaatgtcacctccagtgagaaacctacctgatcctcccttatcagcccccatgaaccactgagttgtccctgccccttggcttccccagactcagtacctccctgggctcatccttgcctgtgcctgcatccacatctgccttcctcacccacctgccccaggactgctcagccctgggcctggcagagggatgaggagggagctggcttctgctggtggagatagggttcactgtttgaaacaaaatggaaattatggtgggcagtatctggatctggggagtcaggagacccaggcttaacccctttggcccctctttttccccacctgcccaagcatagttggtggg

SEQ ID NO: 2047 - DNA, 6000 bp, Homo sapiens
ctcaaaaaaaaaaaaatctgtagagacagggtgtccccttgttgcccagactggtcttgaactcctggtttcaagggattcttccttctaccttggcctcccaaagtgctgggactacaggagcacactccatgcccggccccattcgccactattaaagtcacaaggggctgggcatggtggtttatacctgtaatctcagcattttgggaggccaaggcaggtggatcacttgaggtcaggaggttgagaacagcttggccaacatggtgaaacccagtctccactaaacatacaaaaattagccgggcatggtggcggacgcctgtaatcccagctacttgggaagctgaggcaggagaattgcttgaaccagggattggagattgcagtgagccgagatcatggcactgcactccagcctgagcgacagagcgagactccatctcaaaaaataaaaattaaaaaataataaagtcacaaggaaggcacagagagggaaagccacctgcctaaggtcacataactagcacatggacgagccagggctcaaaactatgtctctaagcccagcatgttgaattctattttccccaatgaagcaggtcctgctattgaaaacacaggatatttgatgaggacaataataatatataatgttatattattattattattattattattattattattattataaaactaatagcagctaaattgcatcaagagccttctatacatcagaccccatgggacagagtcatattttcttgatgtgatccactctacagatgaggaagctgaggctccacgaggttaagtaactgcccggaagtcacaaagctaacgatcaggagacaggacttggacccaggcctcaattcaaaacaaagtaggacaaggaagccagatgcggtggctcacgcctgtaatcccagcactttgggagaccgaggagggaggttcgcttgagcccaggagttcgagaacaccctgggcaacacagtgagaccccctgagtctacaaattgttttttttattagccagtcattgcggcacatgcctgtagtcccacctacttgggaggttgaggcaggaggatcatttgagtccaggagttcaaggctacagtgagctatgatctcaccactgcacttcagcctgggagacagagccagatcttgtctcaaaaaaaaagcaggacaagacccagtaattgagccagatgggaacttaggccctgaccagccctactctctcctcttagaaagggaaattgaggcccctgagagcaagaaagctgcctcaagcctacagacttccagatggaatttcgtttccctctcaggactttgagcaggtaaattcctggcctttcctcccccaggatgggttggggaaaaagaaacagcagctggggaggagatctgaacaggtacaaagggcggcctgcatgaggggaaagtggttagacaccaagcagaacttcctggcctcctctgggaagtttctaagactcatccaggggctgcccctgcgggtgggggccctccagaggccaaggcccagagaaaggagaccctagtcctttccgcctggggtgcaaggagccgggggagggtgggggtggccatcctggttccgcatcctccgttcccgacattggagggaggctgctgtgggagctgggactttcctgagagcagaagattctgggaaattagagacagctgcagggcggggctgcctcccagcctcccttcccttccctccccttggtccctgctggctccggaggcacgcctctccacccctccaccccaccagctcctcctcccctagtccatgccttccaccctcggaccctcagatcttttcccctgagcctctttcttctccctcagatctggcctctaccctcagactctctccaaatcttctttcctcagacccttctttcccctccaactctctcctcctccctcagagctgcgtcccctcacttagtgcttctcagacttcctcagactgtgccctctccctcagatactctcccctcccctcagaccctcacctcctcactcagaccctcacttcctccttcagaccctcacctcctccctcagacccttacctcctccttcaaaccctcacctattctctcaaaccctcacctccttcctcagatgcttatctcctccttcagaccctcacctcctccctcagacccccacctcctccttcagagcctcacctcctctcagaccctcacctcctccctccaaacctcacctccaccttcagacccttacctcctcctttagaccctcacctcctctctcaaaccctcacctccttcctcacatgcttatctcctccttcagactctcacctcctccctcagacccccacctccttcagaccctcgtctcctctctcagaccctcacctcctcccttagcccctcatctcctccccccgaacctcacctccaccttcagaccctcacctcctccttcagaccctcacctcctctctcaaaccctcgcctccttcctcagactcttatctcctccttcagacccttgtctcctccctcagaccttcacctcctccctccaaacctcgcctccaccctcagacccttatttcctccatcagacccttacctcctccaacagaccctgtcctcctccttcagatcctctccccctcctcccactaaaccatctacttctctctcagacctatcttccttcttcagatcctcctccttctgacccttttatccctcttccaacctcagagaaccatcagcaccctctcttccagcagcaccgtctctcccagcccttcgaagctcccaccggacccatcacatcttctcccctctacagtcctgctaggttggaaccactgcaccagctgccctgggatgccaggagtgggacaggcttgggtgtccttcccaccctacctctgagggtccccaccctaagcctcgcccctccaaacctcagctttcctttctgtgcattgggatagtgctccacacccctctcctgtgtctgagggtccccaggggtggggttggatgggcagggaacacagcccccagcctgtccaaccgaattcctcccctcttcccttgctgtggcccccacaacaccagcaggcaggggttgccattggtcccattttccagaagaacaaactgagtctcaaggcaggggatggcttgtctgaggtcccaccgggagcaaggggtggaggtggaattaacacaggtctgtgctcgggatgtttcgccatgaagggggataagggagatccagagagaggtcgaaaggaagggaaggggtgaggcctctccacacagccacttctcacatcctgggttaacgatccactcgggtggggcccgagtccggccaaagtcccttcccggggccccaatacccactttcaaggtcccaggggacacagagacagcaacagagatggggagacagagacagagggcggggcaggagacaaccagagggaggtcaggcaagtttcgaagacagaaggagaccgggggagagaaccagagagacgccgcgtgccccctgggcaagtccggggtgcagcccccatgccccgccccctgtgtccccaaagcctccctctccgcctcctgtgactcagtgacccggactcaaccccagcggctgccccgcccccagggaaatccgggaaagccccggaccttcggggccccaccccggggcggggagagggagaggaggggaggagacggggaagagtcccgcctccctcctccctccctcccatctccagcctgagtcatgcccccaacccgcctagcctgttccccacccatcaacccctcctcgaggtgggaggggaagtcggggggaagccaaactgctccccgctcctgcagcaccggcctcggtcgcgctgactctggcctggtgtccgtgtctcttgctatctctctttctctcaagatctctgcgcctgtctccatgtctctttctctctgtgcacctaggattttccgagcacccaccccggtgccccgcgggccccggctgggggcagggcccccaacgagtgcagagacacaatcagtggagcgctccccaccctcaccccacccccagcccctttagacccacagctgatgaggcacgtggagtggcagagatggaagaggggagggagaggaatcgttcctggccgcctgccgagtgccagtccctgccccgggtgcgtctcttcactcccactaaggaggaaacggctcagagaggggaagtgtttggccaaggtcacccagcgagtaagtgggaaccgagattccaaaccccgtcccagagatgccaaggcctcctgagagacagagaagcagacagcaactgagaggcagagagatggtgacagacacaaagagacaaaagagagagacagagacggaacagagcacacagagacaaacgcggggttgcggagagaaacacctactcagacaggagaaccagagagacagttacagactcagagatagagatgttgagagatagggccagaaagacaaaaacagaggcagagagagcggcccttggcagcaggggtggggacacccccccaccccccgaccccgcctcctctccccccacccctcctttcctctccctcccccgccgaggcctggctgccccaggcgccgcgggccgggagggggcaagcggggcgcggcgcgggcggggcgcagggcaggctgcacctcagagcggcgggagcagcggcgggtccaggaaacccctggggcgtacgggtggccccgggggggccgggggcggggaggcgggcggccggcaccgccccggccgacaaaagtcccttcagttcagccggctgcaggggaagtcccggcgcccggcgaaaccaccctcccgtgcagccgagcccagccgctctccggccgccgtccccggcggccccatgccccgatgccccgcgggggccatggacgaggggcccgtggacctgcgcacccggcccaaggccgccggactcccgggcgccgcgctgccgctccgcaagcgcccgctgcgcgcgccctccccggagcccgccgctccccgcggcgctgcgggccttgtcgtccccctggaccctctgcgcggcggctgcgacctgccggcggtccccgggcccccccacggcctggcccggccggaggcgctttactaccccggtgagtggcccccgagggtccgggccgggtgggatccacacagagcatagggtcaccagagccaggaggcagagcttgaggcacaaaccggtgtctctccagggacctgggggacaagaggatataagcccaggttccaaggatatagatatgagatcatcggggagccagtaagctgtgccttgggatctggggatttggggaccctggggggcaaagcccaggggctgagtgacgtgggggggggggggccagggacaatgcccagtggtacaaatatgggggtgtcagggaatcagggcacagagcctggtatcctaggggcaagaaagtacaagctcttaagccagatgtgtagcgttatgaggaagctgagctgggctggagaaactggggttccctgtatcctgatattattagaatcaaagggagtcagggtaacagagactggggttctaaggagacagatactgaggatctcaggatgtcacaatctcaggaaccaagatatctggagacatgggcattatgaaaacagagatggggttctgagcaccccaatatctgggatcacaaggatccaaggaaatgaaccagagctccagggacccagataccagggggtcttgaggacccaggagaacagagacccgggtttctgggtactcagttatgtggggccacaagtgatcagggtcctatttgaggtcaagatcaggtgggcaga

SEQ ID NO: 2048 - DNA, 6000 bp, Homo sapiens
agacaaggtctcactttgtcacccaggctggaagtgccgtggcatgatcatggctcactgaagccttgccctccccaagctcaagtgatcctctcacctcagcctcccaaatagctgagactacaggcacacgccaccacccctggctagtttttgtatttttagtagagatggggtcttgccattgtccaggctggtcttgaactcccgggctcaagtgatctgcccaccttggcctcccaaagtgctgggattacaggcatgagacactgagcctggcaaggaatgagccttatggagaagaacttgatttacccactccatgctctgcaggcaggtgtgtcatgtctgtgagtgcaggtgtgtgtgtgtgtgtgtatgtgtgtgtgtgtgtgtctccagggccaatttctcccttaggcccaggggcacagtgcctagggcccatgataaatttaaccgacccacggatatgggtcaggagggtatacatgtataaagttcaggaagactttgttttagtaacaaaacgagcatgtacaatctgtcaggagccttatgatatcttcccaccagtctcatgagtgggcactacatcttgttctcctttgtcgggtagggaaactgaggccccggatgtcctagctcaagttcaccaagctacttggtgatagaagcggaacataagcctaggccacctagcttctgggtctgcgatcgtgtgaggataaatgcccagtgtgttcgtgaacatgagcatccctgtgtgaataaattgacatacataaacccatttaataaatttcaaagccaggcgccgtggcttactcctgcaatctcagcgctctgggaggctgaggtgggaggatcgcttgaagccaggagtttgagatcagcctgcaacaaagtgagaccctgactctaaaaacatttttttgaataaaaaaattaggctggacacagtggctcacgcctgtaatcccagcactttgggaggccaaggtgggtggatcacttgaggtcaggagtttgagaccagcctggtcaacagggtgaaaccctttctctactaaaaatagaaaaattagccaggcgtggtggcacatgcctgtaatcccacctactggggaggctgaggccggaaaattgcttgaatctgggaggtagaggttgcagtgagccaagatcatgccattgcactccagcctgggcgaagaaacgagactctgtctcaaaaaaaaaaaaaaaaaattagtcaagcatggtggtacgcacctgtagttgttagttacttgggaggctgaagcaggaggattacttgaggccaggagttcgaggttacagtgaactatgattgcatcactgcactctagcctggatgacagagcaagatcctatctcaaaataatactaatagttcaaggaacagactttgaagcctgacaccctgcatggtgttattccagctttgctacttacttgctgtgtgactctgggtgaataacttaacctctctgggcttctgtttcccttcctgtaaaatgatcatttgtacctcacaggagtgttgtgagaattaaataagttaatataagctcttgggaagaattagctcttgttatggttgtgtgaagagctttacacgagtccctctgcaggatgcatggttgttggtctgtgtgtgtgtatatatatatatgtgtgtgtgtatgtgtgtatctatgtgtatatgtgtatatgtgtgtgttgctctcttgatctctgagtgttgtgtgtgtgtcaatgtgtgagatcatatatgcacctttagtaaagatctaggggtctctgtgtgttttgggggtctgtacctgtccttggctgtacacctgaaccctacgtcttcttgtgtgtgtagggatgtgtgtcatgtgtgttgataaccatatgacagtgtgtgtttccacatgccagtgtgtgtctgtgaagctgtttctatgtggctgtgggtgattgcccacgcgtgacctggtgagcggctgtgtggaagtctgtgttgcctgtgtcgggtgtggagtctctggccagccagggtaggtctttgcatgtttcctttattccatggaggaggagatgaggggcttggatgagacagaagaatgaggggtcactccctgtctgatgctggggccgagtcactgcctactagtggctgctgtgtcatctcccagtctctgtccctccctcctggctggtggcagacagagggggcgtggaggaacagggcagggggtgggcttgaggctggacttttgtctggaaacttgaacctccacctatgccccccacgtccctctagtcttccacatctccctacaccctccctactattggggcagggaatcaggactccctgaaaattaagaaccatcgccttggctctgccacaggcttgctgtgtagcccggagacaggccctgcccctctctcaacctgtgaaattcaatgttttaaaagtgcttcttcctttgtgcccagggctgggccaggctgtgcactgggagggaagtgctgggttctctgaggtttgtgaaatagctggtagcacccttcccagtgggtgcttaagagttgggggctgtagcatctgaaatacccaagtcagtgcaggcatagtggctcatgcctgtaatcccagcactttgggagaccgaggcaggcggatcacctgaggttgggagttcgaaaccagcctggccaacatggtgaaacccccatctctattaaaaatacaaaagttaggccgggcacagtggcttacgcctgtaatcccagcatttaagaaggccaaggcgggaggatcacctgagtttgggagtttgagagcagcctgaccaatatggagaaactctgtctctactaaaaatacaaaaaaactagccaggcatggtggcacatgcctgtaatcccagctactcgggaggctgaggcaggagaagcacttcaacccgggaggcggaggttgcggtgagccgagatcgtgccattgcactccagcctgggcaacaagagcaaaactctgtctcaaaaaacaaaacagaacaaaacaaaaattagccaggtgtggtggcgcacacctgtaatcccagctactcgggaggctgaggcaggagaatcacttgaacccaggagatgtaggctgcagtgagccgagattgtggcactgcactccagcctgggcaacagagtgagactctgtcaaaaaaaaaaaaaaaaaacgtcagattcatgaaccccatttgctaagaagatttgctcaggtagtcacctgtacccctgtgagccaagattgcaacagtacatgctaagagcagtaagaaggagattgtaaagcttagaaagacctgacaggccaggcgctgtggctcacgcctgtaatctcgacacttcgggaggccgaggcaggcggatcaccaggtcaggagttcaagaccatcctgaccaatatggtgaaaccccgtctgtactaaacatataaaaattagcttgacgtggtggcccgcgcctgtagtccagcaactcgagaggctaaggtgaggcggaggttgcagtgagccgagatcgccactgcactccagcctggcggcagagcaagactccgtctcaaaaaaaaaaaaaaaaaaaaaaaaaaaaagacctgacaagtgaaagctactaatattgccattatcatttaaaaaaaccccagacacaggtttttcagggagtttcatccaaccaggcaggtctcagaaatcagaaaagaaatggaaagggtaggaaatctggagtttgacaattctgagtttgaatttcttgtgatgggatcttgggcaagtcatttaacctccctgagtatcatttttttcttttataaaatgaagatttttctctcttaaccttccagagctgttttaaggattacaaatcttctactgaaaggcgtagcacaggagctgtgcttggcaagtgccaaatacaaggcattaattattattattagaattaataataatatcccctccctcttacacattctttgtctccgggtggattaaaaggtggaaggagaggctaccaacaccatcagaagagaggcttctctctaagtttcatttcccatctcctccaaatccgcatccctcccaaacgccggacctgtaaggccagcagggtccaagacacacatcctttgcccagcggggaagattaaagctaaagctcagagagggaaaacatttcctaagctcgcacagcgaatcaggacagaaaccaggacgagcctcggaatccctccattacctccactttcacctgagcatcacagcccgctcgggactcagtttccccacctacgtgaccacaccacactaatcagggtctccttttggagatctgctcttcttctcgaatgggggcgctgcaccatcggtagaacagggtaggtgggggcgccagaggtgaaggggacctgcaggctggggtcttccccgcccgggtcagcggggtccctgcggggctagtctaagcgcctattattaccagcccccggggcggcgttgcactgcgcaggcgcgggcggggcgcgggcgcgcgcgcgagcgagcgagggattccctctgacgtcattgctaggataccaaacaaacactccgccgcgccggccgagctccttatatggctaattgcgtcacaggaactccgggaaggcggggccgggatcccctcccgccgagtggcccggaacgcaacccccgagacccccagggccccgagggtcatgcaagtgaccagatcgagtctagaacagacctcttgctggacagtgcgggactcgatttggcggggccggagatttggggaagtttgtccagcaaggggcgggtgacgtaagcaggggggcgggtcccgggcatataaatacaggctggcgggtctgtgcttcattcataagactcagagctacggccacggcagggacacgcggaaccaagacttggaaacttgattgttgtggttcttcttgggggttatgaaatttcattaatctttttttttccggggagaaagtttttggaaagattcttccagatatttcttcattttcttttggaggaccgacttactttttttggtcttctttattactcccctccccccgtgggacccgccggacgcgtggaggagaccgtagctgaagctgattctgtacagcgggacagcgctttctgcccctgggggagcaacccctccctcgcccctgggtcctacggagcctgcactttcaagaggtacagcggcatcctgtgggggcctgggcaccgcaggaagactgcacagaaactttgccattgttggaacgggacgttgctccttccccgagcttccccggacagcgtactttgaggactcgctcagctcaccggggactcccacggctcaccccggacttgcaccttacttccccaacccggccatagccttggcttcccggcgacctcagcgtggtcacaggggcccccctgtgcccagggaaatgtttcaggctttccccggagactacgactccggctcccggtgcagctcctcaccctctgccgagtctcaatatctgtcttcggtggactccttcggcagtccacccaccgccgccgcctcccaggtaagtttttgatagtaggggtgctgctttgtaggttttattttttaagtcaagggtgaaaagaataaaccccaacccccacaaaaaggcgcatcagaaccctagatctgagatggaaaaggctcacagcgcactttgcaaactgcaaagagtcgggagatgtttgcaattggttgcgtgcgtggagcgcaaggagggaacgcggcagggagggtaggctttggggcgaggtgggggtggggtgggtaatgcgctgctcaatgcaacgtgtatgcggtagcggggctgagaactttgagccggccccgggactgccccct

SEQ ID NO: 2049 - DNA, 6000 bp, Homo sapiens
accgacaaaagtcacagcagatcacaggaagacgctgcaagcggcctaacacctctcaggagaccacagtggaccaaagttgggaagcagaccagactagatggagacgaacaaccactccgaccttttcaatctccaactatattgacctgacgcctcacctcctcacatgcagactcaccaaacatctattaggctatggtttactgtcacctgtgcaacccccacccttcccaggctgtgtcctttgccaaaagtcaccatcaggtccatggatctgcccatgaatctgcacaccgacaacttctttcaacttcttctcttctggatcaataagaatgagtattttctgatttgtcactgttctaaatgcatcgaccttcatcatgccaaggaaaatggcgggcaggtaaaagggcgggtggggagcatggccaaaaagaggttagttgaaaacaagatgataacttaaatgaggaactttgatcagattagtttttaagtctttacaaagattttctaggcagggcaagagcccttgaaaacatgttactaccttgaaagcagttgtctaccgccatctcctgctccagtccccccactccaaatggcatattaactgtgccagaaggccaaggctaccacctcacatttctgtagcacccaatcccatcatgaaagcaaatggcaatgctggagttagggcctctgctagcctcagagaaatctgacagtctttaagaacatcggttaccagttaaggtggaaaaatcagctctctattctgtgtgtcctctctccctattatgtaaacttaggcttttggcatgcaggaacttttcatgctgccaatgatattaaaactctgggacacacatttaagcagtactgcatacacagttgtttttattcttaattatctgtcacttccatattaataaaaaacaaaacaactattgacaccaacatgggtaacacaaactctaagataaattcagaaaattaatcatgacacacaaggctaaaaatttaccaacggaaatgaaccaaaaatctttaagtcaataatggtgaaaacccatgccatacatagattattaaaattaccagattctgtcagaaaattttaaaaagttcaagggaccatacaaatctactatcagccctcttcactgtctcatatacaaatgccctaatatttgatgagtgaatggtccaactctgtagatgacagtgaatgtttttatttcaaatgtgtccacacagaattatttctaaataagtactaaaataaacaaagtttgatcatagcacagttaagaaagtccttccagtaaatgctccttcacagttggatggctactttaatatacaattgccctaggccacagcagggaaaaaaatcaggcttttgatttacttaagaaataaaataaataaacctagaacatgcaaaagatcccctttcccaagttaaggaaggaaaatggttggacagattttctgtaaaaaccacctctacccctgaatgaactaaatacccccccacaaccatagagtcattaaagaaaatcgctcaggaatggtagccaagacgcatttctcagataataagactaaaaatccaatcacatccgccagttcctggcacccctttctaactctacccaatcaggtcactcaaaaagcttaaggaatgtcagggcccacccacacaccccttgtacggcaggcaaagagccccagaatctagcatggatctgcccagaggcactcagctcctgtggcagggagtgcctgcaataccagagggcagaaatctgagtgacatttggcactctctctttcaacaaacaaccgcaaagtgctttccaaacccaagccctcaccattttgaagaccaggaagctggagcctttcccggggcaaagatgaaaaagaaataagcccaccttccccatcccctcccacaaggtcacactgcaaaccagaggccattagggaaggcaatactgtagcttccctaggtccaactgtggccataacccctggtgggatcgggataatttgagaactggcatttccccagctagaggtaaaactatatattgaaataacttgttagctgggggggaggggcgaaggcgggggggaagggaaggacactcctagggttgctggcttagaggtggaaggggagagagggtactctatgcaatggctcagagaaggaaggagggaaagtgagaaagagaataaagatctgcgagcagctgcaatccccttttccaaaggacacaaagctgcaaagcccagagataggaagggagagagcaaacagcagaggaaagaaaatggggcaatggaaaaagatctacctccccccacactactaacctagtggaagtgggggaaatgggggagacactcccagactccagagagtagtaacaatcaaccaacccccacctatttacccagatctctcaggatccctggggagagaaccctcagggttagggcgcagagagagaatctgcagtctcagagcctggagagcctaaggcccaatccagcccctttgcctctgcagcagagggatggaaagaaagatatgcctgaaaggggaagtgctcaatggggaatgggtgggccacgggtggtgagctgcgaggagcaggtctgataggaactaaatgggaagagaaggagcctggcaggatacaaggggaaggaaaaaaaaaaaaaaggtgaggaaggaaacaagtccaagaggaacagaattgggagagggatatcaaaggggagtgataatctatcacagcactgaggcagctccaagaggaaggtgggggggaatacataggaaagaatgattaagaagacatcgtaatgtcacaattggagtgagaactccaaaagaagacaagaggcagaacagtggagggtgggcaaataaagcagagtgaagggtgagggctgaatcaaaatggtggggggaagagactgtcatgtggaaaacttaaaagactcgggagggaacagagaggggacacagtgacaagaaccccagtgttaaaggaccgctccaagaaaggacggcaatacagaagttaaaaaccggtctaaaaatatgcgggcaagtggacagctccgaaggagccgagctggggagggaaacactaaataaagaggatggagcagaattgaaaaaaacgagaagaaagtgtaggtacaaaatggatctaggggcaggtctgtgagatgcagaacaggaaggggatgggtgaccagcccgggaggtatcagaggtatagtgaggttaaagggcatgtctaagggctaaaacggggaggagaggaattggagcaaagaggggacaggaagcagttttcaggcagagaactgaaggagagacaggccaaagaaaggagaagcaaatgaatgcagtagctcagaggagtgccaaaaaggaggtggggaagagaggaaacctccaagagaacacgggctgaaactgaaggcagtctgagttagggatacatcatttaagtgaatagcagaaatgggagacctgcagagtcagagaagggggaggaggctgcttcccgggaaggcagagtcagaagcaagcaggtgaggggagcgcagcaagatctgaggtcgggcaaggggcagagctgagaggcagaaaggtctggaagagaggaaagggtctgaatggtaaacgggaacaagagctgagaaggggaacaggcaagcacggtgcagccaagtccgaggggatcaggggaatgagctggggcacggaagggtcagaaagccagccgaggggcatcccggggtgcagcaggctctgcgagagggcagacaagaaatgcgggtagtagggcccacgagggaacgggattcagtccaaggggaagacctggggcagcagtgcctggccgaacaggggtctcagatggatctccaaagggttggaaccgcaggtcctaaagggacagctcccagggtgcaacagattctgagacaggaataatagcacagaaggtaggtcaaagaaggggccgaggacagatctgaagggtggtgagagcagaatcgagaagagggagaagcgtcacggatctcaaaagtgggagccacaattaagagatgcagaatggtcaatgaggagaagatgggtcccaggagcactgcagagcccgggaggagcgaagggcattatggaggggtggaagggggaaggggggcgcagaattgggaaccggttggctgaagtcgggtaggctccgaggcagacaccgagatcccaacgggtcggggatgggggcggcggcggggacagcagggctggggcgggcaggggcaggtccaaagggcaggagggccccacgggccgggccgacgcgcgaagcgacggggacggcggggcccggggggctggggggggggccgctcctcccctccccctccagctcctccattgttcgcgggctccgggccccgccgtccccgcctccccctggaccccgcagcggggcggcgcccggcctcgccgcccggggcccgtgagctcgcgcactcaccagctgggcgccctcagcgcggccccggcctccaaaatcccggcagcaacgacgggggccccggcgccatgttcccctgctcctagtccagcggcggctgaggcggcggcggcggctccggcggcggggggccgggcggaccctccctcgcgggttccctcctccgcctcctccacctcctcctgccgccgcgccgcggctctccctcggggcggggggcggggaggggaaggggggaggggcggcaaccagggggagggcggaccagcctcgctcactccctccctccctccctccctcgcaatggcggcagcggcggcacctccttcctgcgacggccgctcccgcgcgcgcgccccctcgctactgcgcgtgcgcggcgcgtggaccgttgcaggggtataacggcccctgggcgcgcgccgcgaagggacaaccagcgaggcagtgggaagaggtcagagcgcgtgcgcacccgaggggcttactgccacagccgctgcctgaggttaggaacggccgcggacggtgcagtgcgcgtgcgcccccgaaaatgccgctattgcggcggccgccgtcgcgactgagcgcgaggcgacttgcaaacgagcagagggagcgggatgggcgagcgcgcgtgcgcggggggctgccagccggcgcagctgctggcgcagggcggagggagtggtccgcaggagctgcgcgcgcgtctcaagcagccgatctactgcctcgcgctggctcctggagaaagccgaaggagagaggcatggcccggttttgggggtggggggcgaagggcgcgatcccgctcgcgcgggacctgaccagccaatgggaagcaatgggaggtgggtttgccgcgcgagccgcagccgccgggataacggaggaggccagaaggagcgacgtaacgtggggcggtggggcggggctgagaaggagggagcgcaccagagagggagttgattggaggatatgaggaggcgtggcccgcctcagcccaatccgagccccgcaattcgtcgtcccggaagaagaggcggggctggagagcgcgtgctctttctcctggctgtgaagaaaatctgcagccaacgcgcgcgtccatgcaacttgtttttggttctgtgaacgactgatccccaggagagggaagacggcctggtcctgtgtgcagcccaagcctgtcacttagcattgtgcaaatggctacaaatcgaatgtcaattagggcgcctgaagggaaaagagtagtgatgggagagggcaccgctgtaacccttgactcctctgaactgaggaggtgttcctctgggactcctccggaagtacagatcgtggaagatgagcttcccgggcgccgagccaatatttgtggaatgcatgaagaaaggctgtttcc

SEQ ID NO: 2050 - DNA, 6000 bp, Homo sapiens
tgcgtcgatctactaagcaaggggcccaggcactgggattccgcggtgaatctgagcatccccgcctcccgttcctgcctcgtgattggctgcccttgggccaatggctgaagagtccaccgctctgccagcccccgcggcaatcctccagctgcagcttcccctgttcggtttgcaggcggcgctgtgggctcactgactcctccgtcacacgcagacctggtccccaccctctctgattctttcagactcttaggaatgaatagagtgtataccccagagtcccaccctctttacaaaatccttttgtgaatttttctgcctgtgcaggtttccaatacaggtccagaatcccacgcccgcctcttatcaaccaacaccagcggctctcccgttaatgtgacctccagccattcggcccgtaggccgatgcttgggaaatcttgacagcggcccaagccggcagtcggcacttctctcggtcggttaattgtttactcgtttgtttatttatcctggagtggaggctagccgggtgcgcggaggcggctgcccccagggaagcccgcttcctgtggttggcttgctcaactactatccgccctcttgcgcactggaaaaaattgcagagctgggaatgcaccccttgatggttccgttcatgcagtaaaacaatgcctgggcccctgccttgtgcctggatccgtgctagggacatcgacgatgactgaaacagccctggccctgccctcaggggccttgcagtccgatgggaaagacctatcaccagatatggaccacccaaggtggccagggcttggacgggagacctaaagggactgtgggagcttggaaggagcagctgacccagcctgttgcatcagagaaggcctcctggaagaggggacatctgagctagcatctcaaagaaggctagaaggacaaccatgtagtctctggctaccatgtccccagtgcctaccacccccttgtttagcattggatttttttttttttttttttttttttttttgagacggagtctccttctgtcacccaggctggagtgcagtggtgcgattttggctcactgcaatctccatctcccgggttcaagcgattctcctgcttcagcctccctagtagctgggattataggcgtgcaccactatgcctggctgatttttgtacgttttgtagagacagggtttcgccacgttgtccaggctggtttcgaactcctggcctcaagcaatccacccgcctcagccttccaaagtgctgggattacaggcctgagctactgtgcctggccgactcattcacttttatttattaacaagttttaattgtgggtcattggccagactttggaactagccagggtcccctgccttcagagggctcacacataaaatggtgataccaacacagaacttcatttaatctttttagagacagggtctggccttgtggcccaggctggagtgcagtggcacaatcatagctcactgaagccttgaactcctgggcttaagtgatctttcttcctcagtctcctaaagtgctgggatccaacacagaactgcaaaccttgaaccctgaagaaatgctacgtgtagcaacgtgacccaattgtctgggtttgtgtctcaaacctgctgcttactagctgtgtaacttttctgtaccttataacttactcataaggttgttgtgaggattcagtgagttaatgggtctaaagtgcttttagactgctgcctggcatgtccaggcatggcggctcatgcctgtaaactcagcgttttgggaggctgaggcaggaggcctgcttgaggccaggagtttgagaccaccctgggcaacatagcaagactccatctctaccaaaagaaaaaaaaaattggccaagtgtcatggtgagagcatgtagttccagctgctcaggaggattgcttgagcccaggaagttgaggctgcagtgagccatgactggtccactgcactccagcctgggcaacagagcaagaccctgtctcaaaaaaaaaaaaaaaatccacacacaaaaaaaaacaaataaaaagaatgttgactagcctggccaacatagtgaaaccccgtctctattaaaaatacaaaaatttgccaggtgtggtggcacacacctgtagtcccagctactcgggaggctgaggcagaaaaatcgcttgaacctgggaggtggaggttgcagtgagccgagacctcgccattgcactccaacttggatgccagagtgagactccatctcaaaaaacaaacaaacaaacaaacaaaaaagactgttgcggccaggctcagtggctcacacctgtaatcccagcactttgggaggctgaggtgggtggatggcttgaggccaggacttcgggaccagcctggcccgaacaggtgaaaccctgtccctactaaaaatacaaaaattagccagatgtggcgcctgtagtcccagctactcaggaggctgaggcagaagaatcacttgaacccgggaggtggaggttgcagtgagccgagatcacaccactgcactccagcctgggtgacagaacaagactctgtcttgagaaaacaacaaaaacaaaaattagcggggcgcacgctggtaatcccagactctgcctcaaaataaaaaataaaaataaaaaaagactgttgcttggcacgaagtactcatttttattattaaagaacgagggatcaggccaaatctgggagactaccctgagaaggtgacttcaagctgagagttgaagggtaaatcagagctgatgggctcccaaggggtttgggggatccagagtgagcccaagcgtccttgttctccagatgctgccagctcacaaatttaagattgaaaagactcggaacactgcataggcgttgtaaagacattaatttgaaatacaggtatcaggaattcactgccccccaccttgtctttcctgtgtctcctcaagtaatctcaaaagtcccttacacatcacggtttgtaatgacagtccacgcactcgatttggcagccccgcagtgcttaaagaaaagttgttgttgtttcaagccactaacatctaaaaatcagactgaatgcattaaaagtgcctttttttttttttttttgagacggagtttccctctgctgcccaggctggagtccagtgctatctctgctcactgcaacctccgcttcccgagttcaagcgattctcctgcctcagcctcccgagtagctgggattacaggcgcccgtcacgacgcccacctcatttttgtatttttagtagagacggggtttcatgttggccaggctggtctcgaactcctgaccgcaagtgatccgcccgcctcggcctcccaaagtgctgggattacaggcatgagccaccgcgcctggccctaaaagtgctacattaaaaaaaaaaaaaaagtcaatggaaacatcctttaatataaaaatctttattaatggaataaacaagcccctgtaattttatttatcaacgcttacagagcgcttactatgtatgcaatgcatgatttcaagagctttgcaaaatataatctatttaattttcacagcagccctacgagagaggtacgattattatcccattttatagatgaagagactgatggcagaaatgccaaatgtaataggaaacagcctttcttcatgcattccacaaatattggctcggcgcccgggaagctcatcttccacgatctgtacttccggaggagtcccagaggaacacctcctcagttcagaggagtcaagggttacagcggtgccctctcccatcactactcttttcccttcaggcgccctaattgacattcgatttgtagccatttgcacaatgctaagtgacaggcttgggctgcacacaggaccaggccgtcttccctctcctggggatcagtcgttcacagaaccaaaaacaagttgcatggacgcgcgcgttggctgcagattttcttcacagccaggagaaagagcacgcgctctccagccccgcctcttcttccgggacgacgaattgcggggctcggattgggctgaggcgggccacgcctcctcatatcctccaatcaactccctctctggtgcgctccctccttctcagccccgccccaccgccccacgttacgtcgctccttctggcctcctccgttatcccggcggctgcggctcgcgcggcaaacccacctcccattgcttcccattggctggtcaggtcccgcgcgagcgggatcgcgcccttcgccccccacccccaaaaccgggccatgcctctctccttcggctttctccaggagccagcgcgaggcagtagatcggctgcttgagacgcgcgcgcagctcctgcggaccactccctccgccctgcgccagcagctgcgccggctggcagccccccgcgcacgcgcgctcgcccatcccgctccctctgctcgtttgcaagtcgcctcgcgctcagtcgcgacggcggccgccgcaatagcggcattttcgggggcgcacgcgcactgcaccgtccgcggccgttcctaacctcaggcagcggctgtggcagtaagcccctcgggtgcgcacgcgctctgacctcttcccactgcctcgctggttgtcccttcgcggcgcgcgcccaggggccgttatacccctgcaacggtccacgcgccgcgcacgcgcagtagcgagggggcgcgcgcgcgggagcggccgtcgcaggaaggaggtgccgccgctgccgccattgcgagggagggagggagggagggagtgagcgaggctggtccgccctccccctggttgccgcccctccccccttcccctccccgccccccgccccgagggagagccgcggcgcggcggcaggaggaggtggaggaggcggaggagggaacccgcgagggagggtccgcccggccccccgccgccggagccgccgccgccgcctcagccgccgctggactaggagcaggggaacatggcgccggggcccccgtcgttgctgccgggattttggaggccggggccgcgctgagggcgcccagctggtgagtgcgcgagctcacgggccccgggcggcgaggccgggcgccgccccgctgcggggtccagggggaggcggggacggcggggcccggagcccgcgaacaatggaggagctggagggggaggggaggagcggccccccccccagccccccgggccccgccgtccccgtcgcttcgcgcgtcggcccggcccgtggggccctcctgccctttggacctgcccctgcccgccccagccctgctgtccccgccgccgcccccatccccgacccgttgggatctcggtgtctgcctcggagcctacccgacttcagccaaccggttcccaattctgcgccccccttcccccttccacccctccataatgcccttcgctcctcccgggctctgcagtgctcctgggacccatcttctcctcattgaccattctgcatctcttaattgtggctcccacttttgagatccgtgacgcttctccctcttctcgattctgctctcaccacccttcagatctgtcctcggccccttctttgacctaccttctgtgctattattcctgtctcagaatctgttgcaccctgggagctgtccctttaggacctgcggttccaaccctttggagatccatctgagacccctgttcggccaggcactgctgccccaggtcttccccttggactgaatcccgttccctcgtgggccctactacccgcatttcttgtctgccctctcgcagagcctgctgcaccccgggatgcccctcggctggctttctgacccttccgtgccccagctcattcccctgatcccctcggacttggctgcaccgtgcttgcctgttccccttctcagctcttgttcccgtttaccattcagaccctttcctctcttcca

SEQ ID NO: 2051 - DNA, 6000 bp, Homo sapiens
aaatgggaaactttgaagtcctgtgtttctgtttttctaatgaaatatctctgtacagctcaaagataaaagtaattaccatttttaaaggatccttctttcccctctgttttaactcttccatttaaaaaggattagcactggaaaattattagaatggacattcagattctgttgtgtatcttagttgcctgctaagaacactggttcccatcacatttaaactctaaagacattgtgaagtctggatatgcccggtctcctactttctctttctttgtggccttcagatcattaaatttagtgactcagctaattttttttacccacctcttagaactaagttgaatgtatttgtgaccaagcacttaaagttatttcctctaaaccaagtgtttgagatgtttttagatttataacagtctttgtttaccgtgtaattcagtccaattgaggaactagtaaaactgcattatctagacatcaaagctaagaagagtatacttacaccaagaaacttattaggtttctaacaagtggaaagttaccaggtgtcccaaaattaaccacttccatgccagctgattttcactttttgtagctattttaatgatcagcagcattctgggtttaaaaataacagtcgtggctgggcacagtggctcgtgcctatgatcccagcactttgggaggctgaggtgtgagtgggaggattgcttgaggccaggagtttgagaccagcctgggcaacatagcaagaccccatttctaaataataataataataataaattagccaggcatgatggcttgcacctgtagtcccagctacttgggatgctgaagtgggaggatcacttgagcccaggagttggaggctgcagtgagctatgattacagcactgcactccagcatgggtgacagagcaagactccatctcataaaataaaataatcagttctacattattcagagttgagtgttgctttctttagcatccttcaaataactgaaaatatgccattaaaaaatataaccaaggtgttgaatggataatacattttagttcatttcaaaatagagccaatatctttatttcttgaggtttgagagcaggctggtgttttgttctgtttttccttcagatttctgtgaagggataaatattagacccactttacagagaacagttgagtcacagacaagggatgacttgccaattgcatgcagaggtcactttaagtaggaccagtgctaccaagttgcatttcaagattggtaaccttaagacctgacagaccctggggtcaggaattgatagagaaggactctgttagatgaggacccatgacttcctcaacccttcatcagcactcctgtctgaggctctgttcaacctaagtttcttcatggattgaaacaaaattatatgtgcatattacagagtaattgattgtgtacagatgcttcctttaggtatttcagaggatgtgtgtaaacatgctttagatattcataagcatcttataattttgtttatgtaagcaatcgcctagaaaagtagaggatgcgaaaggtttgtttttctttcccgtggataccttgcttgttcctgctgaattctagaacatggcatctttaggaacatgccattatctggaggcaattgcctacagtcattgagatttttctttttaaaatgtagtttttgcatactacgtctagtcacattttgtttccatagagggtttggctttctgggatatcagaaggaagctatggatgtttggaaaaggtctgtgaccttttgaggttatcatcacaggggacaattgcactctcccattcattgctccctggtgtcagtcagaataatgcgtggtggtctgacttccagtggcatttcttatgcaataggcttacaaaaacataatgaggtcatggcaagcctaggttcctacagacataaatgagattcagaagaaaattgctctgttcatttcagattctcctctttgtgattgtcttgagagaatgttcatttggctgcaggttcagtgcttgcacagttatattggagtatctaagtaaactgaagtgcagcataaactgtcgtagctggaaagttgctaaagactgtaagccataacagtttgtttaacttaagctgttaaaactttaggttctttaaggtgccatttttttggccacattctgtggttccccatagccttcaggaaggaatccaaactcttttttttttttttttttttttttaagatggagtctcgctctgtcgcacaggctggagtgcagtggcgtgtctcggctcactgcaagctccacctcccgggttcactccattctcctgtctcagcctcctgagtagctgggactacaggtgcccacctccacacccagctaatttgttgtactttcagtggagacggggtttcaccatgttagccaggatggtcttgatctcctgacctcgtgatgcatccgcctcggcctcccaaagtgttggaattacaggcgtgagccaccgcgcccagcgaaggaatccaaactcttaaagtggtttgatccagtccctggttccttgctaatgcatcttacccattctttccccacacacactttgttccagttggttctcccaactggcagtgcttttttttgcggagggaagggtctgtgcacactctgtccctctgtcttaaatgcacttcatacttcaggtctcacctgagatggaacttcctacagaaaggctttcccgaatctgaaaggctgggcttggggaccttttaatatgctgaatcatcattcagttattgattctttcagtgaatatttgtgtcaagcactgtgtcataggctgaggacacagaatagaactaaacaggggacaggcctcacagagcttgcattcttgtcagggaaaccatctcgtatttacacacttaatttttttttatttggaaatgattgaaaacttgtaaaaatagcacaaaggaatatcctatatgctttacccagattcatctatttttttttttcagattcatgtgttgttaacaatttaccaccccatttgtgttcttactctttctgtatacataatttttccagtgggatcagttacgtacattatggcccttcccctcaaaatactaaggtgtcagtttcctaaaagtggagacattttcacatgatagattttatagatttacattgataaaatattttatttgggaggatttatccttcctgcatttcttttttttttcaatcttttttttactgtgttaaaatacacaaaacataaaacttgccattttaatcatttttaactatacagttcagcgatattaaatactttcatgttatgcaactatttctgtaacactttccatcttgtaaaactgaaactctgtacccattaagcagtaacttttcattcccactttccccagcccctgacaaccactgttctactttctgtctctatgagtttgactactcttaagtactgcatataagtggaatcatatagtatttgtctttttgtgactggcttatttcacttagcacaatcaagattcagccatgttgtcagaatttccttccctttaaaggctgaataggccaggcgtgatcgcttacgcctgtaatcccagaactttaagaggccaaggcaggcagatcgcctgagcctaggagtttgaaaccagcccgggcaacatggtgaaacctcgtctctactaaaaatacaaaagttagctgggcacggtggcgcatgcctgtaatcccagctactcgggaggctgaggaaggagaatcacttgaacccaggagacggaagttgcagtgagccaagatcgcaccactgcactccagcctgggctacagagcaggactctgtctcaaaaaataaaataaaaataaaggttgaataatattatattgtatgtatatatcacattttgcttatccattcatgagtaggtggatactttgggttgcttccatgttttgttgttgttgctgttttgagatagtcttactctgttgcccaggctggagtgcagtgatgagatctcagctcaccacaaccactgcctcccaggttcaaatgattctcctgcctcagcctcccaagtagctgggattacaggcacatgtcaccacacccagctaatttttgtatttttagtacagacggggtttcaccatgttggccagactggtcttgaactcctgacctcaggtgatccgcccaccatggcctcccaaagttctgggattacaggcgtaagctaccacgcccggcccaggttcctgtttttgcagtgggtttataattcattaccatacttaattattgtggcgctcaaattgtcccagagttggccagtgggagccccttcaggctggcttctgtgtccttgtgagatgctccatcgttttttttcttgcataaaaagatgttccaggctcattttgtccctatcctgccctaaccctggaatcagccctttttccagggagccctcacacccttgttttagcacttagcacactgtttacttatgttttcctccactggactagattgtacctctctggggacacatagatgtgagtcttacttgctcttgtatcttcacccagcacaaggcctgacacatgagatgtttactaaatatttgttgaataaaaaattaatttttactgtagttaattgattaaaatttggttctaaaattatgatgctgatgggttttctttttttttcccccatctaggaagaaatgttggctatttggcgatgagaggtggtgaacagtgaccatactggtatacaacactatgggacctggcatttttgctgcatgtccagcccacccccactaataatgtaggaagctgtctggtccattggaaacactaatctgatctcagaagtggctgatcgtggcaggatgtgtcgacgatgatgatggcaagaaagcaagatgtccgaattcccacctacaacatcagtgtggtgggattatctgggaccgagaaggaaaagggccagtgtgggattggaaagtcttgtttgtgcaaccgcttcgtgcgcccgagtgctgacgagtttcacttggaccatacctccgtcctcagcaccagtgactttggagggcgagtggtcaataatgaccactttctctactggggagaagttagccgctccctggaggattgtgtggaatgtaagatgcacattgtggagcagactgaatttattgatgatcagacttttcaacctcatcgaagcacggccctgcagccctatatcaagagagctgctgcgaccaagcttgcatcagctgaaaaactcatgtacttttgcactgaccagctggggctggagcaggactttgagcagaaacaaatgccagacggaaagctgctggttgatggttttcttcttggtattgatgttagcaggggcatgaataggaactttgatgaccagctcaagtttgtctccaatctctacaatcagcttgcaaaaacaaaaaagcccatagtggtggtcctgactaagtgtgacgaaggtgttgagcggtacattagagatgcacatacttttgccttaagcaaaaagaacctccaggttgtggagacctcagcgagatccaatgtaaacgtggacttggctttcagcaccttagtgcaactcattgataaaagtcggggaaagacaaaaatcattccttattttgaagctctcaagcagcagagtcagcagatagctacagcaaaagacaagtatgagtggctggtgagtcgcattgtgaaaaaccacaatgagaactggctgagtgtcagccgaaagatgcaggcctctccagaataccaggactatgtctacctggaagggactcagaaagccaagaagctgtttctacagcacatccaccgcctcaagcatgagcatatcg

SEQ ID NO: 2052 - DNA, 6000 bp, Homo sapiens
ggcctcccaaagtgttggaattacaggcgtgagccaccgcgcccagcgaaggaatccaaactcttaaagtggtttgatccagtccctggttccttgctaatgcatcttacccattctttccccacacacactttgttccagttggttctcccaactggcagtgcttttttttgcggagggaagggtctgtgcacactctgtccctctgtcttaaatgcacttcatacttcaggtctcacctgagatggaacttcctacagaaaggctttcccgaatctgaaaggctgggcttggggaccttttaatatgctgaatcatcattcagttattgattctttcagtgaatatttgtgtcaagcactgtgtcataggctgaggacacagaatagaactaaacaggggacaggcctcacagagcttgcattcttgtcagggaaaccatctcgtatttacacacttaatttttttttatttggaaatgattgaaaacttgtaaaaatagcacaaaggaatatcctatatgctttacccagattcatctatttttttttttcagattcatgtgttgttaacaatttaccaccccatttgtgttcttactctttctgtatacataatttttccagtgggatcagttacgtacattatggcccttcccctcaaaatactaaggtgtcagtttcctaaaagtggagacattttcacatgatagattttatagatttacattgataaaatattttatttgggaggatttatccttcctgcatttcttttttttttcaatcttttttttactgtgttaaaatacacaaaacataaaacttgccattttaatcatttttaactatacagttcagcgatattaaatactttcatgttatgcaactatttctgtaacactttccatcttgtaaaactgaaactctgtacccattaagcagtaacttttcattcccactttccccagcccctgacaaccactgttctactttctgtctctatgagtttgactactcttaagtactgcatataagtggaatcatatagtatttgtctttttgtgactggcttatttcacttagcacaatcaagattcagccatgttgtcagaatttccttccctttaaaggctgaataggccaggcgtgatcgcttacgcctgtaatcccagaactttaagaggccaaggcaggcagatcgcctgagcctaggagtttgaaaccagcccgggcaacatggtgaaacctcgtctctactaaaaatacaaaagttagctgggcacggtggcgcatgcctgtaatcccagctactcgggaggctgaggaaggagaatcacttgaacccaggagacggaagttgcagtgagccaagatcgcaccactgcactccagcctgggctacagagcaggactctgtctcaaaaaataaaataaaaataaaggttgaataatattatattgtatgtatatatcacattttgcttatccattcatgagtaggtggatactttgggttgcttccatgttttgttgttgttgctgttttgagatagtcttactctgttgcccaggctggagtgcagtgatgagatctcagctcaccacaaccactgcctcccaggttcaaatgattctcctgcctcagcctcccaagtagctgggattacaggcacatgtcaccacacccagctaatttttgtatttttagtacagacggggtttcaccatgttggccagactggtcttgaactcctgacctcaggtgatccgcccaccatggcctcccaaagttctgggattacaggcgtaagctaccacgcccggcccaggttcctgtttttgcagtgggtttataattcattaccatacttaattattgtggcgctcaaattgtcccagagttggccagtgggagccccttcaggctggcttctgtgtccttgtgagatgctccatcgttttttttcttgcataaaaagatgttccaggctcattttgtccctatcctgccctaaccctggaatcagccctttttccagggagccctcacacccttgttttagcacttagcacactgtttacttatgttttcctccactggactagattgtacctctctggggacacatagatgtgagtcttacttgctcttgtatcttcacccagcacaaggcctgacacatgagatgtttactaaatatttgttgaataaaaaattaatttttactgtagttaattgattaaaatttggttctaaaattatgatgctgatgggttttctttttttttcccccatctaggaagaaatgttggctatttggcgatgagaggtggtgaacagtgaccatactggtatacaacactatgggacctggcatttttgctgcatgtccagcccacccccactaataatgtaggaagctgtctggtccattggaaacactaatctgatctcagaagtggctgatcgtggcaggatgtgtcgacgatgatgatggcaagaaagcaagatgtccgaattcccacctacaacatcagtgtggtgggattatctgggaccgagaaggaaaagggccagtgtgggattggaaagtcttgtttgtgcaaccgcttcgtgcgcccgagtgctgacgagtttcacttggaccatacctccgtcctcagcaccagtgactttggagggcgagtggtcaataatgaccactttctctactggggagaagttagccgctccctggaggattgtgtggaatgtaagatgcacattgtggagcagactgaatttattgatgatcagacttttcaacctcatcgaagcacggccctgcagccctatatcaagagagctgctgcgaccaagcttgcatcagctgaaaaactcatgtacttttgcactgaccagctggggctggagcaggactttgagcagaaacaaatgccagacggaaagctgctggttgatggttttcttcttggtattgatgttagcaggggcatgaataggaactttgatgaccagctcaagtttgtctccaatctctacaatcagcttgcaaaaacaaaaaagcccatagtggtggtcctgactaagtgtgacgaaggtgttgagcggtacattagagatgcacatacttttgccttaagcaaaaagaacctccaggttgtggagacctcagcgagatccaatgtaaacgtggacttggctttcagcaccttagtgcaactcattgataaaagtcggggaaagacaaaaatcattccttattttgaagctctcaagcagcagagtcagcagatagctacagcaaaagacaagtatgagtggctggtgagtcgcattgtgaaaaaccacaatgagaactggctgagtgtcagccgaaagatgcaggcctctccagaataccaggactatgtctacctggaagggactcagaaagccaagaagctgtttctacagcacatccaccgcctcaagcatgagcatatcgagcgtaggagaaagctgtacctggcagccctgccattagcttttgaagctcttatacctaatctagatgaaatagaccacctaagctgcataaaagccaaaaagctcttagaaaccaagccagaattcttgaagtggtttgttgtgcttgaagagaccccatgggatgccaccagtcacattgacaacatggaaaacgaacggattccctttgatttaatggataccgtccctgcagagcagctatacgaggcccacttagagaagctgaggaacgaaaggaaaagagttgagatgcgaagggcgtttaaagaaaacctggagacttctcctttcataactcccggaaagccttgggaagaggcccgtagttttattatgaatgaggatttctaccagtggctggaggaatctgtatacatggatatttatggcaaacaccaaaagcaaattatagataaagcaaaggaagaatttcaggagttgcttttggaatattcagaattgttttatgaactggagctggatgctaagcccagcaaggagaagatgggtgttattcaggatgttctgggagaggaacagcgatttaaagcattacaaaagctccaagcagagcgtgatgcccttattctgaaacacattcattttgtgtaccacccaacaaaggagacatgccccagctgcccagcttgtgtggacgctaagattgagcacttgattagttctcggtttatccggccgtctgaccggaatcagaaaaattcactctctgaccctaacattgatagaatcaacttggttatattgggcaaagacggccttgcccgagagttggccaatgagattcgagctctttgtacaaatgatgacaagtatgtgatagatggtaaaatgtatgagctttccctgaggccaatagaggggaatgtcaggcttcctgtgaactctttccagacgccaacatttcagccccacggctgtctctgcctttacaattcaaaggaatcgctatcctatgtagtggaaagtatagagaagagtagagagtccacgctgggccggcgggataatcatttagtccatctcccccttacattaattttggttaacaagagaggagacaccagtggagagactctgcatagcttaatacagcaaggtcaacaaattgctagcaaacttcagtgtgtctttctcgaccctgcttctgctggcattggttacggacgcaacattaatgaaaagcaaatcagtcaagttttgaagggactcctggactctaagcgtaacttaaacctggtcagttctactgctagcatcaaagatttggctgatgttgatctgcgaattgttatgtgtctgatgtgtggagatccttttagtgcagatgacatactttttcctgtccttcagtcccaaacctgtaaatcttcccattgtggaagcaacaactctgttttacttgaactaccaatcggactgcacaagaagcggattgaactgtctgttctttcataccattcctcctttagcatcagaaagagccggttggttcatgggtacattgttttttattcagccaaacgtaaggcctctttggctatgttacgtgcctttctttgtgaagtgcaggatattatccctattcagcttgtagcactcactgatggcgctgtagatgtcctggacaatgacttaagtagggaacagctaactgagggggaggagattgctcaagaaattgacggaaggttcacaagcatcccctgtagccaaccccagcataaacttgagatctttcacccattttttaaagatgtggtggaaaaaaagaacataatcgaggctactcatatgtacgataatgctgccgaggcctgtagcaccaccgaagaggtgtttaactccccccgggcaggatcaccgctctgcaactcaaacctgcaggattcagaagaagatatcgagccatcttacagcctgtttcgagaagacacatcactgccttctctgtccaaagaccattctaagctctctatggaactggagggaaatgatgggctgtctttcattatgagcaattttgagagtaaactgaacaacaaagtacctccgccagtcaaaccaaagcctcctgtccattttgaaattacaaagggggatctatcttatttagaccaaggccatagggatggacagaggaagtctgtgtcttctagcccctggctgcctcaggatgggtttgatccttctgactatgctgaacccatggatgctgtggtgaagccaaggaatgaagaagaaaacatatactccgtgccccatgacagcacccaaggcaaaatcatcaccattcggaatatcaacaaagcccagtccaacggcagcgggaatggttctgacagtgaaatggacaccagctctctagagcgagggcgcaaggtttccatcgtgagcaagccagtgctgtacaggacgagatgcacccggctggggcggtttgctagt

SEQ ID NO: 2053 - DNA, 6000 bp, Homo sapiens
ccttctggttggtttttcctcctgaaaattgacagccagggtcagtgtgtcgcagaacaaggctctgtccacaagccagtagaagcctcaggccctggcctggaaggggtgctggctggcctcccatggtgcccgctggtctcggtgcccagagcctctgcctctcgcccatcctcaggcctccctcctgctcctgtctgagggcagcccacgtggcctcaaacctgcctaacaccagatagggcacttagctccagcgggcatggggcctcttgtaggcctgtgtcccaaagctggcagagagagaagatcttctggttggtactgatgctccagaaatcttctcctgaatcaaaaacacctcagagtccctgaaagtcctctcacagcattcacgttcccagctggggagaaccgggacactgcacctcgagagatgtgctgcaggagacagccagcctccggcatggagcacagccgcaggcgggaggccgtatggttgttccctgaagttccatgtgtgtggaggagatctgctggccgagtggcctctgatggcgctctggcttaggacactcagcctccctccctcgtcacagccggagcaccgccactgctttggctggctgcagagtgagtccctgaggtggtccatccacccccaggggtttgcggggctccaggcagcctttccgaggttggccatgtagaggcactgggctggaggggagaggacactgagggcgcagcctcccaggcagggcagggtacagagagctgcgcatggccttttctgctccacctgagggaagaaaggtgggctcagcctgggtgctgaagaccatgagcgcccagggccaggtggggccctgcacagttctgaccattgagtttggtgtcgcccgcagggtcagccacaacaacaaggtgaatctcatgaccagcgagaacctctccatctgcttctggcccaccttgatgagacctgatttcagcactatggacgccctcacagccacgcgcacctaccagacaatcattgaactctttatccagcagtgccccttcttcttctacaatcggcccatcaccgagccccccggcgccaggcccagctccccctctgccgtggcttccaccgtccccttcctcacttccacgcctgtcacaagtcagccgtcgcccccacagtcgcctccacccaccccccagtccccaatgcagccactgcttccctcccagcttcaagccgaacacacgctgtgagccaccaagacctggggcgacaggagaaccggtcctctctctgacggggtggcatttggccttgaacaaaaccaagtccactggggacagaggcaggggcaagtggctctccccattaccttctcaagacctcagtgggagcaccagccaatggtaccatcggctgggctgccaggtaccctgggcctggcgctgcagacctgagctggcttggacccatttgaggactgaactaggcaggcaatggctccagtgccctccctctgttccctggaccaccaccccacgtagctgctcacaccagcctccgggtgcctccctctgcttgtacagagcccatggtcgggacagtgccctggcctttgccggggaggaggatgctctgagattcagggtggggctggcaacccctgaagagaacacttcctgttggtctgtctcttcccaccttccatctgcacacacccccaaggtaagggtacagcccggctggcggcctccttgggaacgtgtaggccacggctctgccaccactaggtacctgctgagggcgctggctctgcagatcagaacaacggaggatagctttgtgcctggacccagagagtgtgggactccccgcttcatccccaccgtcccactccacagccttcccgaaacattccctggcaaacaaaggaacactaggagaaaaaatggaaaaacccttccagtaattaaaaaggaagaaaccacagaaagaaaactacagacctcaagattccactctgtgcccgcctctgccgggagggagggaggcacacaggtggagctgaccctcgtctttgtggcagcaaaaccaggatgcctggagctgtggcctgagggcctgctggggtcccactcacccacttaggtctagtcgctagatcccccgttttcccaagaagagggttcgagcccttggtggggacagctggggagatggcagtgcaggctggaacctgggctgccccagaacacagtccattacgatagaaacactaattgagcatgtgcgtggggtgggggtgtgtgtgcacatgtgagtgtgagtgtgtgtgggcgcttggtggggggttggggacagctggaaggtgccaggtgcacttggggttggggttggtgtgttgggtgttgaagtggaatcgtttcatcccagccatggaggccaccagcaggagtgttcatggggatgtgggcgaggtggggcactttgaaggaatggcggtctgctggtgccctcgaaggggcatccttcctggtcttcgctgacccagaggcgctgtgcctgcatatcatccaccaccaccctagcccagccttcccactgccccaggaaaagctcttctcctggccacctctgccccccagcacctcaaacttgcatggctgggctgtggcctctgcggccaggaagcctgacactaggcaccccccaggcgagagctagtggggtgcagagggccccatgccagacagcccttggggctcgttgcactttaagaaataggatctgtggtgtattccagggggcctgatggacacctttcccgggcgtctgcagctgccctgcccgtgcccgcctgcagtggttggagacgggagtggcccttcggctcccgagctccctctggggacggctggctcactgtctccagttctcaatggccaacgaaggtgcttggaaacacctaaccttgcaagttttaccgccttttgaggaacacaaatcggagaacaaacccagggttcaggcgtgttttctgtgaatgttggatgatgaatttttgtctcttctggtggagctgtgcctggccctgtaggcccagggttggctggaaggtgacatctgtgtttcgttttagctgaggttggcagaaacgttcccaaactcccccagccctggaccccagcagatgaggaaacggccccatttactgaccccgcccccttttcgaggttatgctcacctggtcagctcctcacgtaattgggggtggagggaaagcatggtggtgccctgggccgtccctgtgtgaacgcaggcaaaagcagcccagtccccctcactgcttgagctaacactgccacctcttttgtgtgagcacaaaagccacgtcccaagccacctggcccgattccacagatgtatgtgcggccagtgacttccccaggagtgtggagggggtggtgaggaggagcacctgggctctctacccctctcctcacagaagtacctgaaactaggtctggggcactcccaatgcagcgccttgtcagccaaggtgggcaggcagggactgtggcagcttatgtccaaagggagcccccatgcacaggaagccacagggttcctcttgtttcccccgctaacttcagcctctcatctgctgctccgggctgagggactagaggacatctcggtcgtttgaggggcatggccagtcgtggcaggccggccttcagcgtccggtcagggaagcgtgcagcccaaatgggcacttgcatgggagccacagaggagcgtccctggggattgttgggaccatgctgcccccactcccgcttttgttggggctctaagttctggaaggtgtgtgcacagagggtgctcatgggactcgcatgcagctctcagcactgggtgggagggcgttggcttgtccagaatggggacgtggggcagccacccctgcccagcgagagcgcagacaccgtgtgaggggacagcagcccttggtgcaaagccagagactgatcctggctctgacggctgaagagggaagacccaaggctgggtggcgtggctcgtgaatccacttagaattcttggcttgtgtcgcatactgggtgtcacggcacacatttactctgcattgtccccgtctttcccatcgcctagcgtttggggaggaacagggagagagcttcggggcgtctgtctccgtgctctcctgcctccaccgccttggttttgcttcctgctggaggcagggcacctgctgcgacccagattcttctgcaggatgtgtctgtctttgtcacggtggacagagggtgacatcataggagcagctcgctggccagaaggggatgggggcatccctgtgcctcactcagctcctgctgctcttagggaaaggaggcctgggtcaagccagcatccccttggtaaagacccccgcaggccaccaggcattctggacacgcacacacacacacacacacacacacacacacaaaacttcacagcaggccagctgcagtgacttgtcatcaagagtcacctcagctgcgcccccctcccatcctttcctatgagaagccactgctttgggggcgccggctagaaaaagtagggtgcggtggccaggagggcccctgccgcgcggggggctgggtctggttgagtcgctgctttcccgagggcagcgcagggatccggggaagctgcggcagggagcgggcgccggcttcgtggctctgaggtgtaacgggggtgggctccctccctcggaggacatcgtctgtgtccaggtcagaaagtggcccaggaagggggcagtttctgtcgcgggtccggtgggggcgcggccgcggtgcggtcggtgcagcgtggccaatgcgcggcgcgcgcgggggacagagcaggaggcggtctgtcacctcggccactgctgacctgggctggcctcccccagccctcccgtggcggagccggcagcgatgctacaggcctaagttattgtttgcataaaaagaatcatgttccctgtgtacatttaagaaaaaaacaaaaaaacggaaatgtcagaattgtatggaaataaaacttgtttgaaaatttggaatagtgctgctgccagcttatttttctggtacttgtattttcacatgttaaatgatctttatatatgttgaattaacaaatattttgagtttctgagaaaaaacaaaacatattaatggtattgaaatgtgttagtagtctggctgtgtgcccaaaattctgtttcgcagcaaaagtgaagacctgtatgtaaagaaagtataacaattatttctttgtattttaggggctttaaccggaacatcgtctagctggtgttaggaatgtttgcttaatttccagacttttttttaaaaacacatcgtgggttttttgaggctccaacctgattagtgcatggtcagccctcaatgaaggctgaggcatctctgactgaggtgtttttgtttggttttgttttttaaaatcatgtatttgctacaaagtattgtacttgtctcaatgggaatggtgtaaaaaacaaaaggccttatgtgatctgtatcatagttaataaatgaatcttgtaaaaaaccaaacctgagagaagtgaaggggggcctcctccttaccgggccagtgcagcacacaccagggtttcacaggcttaggcgcccggggggggaagcaggaggctcccacaggagaggcctcggccagcacgagccccccctcccggctctcacctgctttcctctccagcacagcttcccagaaggccgcgtcattcctgtggtttctcagcatcacctaaagtgcctcccacaaacccccatggccgcaggagctgcaggcaggcgtggggaggggatgccagaggtgccgctcctgaccttccttcccactcccctccggcctgaggccacgcgggtggtaccgggagt

SEQ ID NO: 2054 - DNA, 6000 bp, Homo sapiens
tgtgtgagcaacaaggctgtttatttcacctgggtgcaggtgggctgagtctgaaaagggagtcagcaaagggtggtgggattatcattagttcttataggtttgggataggtgtacaaattacattctcaagagtggggagaatattgcaaagtaccttcttaagtggggtggaggggagaatatatcatatcagttagagtggggcaggaacaaatcaccatggtggaatgtcatcagttaaggctattttcacttcttttgtggatcttcagttgcttccggccatctggatgtgtacgtgcaggtcacaggggatatgacggcttagcttgggctcagaggcctgacactcaccacatggcagctggctttccttaaaggaagtgatctgaaagggaacaaggtggaagctgtagtggcttttctgacctgtcctgtgaaatcacactctgtcatttccacaatatcctcttggtcacactgtttagccctattgagtgtgggcagagaccacacagcagcatgaatacctggaggtgtgactcctcaggtgccatcttggatgtgggcttaatagttttgattcagcatctttattattataaagagtttggctgggtgcggtggctcacgcctgtaatcccagcactttgggaggccaaggcgggcggatcatgagggcaagagatcgagaccatcctggccaacatggcaaaagcctatctctaataaaaatatcaaaattagcagggcgttgtcacacgcctatagtcccagctactcaggaggctgaggcaggagaatcacttgaacccggaggcggaggttgcagtgaactgagatcacaccactgcactccagcctggcgacagagcaagactccgtctcaaaaaacaaaacaaagcaaaacaaaacaaaacacacaaaaaagagttttagtcaggcacagtgacgcatgcctgtagtcccagcactgtgggaaactgaggcaggtggctcacttgagcccaggggtttgagaccagcctgggcaacatggcaaaaccctctccctacaaaacatacaaaattagcagtgcatagtggcacacacgtgtagtcccagctactccagaagctgaggtgggaggatcccttgagcccaggaggtcgaggtggcagtgagccacagttgtgtcattgcactccagcctggacgacagagggagatcctgtctcaaaataaataaataaaaataaaaataaacagttttgacttcacaactagctaaaaagtgtattccctcactcagtgactgtactgttcagaggtgtatacctgcattaaaagccctttccttccttctctgtaactggagtagggaagggctatctcattggactggagtaacacacacagataaagccggatgcaaagttaacaggaaacactatttctctcaaggatacgctttgtttgttttttttttgagatgaagtctcgctctgtcacccgaggtggagtgcaatggcacgatctctgctcactgcagcctctgcctcctgggttcaagtgattctctggcctcagcctcccaagtagctgggattacaggagcacaccagtacgcccagctaatttttgtatttttagtagagacagggtttcaccatgttggccaggctggtctcaaactcctgacctcaggtgatctgcctgtcttggcctcccaaagtggtgggatttcaggtgtgagccaccacgctggccaaggacatggtttcttacagagactttgttctctaaattcataaattgttggaaattctatcagtaaaaatgaaacatccgagtcttgctgacaggatctaatccacttgatacagagtagcagccttgatttccaaagcaggtgcacagcttcagataaagggtttctggatgcaacatttcacatgtaccttcttgtttccagcgattcaggacactggtttcacttcacagtcctgatccaatgttgaccttgctttgctctaagctatcatttggttgtcacctaagctctaccctccccctttatcttggctttttcttttcttttttctttttgagacaggctcttcctctgtcacccagtctgattgcagtgatgcaattgatcacagctcacggcagccgggacctcccaagctcaaacaatcttcccacctcagcctcccaagtagctgggactacaggcacgcaccaccacatccagctaattttcttttttttctgcttccttttctttttgtttttttttagatagaggcttgctctgttgcccaggctggggtgcagtggcacgatcttggctcactgcaacctctgcctcttgggttcaagcgattctcctgcctcagcctcccaagcagctgggactgcaggcacgcgccaccactcccagctaatttttttgtatttttagtggagacggggtttcgccatgttggctaggctggtcacaaactcctgacctcagatgatacacccacttcggcctcccacacagctggtattacaggtgtgagctaccacgcccggccccccctcctttcttttgttttttagttgacacagggtctcaccatggtacagcccaggctggtcctgaactcctggcttcaggtgatcctcctgccttggcctcccaaagtgctgggactataggaatgagccatcacacctggcccctttcttcaattttcaaaacaaactgatccttcaaggtcaagaggaaatacctcctctgagaagtcttctctgaatgtcagaggcagacaatgtctgatttctgcatgctccccaacattcaatcatacagttattgaataacacattttgagagataactatgaatcaagtaacatgctggtttctgggagaattgaggacaaattaaccttgtggaaattttgggtggatgaaaaaaaccaacatgaaattaaaacactgcacacatttacagctgtgagaagcattacacatcctgggtgctatgcgagctttttttttttttttttttttttttgagttggagtttccctcttgttactgaggctggagtgcaaggtcacgatctcagctcactgcaacctctgcctccagattcaaacgattcccctgcctcagctcccgagtagctgggactacaggtgcctgccaccacacctggctaatttagaatttttagtagggatagggtttcaccgtgttggccaggctggtctcaaactcctgacctcaggtgatctacccatctcggcctcccaaagtgctgggattacagaagtgagccactgagcccaaccaggagctttttcgagaaagaaggaagtccaagagatcttcctgacaccctagtctgactctgccctttgcctgctcaaaatttccccatgcttcccagcggccttctggacatagatcaagtcccttctctgacaggcccaaaccctttatcatctgatcctagctcatttttctgagttttccttagttgctattattttctgtctaaagtgacatgtcataatattcataaagcacacaagtcttatgtgtacagctcaatgaattgtaaatatgtgtatacccggccgggcacagtggctcacgcctgtaatcccagcactttgggaggccgaggcaggtggatcacttgaggtcaggagcttgagaccagcctgaccaacatagtgaaaccccatctttactaaaaatacaaaattagctgggcgtggtgtcgcatgcctgcaattccagctacttgggaggctgaggcaggagaattgcttgaacccggaggcagaggttgcagtaagccgagatcgtgccattgcactccatcctgggcaacaagagcaaaactccgtctcaaaataataataataataataataataataataataataatgtgtatacccatgtaaacaccattcagataaaaatatggcatatttggggcacccggggagtgtctcttgtggcccctcccctccataccctgctgatctatcagcacagattagtttctgccactttttaaacttcatattccttttctttttacacaaacacaaacattcgagtcatgactgggtggggtggctcaagcctgtaatctcagcactttgggaggccaaggtgcgaggatcgcttgagtctgggagttcagagaccagcctgggcaacatagagagacctcatctccacataaaaagttttaaaaattaaccaggggcggtgtagtcccagctactcaggaggctgaggtgggaggcttcagcccgggaattccagactgcagtgagccatgattgggccactgcactccagcctgggcaacacagtgagaccctgtctcaaaaaaaaaaaaaaaaaaaacaggaaaaaacaaacaaacagaaaagcaggcctggcgcggtagctcatgcctgtaatcccagcgctttggaaggctgagacggggttatctcttgggctcacaagttagagacaagcctgggcgtgggctatattgctagatccaggtctctgcaaaaaacaaaaccactcagtttttagtcatctataacgtcctgcctggaagcatgctattttgggcctctgagcttttgcacttgctaattccttctgcgctggggagagctcaaaccctgcccgaaacttctaaaaatggtgcctggataaatgaaggcattagagctgcgattggacggacggctgttggacggcgccactgctggcacttatcgggagatgctcattggacagtcacgtgacgggaccaaacctcccgagggagcgaggcaggtgcggtcacgtgacccggcggcgctgcggggcagcggccattttgcggggcggccacgtgaaggacgcacgttcagcggggctctcacgtgacccgggcgcgctgcggccgcccgcgcggacccggcgagaggcggcggcgggagcggcggtgatggacgggtccggggagcagcccagaggcgggggtgaggcgggaggcagacgggcgggaggagggcgagccccctcgccggcccgtccgggatccttcctaccggcctggggctgtgcgatctccaagcactgaggggcagaaactcccggatcgggcgctgccagcctccagtcccctccgtcctcggaggttcctggctctctgatccccgtgtcccgatccctgcctctctggcgctctcggaccctcgagaaccaggggatctcggaagccaagcccccgggcaggcccgggcttgtcgcccgcaccacttcctgcctctggcactggtgggaggggcgggtctcgcctctgccccctcaggccaggggtctggatgcatatagcgttcccctagcctctttccccggggagaatgtaggatacaggcccagcctcctggcctttctccatcagggactcagttgtctgggcccccccgtcactttatctgctagggtcccagaagtccagggtccccagctctgtcctccctcaggggccgtgagtctccacagtctcctgatcccctagaacccaagagtccaggtacctcttcccttcctttctcctctagggcccaccagctctgagcagatcatgaagacaggggcccttttgcttcaggggtgagtttgaggtctgattattgtggcacagatttgaggagtgacaccccgttctgattctgcaccctcactccatccccactctagtttcatccaggatcgagcagggcgaatggggggggaggcacccgagctggccctggacccggtgcctcaggatgcgtccaccaagaagctgagcgagtgtctcaagcgcatcggggacgaactggacagtaacatggagctgcagaggtgtgggcccctgaggacccagaagtccagccactgggctccttcaggacacaggactctcagccccgcattctcctcctcccctaagaactaggagtctg

SEQ ID NO: 2055 - DNA, 6000 bp, Homo sapiens
atctcctgacctcgtgatctgcccacctcagcctcccaaagtgctgggattacaggcgtgagtcaccacgcccggccctccccacctccccccccctttttttttttttttttttttgagatagcgtttcaatcttgtttcccagactggagtgcaatagaacaatcttggctcactgcaacctccgtctccttggctcaagcgagtctcctgcctcagcctcccaagttgccgggattacaggcacacgccaccacacccagctaattttgtattttcagtagagatggggtttcaccttgttggtcaggctggtcctgaactcctgacctcaggtgatctgcccgcctcagcctctcaaagtgctgagattacaaggccgcctctccccagctgcttctctcaaagacaagatgcacaagccagaggaaatgtttcgttttatttttgctcataacctcccaaaaaaatcagtaccccgccatccctcacccagacacagcccctctccaacaccttcacgaaacactgattttttttcttagagctaaaatgaacacccagtcaccaactacagccctgccctgcccctcctcccactggcctgctcatcttcccgcactgcaaacctggccgcctttagcctccctcccttagcgtagtgtcccaaggtcacctagcctgctttttgcctgtaggatatgggtccccttctcaaagcccgccctgacttacttcctcatttgcatagtccttcagctctatcctgtcgccactccacccaccccagacaaccacctgtaagaaaccaggtttgaaattcaagagaccaggtttccaagctcccagctgcttccctgtgggcctcggtgcctcggctgttatgtgacgggcatagacattgactaaggccaaacatttcatgatttggacgagaaaggagggaaggagatccagaaatacgcaagagaggtgataagcagagacagaggataaaaggataagagtagagaggagttgggtggtttggtggggaagaagggttgattttttttttttaatagagacagggtcttactatgttgcccaggctggtattgacctcctggcctcaaacgatcctcctgccttggcctcccaaagtgctgggattacaagcataagccactgcacccggccgagaggggtttggaatgaaggtagaggcagggggatgaaggcgccagagctgaagaccagcccccagaagccacacccctgcccttctagcagctacgggtcctctggctccgggccttgtaaacctcgatgagcaggtccttgacgtactggatctcgcgctccacggactctgcccgttccttcagctcgcgattccgtgcctccagcccctggcactcgccctccagggcctcaccctctgcccgcttccgctggcggtacctcagagccgccgacttgttctggtctctcttcttttgcttgcggtcccctcgggtggtggcaggatgtgggtagggggccaggcgagaaggttgaggtggagaaggaggagggggctgctgtggcgggggcagaggcggcatccccacttcctcctgcccggcctcgttgcggcagtagatggccagcaagtccagagtatccaagacagggggctgggggaggtcaaaggaggggagggacagggggagggagggggctggtggtagtggtggtggtggtagtggcggcggggagggtggtgggaggggcggggcatctaggaagaagtcttccatctgttccagctccttcttgaggagggaggccatagcttccaggtcaggtggggttggggaaggttgggggagggtgccggggggtaagggaggctccagagggaggagagctgtgaaatcaactcgctcagtcatccagtcagagaagccatcacctgggattaaagtggggagggacacaaaattccctgagttgctggtcttctgcgtagttgggtgctgactcacgtctcattcaggtgcatctgtcccattcattcagtaaaacaactaaccactgaatcatcaaaccagtcaataaaccaacaaaccagtgaagaaaccaataaaccagtcaacgaaccaaccaacaatcaaccatctaaccacccagtcaaccaaccaaccaaccaaccaaccaatgaactagtcgaccaatcaatcagggaatcggtcaaccaaccaaataaatcagtcaaccaaccaatcaacccattaatcaaccaatgaaccagttaaccaaaacccaacaaattagccaatgaaagaatcagtcttaacccataagagggtccaggagaaaaaaaaaattaaaaaagaaaaaaagaaccagccaaccaaccaatgactcaagcaacagtcaaccaagcatttcttcaaccattccaacatctcctttaccgagtactctgtatctgtggtgtctctattctctctttttaaaaggcaaactagatcacattacacacacagatacacacgcacatatgccttgtttcatctttactcattaattattgaaaacccactatgtgccaagcatttgggatacagtaatgaatgaaatgattcctgcctcctgagggcttctgcatatacagttccctccaactaaaatgctcttcccttgggtgttttcctcattccttccctactttttttttattttaagggatagggtttcactctgttgcccaggctgcagtgcagtggcatcatcttggctcactgcagcctagacctcccaggctcaagcgatcctcccacctcagcctcccaagtagctgtgactacaagcgtgagccaccatgcctggctaattttttttttcctatagatatgaggtctcgctatgttgcccacgtcctgaactcctggactaaagcaattctccccgcttggcctcccaaagtgctgggattacaggccatcatgcctggcttccttcccatcatttatgcctcagtcaacatgttacctacttggagaaggttttctggctacccattctatattaggtcccctttgtcattttgtagctcagctgctaggtgtttttgacttattccaatacactctcatttaatttatctctggtctactccccacagtgtgagctgctggaaggcacagaccatgttcttcttgttcccagccgtatcctcagcacctaaaacagtgcctggcacattgtaggcactcaatatttattgaatacatggatgagttcttcctcccccatcttcccctgccctccactccccagctccaccttccacctgcccttacctgccaggggctctccccccactggaagcccgccctccagggctcccccaaggacctcatagggagccaggggggcaggggccggggggagtttcccatagtctacgagccatcccagcccactagctgggagcagggccctgtccagctccagccccagggtcgccaggagtgacatggctgtagcacaggtgctgggcactgatggcaacaggagaggctgcaccagcagctggcacgaggctctggaggatgctcaggtgggcgaagacaggcaccaaggcgaaagtggaagacctacacgcgtgagacaagagtgggtgtggtcaggacagcgtcatccaccggccaaaatcaaggggaagccaagccacacccccaggcacgtccatgaggctcctccctcccccttccaaccaccgtttagaacactaagcctcagcctctccgaattctaaatttgccctttctttacccaaatctctgagccccacccactcccaagggaatttctttaggtcctaaagtaggaccgatgccccaccccttcccccaatacagaaaaaaaaaacctaaaggtctcccaggggaattaccttaggcccctcccatccacctcagaatatttcgcctcaaggaaaaactcaatcccagggacattttcttccagccacgccccttcctctaaaatatttccttttggccccactgccttcctagcttccatcccaaaccagttcccaggggaactgccccaggccgcagcccttcagcaatgttatccactcaaatcccactcctcgctctgccgctgcccctccaagccccgcccctcattgtttatttagctccgcccctcccccgattccccagaggccccgcctctttgtcacatcgaaaccccacccctcaactaacggttggtttagccccgccccttctcacaatgtgcttccgaaatcccacccatcgtgacgacagtggttctatccccacccacttagagggttgcctctgggtcccgccttctgccctgtcaatctaagccagtccccgcctcagcaggtgcctggtttaaaaggaaggaagctgggctgtgagccagagcaacgtggggcagggagggtggaggagggtagagggggcacgcggagaacggctacccgaacgccacccgtccacacgcggctctgcgccgagggccaaggcgcatgctacgtcgcccgagcggtccaattgcctttacacctccgccctcttggggatcaatgcgcatgtgcggccattcagggtccgcagctctttcactacggggcactggtgggctactgcgcaggaacaaccaagcacgaagaatcgtttagaaaaaaaaaaaacacaccctcccctggagtgctcaggcccagctgcacgcgggctgacaaacatcgagtctagaactctcccacccggccccgggcccagtgcgcatgcgcagccgcgcgccttcggcccaccgtactacttctgcgcctgcgcgaccgtgattccccgctcgcgactccccaccccccagggctccctaaagagggccacgagctgcgaaagggcgggaaaggcagttggagaagaggtaagcggttactcactccatggctgcagcaaggagaggcggcggcggcctcggctgaagaaagaaggtgggagcggagagcgcaggcgtggtgagcgcggagacgggccgggggcacaaaggggtcgaggctacagagccatggccggggctacgcaggcagaggcggcgacactgtagtgagaagagactgtgatccgaggacagggaatgaggcggccccggggactggggacagatatatactgggtggcggagcacggccctcccggatccttccgcgccccgccctcgcgcggccccaaccgggaggcagccgggtcccctcctcctggggatcaggggatccgagcctttccttcccactcctagggtccgggaccctcctccctctcagctggggatccgacctcttccctctgagccggggatccagccctctccttgtggctccggggtctggtttcctcctcctgactctaagctctggtttctttctctttctgcctctgaggtctgggcctgcttcctcctgtgattttgaggatccagcctcattctcttcccgcagacctgcaccagttcatttctctttccctttccttgcttgcagaatttcctgccagtcacttttcacttcttcatcccccagctgctgactctgagaaaccctcgtgggttagagtccagcatgagtcacagcactctcccaaatacagacctgccaggatggcctcgggcaaataacttaagttctcttacttcatttccctatctgtaaaataagaaaaatcaactcgcctggtgggtttatgagactcaaataagacgatgtctggcaagccttatgcacagagctcaactcatacattcctgttcaactgttttttttttttgagacggagtctctccgtctctgtcgcccaggctggagtgcagtggcgcgatctcggctcactgcaaactccgcctcccaggttcacgccattctcctgcctcagcctcccgagtagctgggactacaggcgcccgccaccacgcccggctaattttttgtat

SEQ ID NO: 2056 - DNA, 6000 bp, Homo sapiens
tctgtggggcgacgctcatcgcccccagatggctcctgacagcagcccactgcctcaagccgtgggtgcgggggctggggcggtgccggggtggggggctgggaatggggagatggatggagagaagctcagggataggggtgctggtaaggggattagagatggggatgggtagtgtcagcaaggttgatgggctcgagttggtattgaaggtggggggatgaatggggttgggatggggctatggctgggaagggggcttcggtgggagacgtggaagaggttggaagcagagcgatgtttcttcatcctcaaaggtgtcactcacctctcccacccatgtctcccccgacctttcctcctccaactactgtctctcccacctcagccgctacatagttcacctggggcagcacaacctccagaaggaggagggctgtgagcagacccggacagccactgagtccttcccccaccccggcttcaacaacagcctccccaacaaagaccaccgcaatgacatcatgctggtgaagatggcatcgccagtctccatcacctgggctgtgcgacccctcaccctctcctcacgctgtgtcactgctggcaccagctgcctcatttccggctggggcagcacgtccagcccccagtgtaggagcaccagaggggaacctggcagggggtggtgaggagggagtggtcaggattgtggaagggttcagggcatcagagatgcggttcacagtgacgatgtgggataagttgagaggatgtgtggaaaacgtcaggataggggggtggggacaaaagttggggccttggagtcagacggacgggatatgcaatcatacatccataacctcctggttgtaagaccttaggcaagcagcttcacctctctgaatcttgattttcttctctataaaatgagaatgattatacccacctgtcaggattggattagagataatgtatatcaagcaactgacataaatcatttattggatagcaggctgggcaccgtggctcacgcctgtaatcccagcactttgggaggccgaggtgggaagatcacctgaggtcaggactttgataccagcctggccaacgtggtgaaatcccatctctactaaaaatgtgaaaattagttgggcgtggttgtgtgcgcctgtaatcccagctactcgggaggttgaggcaggagaatcgcttaaacttgggagacggaggttgcagtgagccaagatcacgccactgcactccagcctgggcaacagagcaagactctgtctcgaaaaaaaaaaaaaaaaagctggatagcattgctgttgctattgttacaagaagagaggtgagttggctgcgtctaaggacagggattcccccaggggcgggatcacagcaagcactgcattaggggaggtggcagggggctcattcccacagcccctcacgctgtttccacagtacgcctgcctcacaccttgcgatgcgccaacatcaccatcattgagcaccagaagtgtgagaacgcctaccccggcaacatcacagacaccatggtgtgtgccagcgtgcaggaagggggcaaggactcctgccaggtcagtgtggtctccaaccacagccccatccccatccccagcttcaatgacatctttaccgacatccacaatttcatccccaacctcaacccgccgacccctgcaactcccaatccatctcttcccctgttcccgtttctgacctcagcacaaacttcagctccatccccgtttccacaccatttccagctccaaccatccccaaactcgtttttgagcctaaccccatcctttatcccacccataatcccagctttatcgctaaacctatcacctttcccagtgcctacccatcctgtctcggccccactcctaagcaccgtccccacctcctccctggctaacaccatgctcaacgctttctctgaccgacattctctctccccgtgcccagggtgactccgggggccctctggtctgtaaccagtctcttcaaggcattatctcctggggccaggatccgtgtgcgatcacccgaaagcctggtgtctacacgaaagtctgcaaatatgtggactggatccaggagacgatgaagaacaattagactggacccacccaccacagcccatcaccctccatttccacttggtgtttggttcctgttcactctgttaataagaaaccctaagccaagaccctctacgaacattctttgggcctcctggactacaggagatgctgtcacttaataatcaacctggggttcgaaatcagtgagacctggattcaaattctgccttgaaatattgtgactctgggaatgacaacacctggtttgttctctgttgtatccccagccccaaagacagctcctggccatatatcaaggtttcaataaatatttgctaaatgagtgaatctactgagtgcttactatgtgctagaccctgatccaatggcttttattttattttattttttgacagagtctcgctctgtcacccaggctggagtacagtggtgctatctctgctcactgcaacctccacctcctgggttcaagcaattctcctgcctcagcctcctgaatagctgggattacaggtgcctaccaccacatccggctaatttttgtattttttagtagagatggggcttcaccatgttggccaggctggtctcgaactcctgacctcagatgatctgccctccttggcctcccaaactcctgggattacagacgtgagccaccgcgcccgcccggctttcatttattaattaaaagaaattaaattaattaatctatttaggagacagtcttgctctgttgcccaggctggagtgcagtaacaatcacagctcacggcaatctcaatttcctggggtcaagtgattgtcctccctcagcctccagagtagctgggactacaggcacatgccacgaagcccagctaatttttgtatttttcgtagagacagaggtctcagtatgttgccccggctagtctcaaactcctgggctcaagcagtctgtcctcctcagcctccaaaagtggtgagattacaggcatgagtcgctgtgcctggcctccaagcactttcaaatgtatcaacttaatcctcacaaaaccctgtgaggtcggtactgttttcatacctattttatagttgaagaaacagacacagagaagcaaagtcacttgctcacagtcacgtggctaggagagcaaggatctgaagcaaggcgatctcttaattaccaagtgatgttcctggagtaaggctctgtttgtttcctttcctgtaaaatgctgcatgcaaaagtataacacagtaagtaaagaagtcagttagcctgcacatactaagacctaaccaaaggagcttattgtttttctccaacttccatgataggtaattagatagtggagacctctgctggccaatatggtagccactaaccgcagctggctcttccaattaaaattacataaagccagaaatgtaactcctctgtctcacttgttatatctccaaggctggatagccacatgtgactggtggtggctggattagctagtgcatataaaacatcactgcagaaagttcagctgagcagcactgagttagatggcctctgaagaggatgtcccacggagagaatccagaactcaggatctttttttttttttttctttgcgacagagtcttgctctgtcacccaggctggagtgcagtggcgtgatctcggctcactgcaacttctgcctcccaggttcaagcaattctcctgcctcagcctccctagtagctgggactacaggcctgtgccaacatccccagctaatttttgtgtctttttagtagagatggggtttcactatgttggccaggctggtctcgaactcctgacctcgtgatccgcccccccttggcctcccaaagtgctgggattacaggcgtgagccaccgcgcccggccagctcaggatcttttgggatggtctgttcacctcgcagaagtggctggcatgagcaataggagcccagagtggaaccagggccttctggttgtcaagtggacttgctgtgtgacctcctgtgagtctctgccctctctgagcctctcactcctcacctgagatgagggagttggctgaggtgatgccgatgcccctcacagctttgacctcctatgattcaggggcctgtgtgtcacctggtggcacacagatggcagggagggtgtgagatggccacacatgggtatgaggcagagccacagccccccccaacacgcacatgggctagtcactgggacacacacagagctcactcacggccacagagtgggcgtgggtttccctttttccttgtttctgtttctcttagcctcggcgcctccctccctccctctctctctctctctctctctctctctctctctctctggctcttttagccttggtttgttacaatctcccttttcaagccagcctctgtccctcctactcaacctgctttatctctaggccttcctccttcctcttccacagtctggcttctcacattgtcactctaggtatgcacttcccattgatttcctcttgctcagtggcctctcatcctgccacccctagccttgctggggacgtgaaccctctccccgcgcctgggaagccttcttggcaccgggacccggagaatccccacggaagccagttccaaaagggatgaaaagggggcgtttcgggcactgggagaagcctgtattccagggcccctcccagagcaggaatctgggacccaggagtgccagcctcacccacggtacaattagacagagggaaagggagggagcccgggggtgggggtaggggagggtggagaagcttccggactccttggggttaaaagggaaggtcccgccaggggtccctgggcagaggataccagcggcagaccacaggcagggcagaggcacgtctgggtcccctccctccttcctatcggcgactcccaggtgaagctacctgcaccccacccgggttggggtggattgcgagaggatgggtggggacccccgggccacaggcaggagccggcttagagcctcggtttctccacctgcgggacgcggaagtccccccgctgtgaggttgagaaagaggctcccactggctccgagcctcggatccccaccccgcgcgtgaaggagggggaaacctcgggcgcggcgtggctgcagccagggtagctggggcgcggagagcgctccactcgggcacagggaggacgggaagatgccgcgaggggcgtcattagggtaattgtgcccattaccgctgttccagcccgaatctcccgtctgccagcccctggggttatcggctgcaggtcaaaagggtgcttgcgggctggggtggcccaggctgggcggatgagcgcggcgaggtgggggtctctaacggagcatctgttttaacccgcccctgcacacaccccagcagatcctggccatgagagctccgcacctccacctctccgccgcctctggcgcccgggctctggcgaagctgctgccgctgctgatggcgcaactctggggtaaggtcgggggcagggggcggggagaggcgccggtgggaggcacgggcgggaggagaatgtgttcccgtcaccaagccccgcgcacctctcctcccccgagaccccagcacccacccagcgctccggagcacggcccgcccccaagtcagctgggcccttcttctggctcggcccctgggtgacccgccccactcaggccctgtccgatttctgccacccggatcctcgctcttccgtggactcttcgccgcgttctttctcctcctcttacgccgccccatcccggccccgctccattttacactaccgtgttttgttttgtttgtttgtttgtttgagac

SEQ ID NO: 2057 - DNA, 6000 bp, Homo sapiens
ccaacagctgtattttcagtagtaaggccttgggaaggtcattaggtcatgatggtggagccctcatgaatgggattagtgtccttataagaattctgtcagacacagtggctcacacctgtaagcccatgactttgggagatcaaggagggaggatcagttggggccaggagtttgagaccctgtctccacaaaaaagtaaaagtaaataattagctaggcatggcggcgaatgcctgtagtcccagctactcaggaggctgaggtgggaggattgcttgagcccaggagtttgaggccgcagtgagctgtggtcatgccactgcactccagcctgggtgacatagtgagaccctatggcaggatctcaccattttttcctccaaaaaaaaaaaattgttaaaaaaaattccagtattgtgcagtagctggatgtttcaaattttaaaaagaagaaaataaaaaataaaataagagtcttgatagaacttgcttctcccttccaccatgtgagaaggacacagctagatggcaccatctacgaatcagaaagtggaccctcaccagacgctaaattgctggtgccttgatctcagacttcctggcctcccaaactgtgagaaataagtttctgttgtttataagctacccagtttatggtattttgttacagcagcctgaactaagacacgttgcaacttccactttccattcaacatatatcgtccccatttctcttactccatacatacagatctaagtggtttttatgaaagttctttaataatccatagttggtatgtccgatattttatgcaataatctatcaaatagtggactttcctattttacatatgtagaaactgaggatcagggccgggcacagtggctcacacctgtaatcccagcactttgggaggccaaggcggatcacttgagcccaggagttcgagaccagcctaggcaacatagtgagacccccgtctgtacatttttaaaattaaaaaaaaaaaaggccaggtgtgatggctcacgcctgtaatcccagcactttgggaggccaaggcgcacggatcacctgaggtcaggagtttgagaccagcctgaccaacatggagaaaccccatgtctactgataatacaaaaattagctgggcatggtggcgcatgcctgtaatcacagctactggggaagttgaggcacgagaatcgcttgaacctgggaggcagaggttgcggtgagctgagatcgcgccattgcactccagcctgggcaacaagagtgaagctccatctcaaaaaaaaaaaaggaaactgaggattaggaaagcccaagacccaacatcaggaatgtctcctagtcccagaatctcttgcatttgtacaccccaccccactatgaactcaggcatagtaaaataatccaaaatcccccatcaaatattttatatatatacatatatatgtgtgtgtatatatatatatatacacatatatatgtgtgtgtgtgtgtatgtatatatatatatatatatatatatatatatatatatatatatacatacacatatatatgtatttctattttattttaattttttttgagacagggtcttggctgttgcccaggctagagtgtagtggtgtgatcatggctcactgcagcctcgatctcttgggctcaagtgatcctcttgcctctgcctcctgagtactacagggatatacctgatgtactacaggcatgtgccaccactcccggctaaactttctttcttttttgcagtgacaggggtcttgctatgttacccaggctggtctttacctcctggcttcaagcaatccttcctccttggactctcaaagtgttcagattacaagcatgagccaccaccacacctggattgtatcattatattaaagctgagttttagtcaagcaagcctttggagtcagactgcccaggttcaaattccagcacccgatgagtggggtggctcctgtttgtaaccccagcactttgggaagccaaggcaggtggatcatttgaacccaggagtttgagacgagcctgggcaacacagtgagaccccaggggtctctacaaaaattaaaaaattacccgggcatggtcacacatgcctttagtcttagctaccgggcattgggggggccgaggtgagaggaccacttgagcctgggagatcaagactgcactgagcacagaacagattgcgtccctacactcccagcctaggcaacaaggcaagaccctgtctcaaacaaacaaacaaattccagcaccactattaccatctatgagaacttggacaaattcctaaagttctctatgcctcggtttcctcatccattaaattaggatgatgctgctactttacatatatcatagagttattgtcagggttaaatgaattaatttactgaatacactttactgtagctattatcactggcattgatctgtataggtattgatttgtataggtattgatctgtataggtattgatctgtataggtattgatctgtataggtattgatttgtataggtatttgttaaatacttattaaagtttgcagttttgttttgcattttggaatccataatttgtttttattttgtttctgagatttataatgcctcatttaagcctctgaaaattcctaggccctaagcacttcaaaggccaccagcccaacatcccaagcagcctgacaccaagacaggcacgcatagctaaaaagatccctagcctcagagaccttggggctgagaggagtcctgggaatagggagggctgggactgaaatattcaaccccatccccacttttatgagcagcagtttcctaactgcagtgggtaagggtatttgaaatagatgctgggccgggcacggtggctcacacctgtaatcccagcgctctgggaagtccaagtgggcggatcacctgaggtcaggagttcgagaccaaagacagccaacacggtgaaaccccgtctctactaaaaatacaaaattagccgggcgtggtggctcatgcctgtaaattccagctactccggaggctgaggcagaagaatcgcttgaacccgagaggtggaggttgcagtgagcagagattgagccactgcacttcagccggggcaacaagagcgaaactccgcctcaaaaaaaaggccgggtgcggtggctcacacctgtaatcccagcactttgggaagccaaggcaggcagatcaccctgaggtcaggagtttgagaccagcctggcccaaagtggtgaaaccccgtctctactaaaaatacaaaaattaaccgggcgttgtggtaggcgcctgtaatcccaggtactctggaggctgagacaggataattgtttgaacccaggagacagaggctgtagtatgccgagatcgggcccctgcattctagcctgggcaacagagcgagactccgtctcaaaaaaaaaaaaagaaaaagaaaaagaagaaaaaagaaatagatgctgtgggtattcagatctgtcagagtgctagctcagcctagcccttcaagtagcagaataaaggaggaaagagcatcccaggccttcccatccccattcaactccctcagttagagtggtcctaagattgcggtgggggggtagggctgtgttgaagaggttaaaaacagagattagtcagatccaatcctgctcccactctatggaggaaacaaattcgaatacatagtcacagcccaggctctgggattgagagacagagagagagattggattggagagagagagagagagagatgggattggagagacagagagatagatgggactggagagacagagagaggggttctgtggctctggaagcctagagaacagagcctgaagacagagaggaaagggagtaaaggggaggcatttatgcagagatctcagaagtgaatatgaaaggcacccctagcagaacgcacagcttgggcaaggaggcttgctggcatgaaaacgcaagaagtgctcaggcagctgtaattctccaggacatcagataaaaggtaaaaaacagatgggagacgcgcctagacagggtattgaataccagcccgaggggcttgggtttcatccaaacagcaaggcaactgagctcaacacagtgagactcggtctccacaaacatttttttaaaaattggccgggcctagcggcgcgcgccgatagtcccagctatttctgcaggctgaggcgagaggatcatttgagctcggggaggtccaggcggcagtgagccaagatcctgccactgcactacagtctgggcaacagagcgagaccctgtctttaaaaaagtaaaaaaaaaaaaaaaaaaaaaagaaagaaaaagaaaaaagagagaagggcaagtcgctcccttctctgggccttggcataaatcaagcacaaatcaaagtctcactccctcctcctgccgcgcaacggcgcggagagccagccagccagccagcggaaccacggcctggtaacccaaaacctgcacaccctccagctccccacaggacgtcacgtattaccaccgacgcacgcgcagaagccttcccggggactcaagaaagggcaggcttagcctcctccccatgtcgcccctcattggctagaaactactgctcgtctcggtcgttgttagcagcgaccagggcgggtacaatcttggtcgctaggacacggctaacttccgctttcttccccctctcctaggctcaaactagtcaaatcttgttcactcgaccaatggcaaatcggaagtgggcgggacttcacaagtccggaccaaagaaacgcgagcttagccctgggtagcgcggccaatggccgtggagcagcccctgtaaactggctcgggcgcccccacgcccgcccttccttcttctcccagcattgccccccccacgtttcagcacagcgctggccgcagtctgacaggaaagggacggagccaagatggcggcggccgacggcgacgactcgctgtaccccatcgcggtgctcatagacgaactccgcaatgaggacgttcaggtccggaggctacgggggacttggggaagacgcggaggggtacctgggggcacgggcggccctcgcggagaagactcagcgttcgctgggagtggcggaagggggcgacggccaatcagcgtgcgtctcttatctccccggttgcccggactccttgagacggcgctcccgattgggtgtcggcccagtggagggcgggggccagcgctagcctcgagggtcccgggcctgccctgtgcgcgcggcggtccgcggtcctgggaggttgtggccagggctggggtctgcggactgggtctgggagagaggaggactccgtgattggcggcggcctctgaatggcctcttggggatgtggggcgcgcatgacttgctccaagtaggggagggccgccgggtgggtcgggacctgggaaggtttttttgttttctgggtttcgactgctgggccaagtggggaccgagaggcgaaggcctgccatcctaattcctgctcttcctccgcctctcattttggtttaggtgtcctaagaggacggggacgcaaaaacacccccccaccaaaggtggggactagccaagtttaggagcgaattaggttgtagaaacccgcctccccatctccccggatcctcccattgaccaggataggggttgagggatttgctaagcagatgaacatttatttatttcttttttttgagacagtctctgtgtcgcccaggctggggctggggagcagtggcgcgatctcggctcagtgcaacctctgcataccgggttcaaaccatcctcgcccctcagctccctaattagctgcgattaccggcgcgagccaccacgcccgactaatttttgtatttttagcagagacggggtttcaccatgttggccaggcttggtc

SEQ ID NO: 2058 - DNA, 6000 bp, Homo sapiens
agtcagtgcacagggaattctcaggatatgacatgatcaatggccagtcaaggtttctgaaatgatattaatagattttctatcaggaatgtgacggagaccccaacctagagttgtttaaacaagtaagagttctctttatttctcatatagcaagttcagcagctcaaagctatcacagaattgggtcagctcaaagatatcacagaaatgcggtttttttgactggcctgttttggttataagattccagcagcatctgctgtcctagtggaactgcactttttagtgcagtttagcagaggccagcttaggacacagaggttctttccctcctcccttttatgaaggaggaaaatctctcctgaatctcctcagcagacttgcttgtatatctctttgccaagaactaggtcatatgcagagttagttgaagttaagtttggctgtaagtagtagaaaaactctaaataacaggggcttaaatgagcttgaagtttctatctgactgatgaccaaaatgtctggtggcaatccaggctgctgtggcacttcatggtgtcagggtcccaggctcttaccattatgcgctggttgtatcctccattctaccctccgtgtcccccaggttacctcaggtccccaagttggctgccgaagccccaaccattatagctccattccagacaggaaggagggaagataagtgtgacccccatccctataagttgcacaaaacatttccacttggattttattggccagatgttagttttatagtcacattcagatgcaaaggcaattcagaaatgtcttttccaggggtcatgtgtacagctgaaaaccaaggattatgaacagcagtatagccccatgcaggagctcctaacttggggatcatctgcaattcccaggcaggtccatgaatttggatggcaaaaataacatctttattttcattaacctttaacttacatttaacttcccttctgttatagattataatatcactatagtatatcataggtagcgttagcaaaacctgtgacttaccagtggaaatcaggagttgtgttcacatgtcatttctgctattatacatatcttctagtgttgtttatgttcacctctttcaaaattgcgttcattattagacctgctaaggggattcatggcaccaccccacccctctacaagagaaaaaccaaaaaaagccgggtgcagtggctcatgcctataatcctagcattttgggaggtcgaggtgggaggattgcttgagctcaggagtttgagggcagcttgggcaacatagtgaggcctcatccctacaaaaagttaaaaaactagctgggcttggtgacacctgcctgtagacccgtctacttgggtagctgaggcgggagaatcacttgagcccgggaggtcaaggctacagtgagctacgattgtgccactgcactccagcctgggtaacagagtgagaccctgcctcaaaacaacaacaagcacaacaaaaaagaaaaaacagagcaaatatgaatccatagtactggttaagaacctggtggctgggattcaaatcctggctttactaccagtaagctgtatgcagttaagctccctgtgcctttgtgttctctgcctcaagacgggggattctgtatttccctcatgggattgtgagggtcaaatgaattaaaacattaaagcctggggcatagtagagactaaggaaatatttactgttattattctgtcatggtgaaaaaagggaaaagaaacatcagtggaccagctgccacgatgtccttcttaataatctgaacaaaatcaggatgctgtcagtgaggcgtggttgccacggctgccattattaatcttcccctggtgctagggtgtccctgtagaatgtcattttgtactcaagacaaccctctgagggtaggtattctcatcatccccacttcacagatgagaaaattgaggctcagaaaggtacaaggattgcccaagattccacagctaatatgtaagcagtttagccttgaacctggacagtgcagctctgtagtaccaccctaggccatctttctcaagcattgatgatgctgtctgcctgaagaaacacttttaatgaaaccaaaagcagaatcccaaagaacagcagtggaaggaagggagctctctggatgggaaagcagcctgattgtcatgggcccacctcttgggcatccccagcttcaagttggggttcccacgaccccctctttgggtttgattaatttgctggagcggctcacagaactccaggaaacacttaggtttaccggtttattataaaggatattccaaaggatacagatgaagaggtgcatagggtgagctatggaggaaggggcggggagctttcgtgccatccctggggatgccaccctccaagaatgtgcatgttctgctatcaggaagctctctgaatcctttcctctttggtttttatggaagcttcatgatacaaacatttttgcctaaatgacagtatgatattgaaattgagtcaggctgcctggcttcattgctttccagtaagtgacagcctcacctctgtgcatcagtgtcctcactcgcctctgtgcatcagtgaagtggggacgctgctaacaatacatacctcagagcagttatgaggattcagtgtgttaatcatccatgtcaatcacttggattgctgccaagcacgtagcaaacaataaatgtttgttgctattgttctggcatttatgattatgattattaattgtaattattccctgtaccatctcattgtcctcagggctgttgctcacctagtatggccctagcccatgtgtatatttccccatagctcaggctgagagaagaacacacagatcaacttggagaaaacaaagaggaaagaaataggcaactaggtcaatactccccacagtattttatgttattttattttatttatttatttatttgagacagagtctcactctgtcacccaggctggagtgcagtggcaccatctcggctcactgcaagctccacctcccaggttcacgccattctcctgcctcagcctcccgagtagctgggactataggcgcccgccaccacgcccggctaatttctttttgtatttatggtagagacggggtttcaccgtgttagccaggatggtctcgatctcctaacctcatgatccgcctgcctcggcctcccaaggtgctgggattacaggcatgagccactgcgcctggcctccccacagtattttattatgaaagttttcagacatgcataactttggaagactaacacaagggtcagcagactacagtccatgggtccaattcagcccactgtctgcttttgcaagtaaagttattggaacacagctatgcctgtttgcttctctagttctggttctatggttgttttcagtgccacgcaagcagagttcagtagttaggtttgcaaagctgaaaataattactgtctggcaatgtatagaataagttttgctgacttctagcatagtgcagtgagcacctctatacttacaccccaggtcagtgattgttagtgtttgctatattagttttttatctttctataggtctgtctctatatacgttttattttttagctgaaaatcagttgcaggttttgtagtactttatcctgaggtccgtttaatgccagaatggtgagtttttggactacctgtatgaaagatttactgtgtgcatttttctgaggagagaccatcacaacacttcatcagatgctcatcgtctgtgatcgcagagatattcttcaactcctggaccggagaacccaactcacgcaagatcttagtcacttgtagacctcgtctcagttatgtagggcctcagaacagaacaggctaagggagctcctgctcctcaacctcgccctgtccctacctgttctgcctctatccaggaagaaaggtcccccgtgggaccattagtcactctccccctcatgaaagcatttcctcccactctcacactcatgagctcattccattcttgtgacagtgctgggagctattaataataggagaggcctcgtggtgatgaagaaatgaggggagagtttcacagtctgtcctgccatcagagcagctggctttggatcccacactccctcggtgcttgctttggtaggtgtctttacctctctgatcgtcactttccaaagtggtgaaaagaggatattagccatgcttttcttttaggatctggaggatcaaatgaggtcccaacatgtaaatgcttgttgtgagatctattatgtgtgttagccaaatataatagttctctaggactgccacagcaaatcaccatgaactgggtagcttaacacaacgaatttattctctcacagttctggaggccggaagtctgaaatcaaggtctcggcagggttggttccttttggaggctctgagggagacccattccatgcctctctggaagttaggacttctggtggctccagcaattccttgtgttcctgggcttgtggatgcatctcctggtctctccacccatcttcacatgcgtgccttcccctctgtatctgtcttcctttctgtctcttagaaggacactgtcactggattcaaggctaaccctccgtttaggatgatattatctggacacacttaactacgtctgcaaagactgttttgacgtgcacgtcactggattcaaggctaaccctccgtttagggtgatattatctggacacacttaactacgtctgcaaagactgttttgatgtgcacgtcactggattcaaggctaaccctccgtttaggatgatattatctggacacacttaactacgtctgcaaagaccgttttgacgtgcacgtcactggattcaaggctaaccctccgtttaggatgatattatctggacacacttaactacgcctgcaaagactgttttgacgtgcacgtcactgggacataactttttgaggctgctattcagcctcctgtactggtggtattattactactgctaatgctactcttgtttttgtagtcattttattacaataatttttttttctctttgagacaaagagtctcactctgttgcccaggctggagtgttgtttgttcttttacaatcacttagccagcaatcctggctttaaatcctgctccatgtgatcttagctgtctgaccctgagaggggcttttgttccccgagcctgtttccctgtctgtaaaatgggactccagctagtgacatgggtgcaggtgtgtggatgtgtttagccgaggaccgggcacagaggaagcgtgttataaacgtggctgctgctgttaaagtacagtgcattggcatgttacatgatactgtgtataggagaaagtgatgaagagagaggaggagagggagtacagttttcaacagagtggtcctggaaagtgcaactgagtaggtgtcaccttcataagacccaagggatgcttttgcatttgttgctgctgccactactattgttgttatttaatgattccctcgaggtcacagggtctcttggtgggtgtttgccaaattactcttgagcatcttcacatgtaaccaagcaaggcttccaggggctgactgggttgagagctgtcagaactcacgcgtgtctgggatttctaacattctcccctcctcttcttgttctctcattagcttcgcctcaacagcatcaagaagctgtccaccatcgccttggcccttggggttgaaaggacccgaagtgagcttctgcctttccttacaggtaacaaaggggacccctggggcccagatgtggggactcttgggaggtggttttcactatataagagaagacttgtggatttaacatattgtttgtgaatatctgccctgtgttagacactatggagtgggaaaagggattcagag

SEQ ID NO: 2059 - DNA, 6000 bp, Homo sapiens
gcacgtcactggattcaaggctaaccctccgtttaggatgatattatctggacacacttaactacgtctgcaaagaccgttttgacgtgcacgtcactggattcaaggctaaccctccgtttaggatgatattatctggacacacttaactacgcctgcaaagactgttttgacgtgcacgtcactgggacataactttttgaggctgctattcagcctcctgtactggtggtattattactactgctaatgctactcttgtttttgtagtcattttattacaataatttttttttctctttgagacaaagagtctcactctgttgcccaggctggagtgttgtttgttcttttacaatcacttagccagcaatcctggctttaaatcctgctccatgtgatcttagctgtctgaccctgagaggggcttttgttccccgagcctgtttccctgtctgtaaaatgggactccagctagtgacatgggtgcaggtgtgtggatgtgtttagccgaggaccgggcacagaggaagcgtgttataaacgtggctgctgctgttaaagtacagtgcattggcatgttacatgatactgtgtataggagaaagtgatgaagagagaggaggagagggagtacagttttcaacagagtggtcctggaaagtgcaactgagtaggtgtcaccttcataagacccaagggatgcttttgcatttgttgctgctgccactactattgttgttatttaatgattccctcgaggtcacagggtctcttggtgggtgtttgccaaattactcttgagcatcttcacatgtaaccaagcaaggcttccaggggctgactgggttgagagctgtcagaactcacgcgtgtctgggatttctaacattctcccctcctcttcttgttctctcattagcttcgcctcaacagcatcaagaagctgtccaccatcgccttggcccttggggttgaaaggacccgaagtgagcttctgcctttccttacaggtaacaaaggggacccctggggcccagatgtggggactcttgggaggtggttttcactatataagagaagacttgtggatttaacatattgtttgtgaatatctgccctgtgttagacactatggagtgggaaaagggattcagagaagtgcagtcttgctctaaaagaatggtctggaatgatggagacagatggtgaaagggatctagaagcaggtagaacgaggtttgagttgcagctccaacagttggaagctggtgactttagacaagttagtttacctgtttcttatatttttcatctgtagattgggataatcatccatgtgccaaagtgttgatctgagcattcaatgttaataacaattgctaatacttatgatatgcttactgtatgccaggtggtgttctacaccgtatcttgtgaggattgagttcatataaagtgtttagaaagctgcctgtactcagtaaacatacatcactatcatttcacccagttgatctcacagcagtgctttaagcaggtaatactgctgtccccatgttatagatgaagaaaccaaggtgtagagaggtgaagtgattcatttgcccaaggtcatgcagtgaggaggtaactgagaagggatatttatctagtcattctggcctttaacttgacagcattggttaatgactgatttcaaatctgagctctaccactttctaggtgtgtgactttgggcaagatattttacatctgcctgcttcagattcttcacaggtgaaatgggcataattatgtaacctaacatgaagactaaataagatactgtaaagtgcttataacactgtatagtacgtgccgcctaagcgatagctgccaggctgttactaagcactgctgtttgtgaggatgtaggtaaagcatttaatacactgtctgacacagactggaccacaattaatagtaaattctctgttatcattattcccattactacttcatattttatacttattaccagctgaaatcacagctgaaggttcagagtgctttgtcactaaactcttgtgtatgggaacatcttacttggacctagtgatgatcctggggaggaaggagcttgagattgttacccctccccacactggacagatggggtattggagcctaaagaggtgcagtgactcgcctacagtggcacagctagtgactgaggggtgcaggtgtgtctgactggatggtgcatgaagagtaggtgtctgctcgtatgacactgaacaaatggccccaaaccaggtggcttctattggtgaactgttggggagacttgaaagctttagaatgctgaagcatggcaggataataaagtggtgaagaagttgtagaggaaaaatgttggacctgggtttgcaataagcagctctgccactgacttgctaggaaaacctgagtaggtcactccacctctcttagcctcatttcccttgtctgtaaaggagtctaataagaggagtacctaacactcggggtgtgtagggaaaactctgtgactttcctctactttcacaccacagcaatcataacacagaacatgacttctgtgaccatatgtctgggtttttttccccaaactaagcagtggacagcagctggttgtcctctaattcagttctgacacgtctgcccagagacaggttcagatcccacagattgatagctcagtccccaggactgtccccagccctgaccaccagtcgctggtcctgtggaacttctgattgatcagcttcaagttgggattcccacgaccccctctttgggtttgattaggctcatagaactcagggaaacacttatgtttactggtttattataaaggattttgcaaaggatacagatgaagagatacagagaatgaggtgtgggggaaagggcctggagcttccgtgccctccctgagcccaccaccctcaagaacctctatgtgtttcaccatctggaagctctctgaaccctctgggtttttatggaagcttaatggcagagggtcctgagtggaacggaggcaccagccatgtggaactctgtgggaagagcatttcaggctgtggggagaggcagatgtaagctcagtgtgttggaagaatagcagtgaggtagccatgggttgagcaagattgttaagggagagtgagactaggacatgaggttggagaagaacagtgaccacagtatgtgagatcaggtttctttgaaactattggcagattgaaatgaaagagtgtcgggatttcttttacacctgaaagagtcactctggggtctgggagatcagatggtgtaggggcaaaggtggaagcaggaaaaccaggtaagaagctgttgcagtctcccaggcgacagctagtgatgatcagagtgaccttagtttgggagggttgacaggcttggctcagaaggagctgccaacccttccaagaaggatagttctctgtggattggtggaaagacaaggtgctggcagttcccaggtgtttggccttcagcagcattgcttggctataaggtctagactggagataaagatgaataagaattgagtccgtggatacgcataaggtcttcaggagacaaagaaaacagggagggtggttttaactgtgtgcagagggagccagggaaactgaggctgggaacgagcctaagaacagtgtagctggagtcacattggcgagaatttatttattgaaggaagaggcagagatactaaccctcctactgggccctgtgctgagctcttcaatgaaagcatttatttccctttagtctccgaacaaccctatgaagtgagaacagccctgtggtgatttaggggatgacaaaggctcagagagatgaagtgagctgctgtataagcagccaacagtaaagcaagatttgaacctaccataaaatggagatgatgataatgactccttaaatgagagggttgtggtaaggaggtgatgcagaagttgaacccaccacttacactcacacccctttggccagagcaaggttacgtggccttgccaactgcaagggcgtctgggaaatgcagtcggctgctggattgccatacacccaacttaaatgcaggaggtttaagtgccaatagatgccagggatattagcagcttgtgctgtgcagagatcagcagttcccactgcctcagggatgagaggatggagcttaagagagaggcctttggatgtgggcattagggacagaacggattttcccttcacatattcattctttcagcaaacctgaattgctgtctgtctgtgctcagctctggcaggaactggggcacagagaggagccagtcctgggctcgctgattatagcctatgttaaggatgtggtaaaggtggcatggaaggagagagagactgagcccagagaaggtgtagcggacatcctagaaatcttccaagaaggggcggctaaactgaatctccaaggataaaaataaatttctggcagagggaacagtgctgaggggagaagctggaccccaaaaaagctctcgttgaccatgctctgcgctttatacacctagtcatatttgctcctcactgtaaccgttgctacgagggagggatggtgaacaccattttacagacgcagaagctgggactcagagaggtggaatcactcagtcagtatttcacacccgctagagggcagaagcaggacttagggctctcttatcccagccaagcctgtaccttaatatctgtggcagcccaggtggagagtgggggagcaagtgggcggatggaagaactgagtgctgacagcctgaggaagcagaatggagtccatgtgttctgagcttgggctggggtcagagttgagatgggatagtcacgaagtctgtcttggttccacagataccatctatgatgaagatgaggtcctcctggccctggcagaacagctgggaaccttcactaccctggtgggaggcccagagtacgtgcactgcctgctggtgagtggaaggcaggaagtcctcttgcccaccccttagggtcggcccatggtcctgccggcctagggcagggaggggagcgtgtcagagagcgtggggatcacgtcagaacagccgggccatggacatccgctttaatccaacaagtcaggagtggcttttaatatcgtgaactcagggtgcagttatcatcctttctgtttagtggtcaggtaggtgcccagtgccaggccttacctgggattctacatagggctgtgggtttagagtcaggttgggttctactgcttatttgctgtgtgacttgtaagagaattacttaccctctctgtgctgtacctttctcatctgcacaatggggttatgaaaacctttttaaattaccttgaagagccctagcacagtacttggcacttagtaggtactaaccgatgttaactgcaattgtcattattgttgctgtgacatcatatccagcctttggggtaggagggattccctgtttatgggtgagccacctggagcactgagaggttaagcgtctcttcagattgtatgactagtagatggcagagctgggattcttggtctgtccatttgactgtctgccaggtccccaccccactgcctgcctgtgtgtcccgtgctaggtgatggccaaggacacaaagatgggccagatcccaacaagcagcgttgtttgagagaagatgatctgggaaggcagaccgtacaggttacctagtcccctggttttcactgttctcagagtgctgggccactgctgctgcctctgcctctgccccactcccccagtgattgtgtatttcactgtcgctagagatacaatgtggcaccggcagttgatggtgtattagttagcagcagcctttctcctagctctagtggtgtataaagaatggtgcttatcattgttgggatcttgggatttgagtaa

SEQ ID NO: 2060 - DNA, 6000 bp, Homo sapiens
gttgttgtccagtcctttctccagatgtactcttggattctgtaaggttatgcttctggttttctcccctgcaccctctcactccttttcccctttcatgttggtgcatccacgtgtatccagccatttggtgttgaattttttttcttttttttttctctttgagacagagtcttgctctgtctccgggctgaagtgcaatggcatgatctcggctcactgcatcctccgcctcccaggttcaagtgattctcccgcctctgccccctgagtagctggcattacaggcatctgccattatgcccggctaatttttgtatttttgtagagacggggtttcaccatgttggccaggctggtctttaactcctgacctcaggtgatccgcctgccttggcctcctaaagggctgggcttacaggcatgagccaccgtgcctgaccggtgttgaaatttctaaggctttgtcccaggcctcttttttctcttactggtctctccccaggcctcatctgcactcttgggttcagctacctactttagtgaacataccctaaaacgtatttccccaaccctcatctcatacaagtcttactgctctcctttcactccatgcttccctttccttttcccactcgagatggagcttccaccacctgctttgcccagttagcaaatgtgtatccttcattttgtcccagagagcacaccttcacagaagcccactagagcacccagctagctcatacccattctttcatgattatctattgatttgtttggttattgaataatgaccgtatcctgaactcaatttccagcttcgaaaaagcacagaccttgatctagattttctcctaatgttccatgtgcatagtttgtagtcaatagtatgtattcagatatttgttaggtgaatgagccttaatcatttttgacattttaggttatgtgacattctctccccagtaccacctcaggctcgatgatttgcctgaaagtcaaaattcagaaaagaaagtcacacacaactcagaaaagctgttgtactcatggttacagtttattaccacaaaaggatagagaccaagatcaccaaaggtaaaaggcacataggaggaaatctgtgagaaaccaggcacaattttttttcttttttctttttctttttttttttttttttttttgagatggagtctcgctgtgtcacccaggctggagtgcaatggcacaatctcggctcactgcaacctctgcctcccaggttcaggtgatcctctgcctcagcctcccaagtagctgggattacaggcatgtgccaccacactggctgatttttgtgtttttagcagagatggggttacaccatgttggccaggccagtctggaactcctgacttcaagtgatccacccgccttggcctcccaaagtgctgggattacgggtggaagccactgtgtccagcacaggcacaaacttagcaggtgttccctcccagtgcagttgcacaagggcacactgaattctcccagcaaagttgtgtgcaacacattcacagtattgccagccagggaagctcccccaagccttgacgtctagagttttcgttaagggtcattgaggtaggaatgcagaacccacatgaataaccataaatatccagtctacaacccttgcagaaaacaaacatatagcatggcccagggcctcatgcatgcaaaagccagcatccaccatgaatcatattgttagcataaattatctggtcaaacgtgcagcaggacctacttatggttttcgacataaaaatcttaccaggcaagataccccaagaggttgttttcctgaagttggccctaattcattctagggtcagatatcagatagctgcggacagtgcctgtgtcctaaaacctgccaacattattcacagtagcaaatcctattctgtttatgctgcccctgccctgccttgccttgcctttctggtggaaaacacagcgcaggctctgggccttgctttctcctctgctgctgctttctaacctgctctggtgcttccacccgcatggtgtgctctgcctcctgtttctagggatctcttactataaacttcctccataataatcacttctgtatctgattgtcacaccctgcctgactaaatacaatcccaggtatattctagaatacacagggagcctattacaacatccttgggccaggcgcagtggctcgcgcctgtaatcccagcactttgggaggctgaggcaggactgcttgagcccaggagttcaagaccagcctgggaaatatagtgagaccccatctttaaaaagaataaatttttaaaaattggctggatgtggtggcatgcacctgtggtcccagctacttggcaggcttaggtggaagaattgcttaagcctgggagttcgaggctgtagtgggccatgatggtgtcactgcactccagcctgggtggaagagtgagactttgtctcaaaactaaaaataaaaatatgacctccttactgtggcctccaggacactacagaattcacgtccatctatctctgtgattcagtttatcttcagctgcagccatactaaccttgttgcacttccccaaacacgacaggatcctcctgctttcattcccttgtcttaggtgctctctctatgagaccctgttacctcagatgctccattcctccaagtccatgctcagatataactgtcttttagacatttcccaactactctacctccctctaaccttctatattgtttacttttgtggttgtggttgttctttttgagttactgattgttggaattaaaaggtccccgagggccagggacagtggctcacgcctgtaatcccagcaatttgggagactgaggtgggtagatcatctgtggtcaggagttcgacaccagcctggccaaaatggtgaaaccctgtctctactaaaaataccaaaattagccgggcgtggtggtgtgcacctgtagtcccagctacttgggagtctgaggcaggagaattggttgaacctgggaggcagaggttgcagtgagccgagatcgcaccactgcactccagcctgggcgacagagtgaaactgcatctcaaaaaaaaaaaaaaattcctcaagtacaggaatgcataattattttgctatgtacatatctgattttttagagcagtgcctgttgcaagataggcactcaatcgatactcattaaattaacaatatacacatatataaaacagcactttcacatggttatgagtgacctaaggaaaaacagaacaggatgacgttgtagtgggggctgttttaaattgacagtttggagctgggcgcagtggctcacacctgtgatcccagtattttgggaagccgaggcgagtggatcacctgaggtcaggagttcgagaccagcctggccaacatggtgaaaccctgtctctactaaaaatacaaaaattagccgggcatggtggcaggtgcctgtaatcccagctactcaggaggctgaggcaggagaaatgtttgaacctaggaggcggaggttgcatgagctgagttcgagccactgcactccagcctgggtgacagagcaagactccgtctcaataaacaaacaaacagacaggtttgggaaagcctctgagaaaggaatggttggcctgagctaagcgccattaccctgatccacctattgtaaccacctaatgggttcattattttccctgctccccagatagagtcgacttatcaagacaggataattgcaataaagggtttaattcacatcaatcgagctaaatgagagaccagagttttattactcaaataggtctccccaaatattttgagacgagcttttttgtttttgggtttttttgtttttgtttttgttttttttgagacagagtctcgttctccttctgtcgcccaggctggagtgcagtggcatgatcttggctcactgcaacctccgcctccagggttcaagcgattctcttgcctcagccttttgagtaggtgggattacaggcatgcgccaccacacccggctaatttttgtagtagaaacggggtttcgccctgttggccaggctggtctcgaactgcctacctcaggtgatccgcccgcctcggcctcccaaagtgctgggattacaggcatgagccatcacgccaggccttcaattatatttctgcaagatatgttccctgtctaaaagaattcaatttttaatgtttttgaaacttatgtgtttgctaaacaaatacgtgggggctgattttacgatctgaggccaaatccacaaactgattacagggtccaacaaatatttggcgagtgggaggagaggggtaagtgagctggactggtggcgtcctggctgtgagcaggcacagccgcaggcttcagggagccccatcgcggtgaccctggagagtggcctgaatcggacgtgaccttgaagcaaggtggttttggggtcgccggctgcacaaggcgcgaagtggtttagggtcacgggctgcacgaggctccagcacgtcaggagtgggcgtctgttcattcccacgtgcatcgcggctctctcctagttgacgcatgcacaccccgtgggtgtatgcgttgttcattcccacaacggccatcaccacctctccgcaccctctgtctccttccttctcgggcctcacccctggccctcgctttcagtgcccagcccggaccgcagcactccagttccgccccaacccgggaaccctggactgaggctcccgtttctgtcctttctattgggcgcacttccgatggcgtcaggaatttcagccaataggagccagccaggaagtacctctctgagcggttggtgccgggtataaaagaaggccgcgcagccacggctgctcacgacgccgcggatcccgaagcctgtgtagcagtgagacatcagtgaggctgcaggacgagcaggattggaagcgccccggccagaaagtgaccccccacccctttcaggaccctgtgaacgggaacagccatccagagggttcaggaaggcgtccgcgccctcacctcttctccccatgagctcccccagagctgtggtgcagctgggcaaagctcaacctgcaggcgaagagtgtgagagccagcgccagagaaaggacgcagggaaggctggggactgggccaggggtcgggtgcacagaagacacatgtgttgacatctcccctccctctcctcctccccaacgctcttcttttctccccactccctcccttccctccaattctttctttcacctctccctcccctactctctcctccccttcctttctctctgcctcttcttcacctcctcctcccctccctaccttaccttactctttcttcttccccttacctctccctccccctctccctgccttccccttccctctctttctctcctccccttcttcccctcacctctcgctccctattcccttctctactgttctcctctcctctctttctctccccttctccttccctcccctctcccttcctatctccctcctcctcctctctttcagtggctacagcaaaccaaacagcccagcagcccagcagcccagccatgtgagtcccttgggattggtatctggaaaaggaaggaaggtgggacgtggggatgaagaacagactgggtgtgtggggtgctggctcctgggaacgagaactactgatagggctgggtctgtgtgagaagggaaagcggcagaggaaggatacaatgaaagaggaaggggagcattggcatccctgactttccctccgcctaccctacctcccaagctgaggcttttttcttcctctcctgtcaggcggcgcctcacagtcgatgactttgaaatcgggcgtcccctgggcaaggggaaatttgggaatgtgtacctggctcggctcaaggaaagcc

SEQ ID NO: 2061 - DNA, 6000 bp, Homo sapiens
gaccacttttagtcagataaacaagaagaaagttcttggttagaattgtatatttttaaatttataaacagccttccttttctttagcagttatgtgaatttgactcaaccttacttgttaattctccagacttgccaacttggtatcatggatggtattttatataatattaactgagcgtatctgtggttatttttccaaaatgtaaaaaggatcttctctcttccctgctttaaaacgttcactagtttcacttttcctagagcagtgcttttcaaactgtgtacctaggctgatactagctaacatttactgagtacttaacatgtgacactattccaggctttgacatctgttactggttttattctcaaaacaaaccaatgaagtaggtattagtatcttaacatttttatgagaatttcattttgctttgtaatatttaatacaaaaaagctttttttgtttttgtttttgttttttgagatggagtccacactgtcacccgggctgcagtgcagtagcatgatctcggctcactgcaacctccacctcccaggttcaagcaattctcctgcctcagcctcctgagtagctgggattacaggtgcccaccatcacgcttggctaattttttgtatttttagtagagacggggtttcattatgttggccaggctggtctcgaactcctgaccttgttatctgcccgccttggcatcctaaagtgctgggattacagccgtgagccaccgcgcccggccctaaaaaggtttttaaatggatgacctagcatcaagaaaaatggaatctaagaagatttctatcatatttgtcttttgtgactttttatactccaaggcatagcataccatgtactagaagtgaaaatttctttgtatgaaattagggacaaaagacatactcaagaacttttttaaaaaaataattagatttcgtagacctaaaattattcttttaaattgctgtgcaagtttctaaacctcttactctcgattcctgtatttacctcattttagatggatacttgaatgcaaagggcactgagtagcactattctccctcgtacttgatgttttaaacattttgtttcccgtccctaaaatgagtgcacatccctgttttctgtttggtgcatttctacttttccttcttcatgcctcaaatactctttccctgggaagcctgtcttaactggaggccatctccagcagagctactccatctgtgtgcttccttagcaccgtattcacatctttcttagttcttggtatgtagttggtgtacttacagacggtgagcttcttgagggcaggggcctgattttaagtcttctctatatccgttatagcacctagcaggtatgagtaaatgttgaatgaatggatgagtgaacagataggctgtttcaaattacaatgtttggtgtaatctagaatctagccttaccattagaaactataggctacatcatttaaagcctcccagggcaactagtggcaacaacctaacccctgctctaagaacatgcttcaagtccaggctggtatggtatagtattactgtagtagtaaatgattgaaatgcccgctaggcagaagttttatcatttaatgataatgcacagtaggcagaagtttagtgcctaatgttctgtcttatttatttcaggaattgttggataaatatttaatagccaatgcaactaatccagagagtaaggtcttctatctgaaaatgaagggtgattacttccggtaccttgctgaagttgcgtgtggtgatgatcgaaaacgtaagtttatttgttatatgggcaaaagtagaatataaaaaaaagaaatggggataaatgggacactatgacagtatacgtagtcttcaggctctttgtgacttaataattgaatgtatgtcaagaaaattagtattaccttatgttctcaaaaatgaaaattggattataaatttacatcacatgctctttaaaaaaattaagctcatctgtgaactctgtaatctcatatggtattatttaaaacaggattaatcttttatgctttttagaattttggttcaccatatttttagctccagagttttttgtgtaaactttatgagtgattctgcatttcacatggcctttctattatgccttaaaacttcagatcactggaaattacatacagaacgtggaaacaggttgttgtgcttttgctgtttgtcatattcattatcgtctattttaaggggtcataacattgactgctaattacatataatcagatttctgaggagaggtgaaatgagtgtgttattgctggtgtataacttgctccaacttcacagtaagtttgaatgactcatggttaggttttacttgagaaggttgaatatacaggaactgttgattaatcaagtagtggtcataaaaatagattttagtattaaataccttttttttttaacctagactatcatagaaaacatggatatgagaaaaagtgaccgaattgcctaacttgataataaaaaagtgaagtgaatttatttgcagtgaatgtctcttgggatactggcagctgaatataagatagatctcattaaatttagtgtatgtgcttgctaccagatttatcaagttctaggtattagaagtgtcagtccttattttttccagtaagtttgttgttttgttcttaattttgccctgtctacaaagatatacccctacaaatagttactatgatctgaaaatgagagttttgccatcctaaatatcagtgtaactgaatatataaagagaacttgtacctgagaaactgttataccttgctataacaaaatctatatactaaacttacttattctgttactgatgtgtaatttctgttgccatgaaggtaagcagaattggacatgatacgggcacggaactgtacatttaagtatcagaaagccaaagagaagtatttgggagattgagacatagctgtagctttaacctgatttaacccttaggagctcattggcactttcaggtctcacacgtagtcctgtgtacattctgataggctgcgattcatagataggctgtctttatagcctaattgctgagacactggtgcttcctaatttgccaagctgcaagaacttcttattgcatgtgggctgtaccagtcagggattagatcaataaatgtgccatttcagaggaaagaaaatgaacataattcaggtcataaagggatagcttaattctcttacgtcagtatctctaaagctgtaataggccagtggcctcatacagaaaactacccttttcaaaacatgggtataatcagattagtgttggtaatactgaacattttttgaagggggagtaacattttaattaggctagtaatcaaactctggtcagagcagattttgtcctatttattgaaacttttatattgcctttcaaataataccacttgatactaagaatcagtatttctgcaaatcagaaaaatagagattttggtgttgatgatctttgtaaagtttacattatttagggaaagggtattccagtcaaattattattattattattaattttgaatggagttttgctcttgttgcccaggttgaagtgcaatggcgcgatcttggctcaccgtaagctccgcctcccgggttcaagtgaggcttgtgcctagcctcccaagtagctgggattacaggcatgcatcaccactcccatctaatttttgtattattagtagagacggggtttctccatgttggtaaggctggtcttgtacctccaacctcaggtgatctgcctgcctcagcctcccaaagtgttaggattacaggcgtgagccactgtaaattattccagtcaaattatttttaattgctgcatttccaagtaatagaattaaaagacataaaataagaaaatagttttagcctaggtatggaaaaaagtctgatttactataatatctcatgttttttttccattaagctgtttatatgtaagcaacattctaaactggttttttgttttgtttgtttgtttgagacaaactgtcactgaggttgggagtgcagcagcatgatcttggctcactgcagcttcaacctcctgggctcaaggggtcctcccacctcagcctcccaagtagctagagctacaggcacgcactaccatgcctagctattttttattattattattttttgtagagacagggataagatctccctgtgttgcccaggctggtcttgaactcttcaggttcaagtgatccccctgcctcaccttcccaaagtgttgggattagaggcatgagccactgcacctggccataaacaagttcttaaatacccagtacacaatattgtttttgtttgtttgtttttgacacagagtatcgttctgttgcccaagctggagtgcagtggtgtgatgtcggctcactgcaacctcagcctcccaggttcaagcgattctcatgcctcagcctcctgagtagctgggattacagatgcccgccatcacgcctggctaatttttgtatttttagtagagatggggtttcgccatgttggctagactggtcttgaactcctgatctcaagtgatccacccacctcggcctcccaaagtgctgggattataggcgtgagccaccgcgcctggccacgataatgttttttgttagctaccatgattttaaaagacccatacagagaaaaaatcttggttctaccaagagctagtagcatatgttcaagttgttaatgtactgtgtactggatggttatttttaatattgcacttcttatttttcgctcttcacagaaacgatagataattcccaaggagcttaccaagaggcatttgatataagcaagaaagagatgcaacccacacacccaatccgcctggggcttgctcttaacttttctgtattttactatgagattcttaataacccagagcttgcctgcacgctggctaaaacggtaagatgtgtgtccaggaaatacgtactttagctacagttatttgagataccaggtatgttaatttataggtattttacttggatacccagggatgatttctactatatttattttgaaatctcctctttttcttcccatcatgattacctactcctacccctgacaccttactctaccctatgattataagcagtgatgtgcctacagagcatactgagcagagtaatcaaagaaggataaatgatgttaagaaggaaacataaaagattagaaagtcatgcctgccaggtttggttactagaatagctgtgcatcagccacattcctcaaagtggctcaaaacgagagaataaagaggaccctgtagagataagtactacttaactggaaagaagtctgttaagcattgctgctgttccgttgtcctgtgaaagaaccaagacatgcttgtttactaagtgtatagttttataaaattccagtcatactcataagttcttaaactgggagtgtgagagaatggttctgttgagtttgttgatggtagaacataaggtgggtgttcacttattttgtaaaaatggtttgtaattgtagaataaccagttttcgtcaatgcacatattttaccatggatattaatatttatcaggcttttgatgaggccattgctgaacttgatacactgaatgaagactcatacaaagacagcaccctcatcatgcagttgcttagagacaacctaacagtgagttgtttactcttttaattttattttcttttcagaaacaaaagtatttatattttattttggacttcgtgtcttttagggaagatacatacgagctgaaagtatgagatacgtgttagtattttatgggacgaacattattttgtaggcaggttttcaagttgaataggcattttatcagaccttcctgagaaggttctaac

SEQ ID NO: 2062 - DNA, 6000 bp, Homo sapiens
aaaagtggttgaagtgacggtaggattgttttatacaatagttaactcttgaagatcgtatgggggttttgttgttcttctggaagcctttttttcctaagatatgggggtgggggaaaggaggaatagttactgttctaaatttgcattaatattatttctcaacagtttcatttcttatattattctttatagcttttgtgttatagtctattgttcccatcctatttttctaagattaaacttattctgagttcctttagcatttcctaaagcaacctctataataacttacattctttcctttcactttccttgtttctttggtctagagtgttccaaattactagttcatcttttattgtgggtagtacattgacctcttagttttcaaattctcaaaaaggaacacactaccatccacattttaccctcagtcaagtaacactgtcagcaccagagggaccttcagtcttagcccaccaaaactcccaagataataaaatttgctaacgagtttacaagggggagctcctgcttaattgataagaataacgtacagaagaaatcagtgggggaacatctaactatactcccgtctggtgactttttttttttttttttttttgagatggaattttgctcttgttgcccaggctggagtgcaatatctcagctcactggaacttctgcctcctgggttcaagcagttctcctgtgtcagcctcccaaatagctgggattacaggcatgtgtcaccatacccggctaattttgtatttttagtagaaatggggtttcaccgtggtggtcaggctggtcttgaactcctgacctcaagtgatccacccatctcggcctcccaaagtgctgggataacaggcatgagtcacggcacctggccctcgctcctgacttctgggaaagactttcagggagttatgtgtcagtttggggtttttggtctctgatccgtgttttttacaataattttaaaatattatacatttataggctatattctatctggcattaataatatttggtattgataatacagatacagacttgattatttgggaaagacatgaagcagactccattatgtcttttagttgagctaaagtatacatctttactactgatagtatatggaaagacggaactattctgtacctgttgtttccttcacagagagctagtggcatctgacaaagaaccatgatacctggctgaaactccaggatggaagtaatgcccaagtcactttgtaaaagcccaacactgtaaatcatacgtaatggttatatgcaaactagtagtcaaagttaataattttagaaagaagaggttagctcataagtggctgtgttgtaatgaatgcagtagctgtttggcagctttctgaatccttggaaggccctttgtccacagtccttgagaacacccacacatctagcatgagtgactcaggagagactagtgctagaatggaaatttctctcttccctactcctcaccctaagccattgttctagtcagacttttctcagcccctgctcttacaaatctaccacagttaacagagcactaggtcttaaaggtactgagtagctttttttgtgaccataaataatatcttcaccagagctggcatctttttggagatcctgtggaatttcattgtaactgactgactcacttggaggaacaagaaaagtgagaggcatcttactttacattagagttccttggtgtgggtacaggcagaggtggtatttctctcggtataaatactatgtttgccttctttgatactacttctcagaatccactcatttaaagataccaatgactgagtcagtttgagatctagaactttttttgtgactatctcactattgcctcctaccctcctccttccaccacaaccctaaattcagttcataaaaatagtttttaaattgaaagtcatccataatacatgaaaatggtaatagaggaaaaagttaaagtaatataattttttaagattcgagtgtctcagtttattaaaaaactattaaaattatattggtgatgttgagcacaataaattctgaaaaactgatttgtctgttgtttttacagttaagagtgtagtgatactggagcagcacttgtcacagttgcctttaatttgggtgtggccctaatgacctcttttgccacactcctggctcagcaactttccaacttgagccacaattttgatactcatgacttctataatgcataaacttctgagacttcgatacataattttatactaattttttgtgcgtgcgtgtgtgtgtgtgtgtgtgtgtgttttaacttcctctggcctcaggcccttaaaaaagtgtgtgtgtgtgtgtgtgtatatatatatatatatattttttttaatctatttaaaatattttttcaattaaaggatttttaatgtttttctggtttttttcttttagagacagacaggatctcttttgctctgtctcccaggctggaatgcagtggcacgatcatggctcactgcagcctccacccccggggtttaagccttccttctgcctcagccttccaagtagctgggattacaggtgtatgccaccacacctaatttttttaaaattctttgtagagacagggtcccattatgttgcccaggctggtctcaaactcctgggctctcaggcaatcctcttgcctctgcctctacttcccagagtgcttggatggtaggtgtgagctgttgtacgcagcctctgtttattttctttaaaaataacttatgggccaggcgcagtggctcacgcctgtaatcccagtactttgggaggccgaggtgggcagatcacttgaggtcaggagtttgagaccagcctggtcaacatggtgaaaccctgtctctactaaaaatacaaaagtaagctgggcgtggtggtgtgcgcctgtagtcccagctgctcgggaggctgaggcaggagaatcatttgagaatcaccactgcactctagcctgggcaacagagtgagactttgtctcaaaaaaaaaaaaaaaaaaaaagacatggatgcagtgattgcattttgttagaccacttttagtcagataaacaagaagaaagttcttggttagaattgtatatttttaaatttataaacagccttccttttctttagcagttatgtgaatttgactcaaccttacttgttaattctccagacttgccaacttggtatcatggatggtattttatataatattaactgagcgtatctgtggttatttttccaaaatgtaaaaaggatcttctctcttccctgctttaaaacgttcactagtttcacttttcctagagcagtgcttttcaaactgtgtacctaggctgatactagctaacatttactgagtacttaacatgtgacactattccaggctttgacatctgttactggttttattctcaaaacaaaccaatgaagtaggtattagtatcttaacatttttatgagaatttcattttgctttgtaatatttaatacaaaaaagctttttttgtttttgtttttgttttttgagatggagtccacactgtcacccgggctgcagtgcagtagcatgatctcggctcactgcaacctccacctcccaggttcaagcaattctcctgcctcagcctcctgagtagctgggattacaggtgcccaccatcacgcttggctaattttttgtatttttagtagagacggggtttcattatgttggccaggctggtctcgaactcctgaccttgttatctgcccgccttggcatcctaaagtgctgggattacagccgtgagccaccgcgcccggccctaaaaaggtttttaaatggatgacctagcatcaagaaaaatggaatctaagaagatttctatcatatttgtcttttgtgactttttatactccaaggcatagcataccatgtactagaagtgaaaatttctttgtatgaaattagggacaaaagacatactcaagaacttttttaaaaaaataattagatttcgtagacctaaaattattcttttaaattgctgtgcaagtttctaaacctcttactctcgattcctgtatttacctcattttagatggatacttgaatgcaaagggcactgagtagcactattctccctcgtacttgatgttttaaacattttgtttcccgtccctaaaatgagtgcacatccctgttttctgtttggtgcatttctacttttccttcttcatgcctcaaatactctttccctgggaagcctgtcttaactggaggccatctccagcagagctactccatctgtgtgcttccttagcaccgtattcacatctttcttagttcttggtatgtagttggtgtacttacagacggtgagcttcttgagggcaggggcctgattttaagtcttctctatatccgttatagcacctagcaggtatgagtaaatgttgaatgaatggatgagtgaacagataggctgtttcaaattacaatgtttggtgtaatctagaatctagccttaccattagaaactataggctacatcatttaaagcctcccagggcaactagtggcaacaacctaacccctgctctaagaacatgcttcaagtccaggctggtatggtatagtattactgtagtagtaaatgattgaaatgcccgctaggcagaagttttatcatttaatgataatgcacagtaggcagaagtttagtgcctaatgttctgtcttatttatttcaggaattgttggataaatatttaatagccaatgcaactaatccagagagtaaggtcttctatctgaaaatgaagggtgattacttccggtaccttgctgaagttgcgtgtggtgatgatcgaaaacgtaagtttatttgttatatgggcaaaagtagaatataaaaaaaagaaatggggataaatgggacactatgacagtatacgtagtcttcaggctctttgtgacttaataattgaatgtatgtcaagaaaattagtattaccttatgttctcaaaaatgaaaattggattataaatttacatcacatgctctttaaaaaaattaagctcatctgtgaactctgtaatctcatatggtattatttaaaacaggattaatcttttatgctttttagaattttggttcaccatatttttagctccagagttttttgtgtaaactttatgagtgattctgcatttcacatggcctttctattatgccttaaaacttcagatcactggaaattacatacagaacgtggaaacaggttgttgtgcttttgctgtttgtcatattcattatcgtctattttaaggggtcataacattgactgctaattacatataatcagatttctgaggagaggtgaaatgagtgtgttattgctggtgtataacttgctccaacttcacagtaagtttgaatgactcatggttaggttttacttgagaaggttgaatatacaggaactgttgattaatcaagtagtggtcataaaaatagattttagtattaaataccttttttttttaacctagactatcatagaaaacatggatatgagaaaaagtgaccgaattgcctaacttgataataaaaaagtgaagtgaatttatttgcagtgaatgtctcttgggatactggcagctgaatataagatagatctcattaaatttagtgtatgtgcttgctaccagatttatcaagttctaggtattagaagtgtcagtccttattttttccagtaagtttgttgttttgttcttaattttgccctgtctacaaagatatacccctacaaatagttactatgatctgaaaatgagagttttgccatcctaaatatcagtgtaactgaatatataaagagaacttgtacctgagaaactgttataccttgctataacaaaatctatatactaaac

SEQ ID NO: 2063 - DNA, 6000 bp, Homo sapiens
caacatggtgaaaccccatctctaccaaaaatacaaaaattagccaggcgtggtggcatgtgcctgtagtcccagctacttaggaggctgaggcagaagaattgcttgaacccgggaagtaaaggttgcagtgagccgagatgatgccactgcactccagcctgggcaacagagtgaggctccatttaaaaaaaaaaaaaaaagatatctatatcatttgttgggtaaaaaaaaaaaaggttactaaatgcattcaacagaatacacacatgtatttatatgtatgtgtacgtgtgtagagagagagatttattataaggaatctgctcacacagttatggatgctggcaagttcaaaacctgcaggccagcaggctgtagacccaggagagctcacgttccctctctagttctaaaggcatctatgggggacccaggaagggccggcgcttcggatggagtctgaaggcagtctgctggagaattccctcttgctcaaataaggatgctctttgtgtgttcttttcaggtttctgatttgatgaggcccacccacattagggagtgcaaactgcttattcaaagtctaccgatttaggccaggcacagtggcccatgcctgtaatcctagcactttgggaggccgaggcaggtggatcacttgaggtcaggagttcaagaccagcctggccaacgtgatgaaaccctgtctctactaaaaatacaaaaattatccaggtgtggtggttcacgcctataattccagccactcgggaggctgaggcaggagaatcgcttgaaccagggaggtggaggctgcagtgagccaagatcacaccactgcactccagcctgggtgacagagcgagactctgtctcaaaaaacaaaaccaaaaaaaacaccaccaacaacaaagcccaccgatttaaatgttacaccctcaaagaaacacccagaatagtgtttgactaagtatctgggcattgtgacccaccaagttgacacatgcaactaaccatcaccctgaacaaagtgaatcaagtttcaaactaaggaatatgtagaaaaactttcttgaccaggctcccttgatttccctgcctgtgtgtgactctacgaaacctcatttagcacccacaggccagagttggggggcaactttctctgcccactgcacagaagcaccaataataattatatgaagagtttgggtgaaaagtcccactcagatgtttgcttgtcactaaactagctgccatatggcaggaaaggaagaagtttctggtgatccactggtctgagcaaataaatcactgaaacgatttatgagagtgagcttaacctgaaggactcattcattctgaaatgtacatggaatgtagccattctgtagaccattaactgcactaattacaacaatgattcaagagataagctttcactaaacatttaataaagttctaaggctccttgcagcaggatagcatcctgccagcgccgtaccccacctccaagcagagggaaagaaggaaagaagaaaacactacttatggaacacttgctatatgctcagcatttccctatgtgacagctcatctaatctccaaacaactctttgatgtagcgatgatgatgatgatttttgagacagggtctcactctgttgcctaggctggagtgcagtggtgcaatcatggctcatgccagcctcgaccttctggcctcaggcgatcctcccatgttcagcctcccgggtagctgggactacacgcatacgccatcacacccagctaatttttatgttttttgtagagacaggtttttgacatgttgcctacactggtctggaactcttgggctcaagcaatccacccaccccgacctcccaaagtgttgggattacagacatgagccactgtgcccagctgggattatttttatagattacaggtagagagaattgagtttcagagaagatcaaggtatccaaggtcaaatcacatataaatagcagggctgaatttagggtcttctggctccatgttaatgtgctcctttttgttccaggagcttcttcataccaggtaacttagaaaaaataataagaacttcataaataaagtaataatttctcagtactccctttgctagctgtctgttccttgcacttcttcccagtatgttggatgtgatgcttaacaggtttcacatttattagggtgaagctcctagaagacagaggctggtctgatccatcctaggatctctacagcatctagcagagatctggggagacttggtgaggcagcctcagcagtggttaaaaagatgggctttggcacccaaactgcatggggtccatatccaaggttctgccgctctctagctgtgtggccctgtacgtcatgcttgaccaccctgtgccttaatttccttgtctgtgaaatagagatagtgagtataataacacctactttgtagttgcattaagcagattggataagttaattcttgcaaaagacttaaaatagtgcttgacatatgcaatcactcaacacaggttagctctttctgtgtccagggacttcaagttcccagagccttgtttctctccaacccgagttctttcaggcacagaagcctttagctatgtagagggtcctctgaatcttcctaaaatgcaattttatactgtgttattggttggaagcagtttttacccatgattccagatgattgcaactagatgagttggtgttcaataaatatttgattgaatgaaagcagaaatttcagagactaaggtacagaaagcagcaaaaacttgcccaaggtcactgggggagaccacagcacagcctagactttctgacaaagaatttagtgtgcttgctccttctggtagtccctctctaccacagaggttccatcccctgacaatttcctctcctgggtctctatcccccatccacctccactggcttctccccttgcccgggttgcctctaattttggtgagcttgaaattcactggtcatacagaaggcattttatctgaccttccacatgcaaattctttccattgggatttctcggtgtccagctccaccccagcccacagggccataaacactcatgtgtctgtagcggggccccagggattccagaaataacagcagggccctccattagaaggctggaacatagtaaggcatttctgcattaagacacaggccctttccaatccaggccgctcctgtctgtcaaagcacaaagcaaccttcacaagtcaggacagggaggggcagtcaagagggagtctgaatttctggaaagtcggcaccttctcctcccatctgtctgcactctcaaatctcccattctagagattctccggatttgctccagtctccactcagaatgggaaattctttatgatccattctccttagacctgctggaatcgggatcatagcagcgtgaacccagagggcaattctcatcttaagatggcacagggaccacgcgccagacgggcagggcagccaccctacctggatggagttagggaactggggaagtgcaaggagagacaggagtggtttaagaggaaagggagctgccagggatgaccctgaatgggaggggcctgggggaatctttctcgcttcagcagggtgttccccaggaggagaaaatcagaaatcaacatccagggagaggatttcagcttttcaagtgacctctcacaaataataccagaaacaaaagcgtgtgcacatgtgacaacgatgtgaaaaatgatgtatttaggtgcataacctggaaagcctaaaagatacataaaaattgctttttttttgcggggagagatgttatgggcagggtttttttttgcgggggtgggaaggggtagtaataggtgttttcctgcaaattgtgcttaatgtcatttctcattttaaagaaaaccacaatacttggcattgtcacagaaactcccctggatcttctgggacctaccttttcacaagggaattttttgttttaggatgcccatctgaaaacttgaatttatcatgtaaatgccatactgaagacaccgtctccagaatcaattcttctttaatggggatgcggtttgcttaattcggagccctaatggcaacgtcattaaggtctgggtttagtgtcttgggatccaaacctttgtcacggatagaaaggtggaggaaagaaaggcccccgtgctctaaaacagctgaatatgtcaccctccgaagtccagcctcggccagagcccgtgagatgcaatgcaccatccgcagcgggagacgcagccgccgcctaggaggtcgtgcgcgcctctgggtctcgtgccgcacccagaagtgccggggtggcggggaggctgaggggagttggtaacggcatcgccatggcaacagtgacgtccttttaccctggatctaattggaggaaaccccgtggccgaagccgcagcctgccggccaaccgaacttccccgtaccgacccaccctcctagcctccgcgttccctcccgctccgcccccctcgcccccttccgcgcgctcggtcctcattggccagcggcgcgctgggggcgggactctcgggagaagctcggcgcatcattgggcggtggaccgcccctcggccccggggtaggctgacacgggagggtcctcagctaaagccaaaagcagatcaaagtggtgggactcgcgtcgcggccgcggagacgtgaaggtgagcgcctgggtcggcccgcgggcttcctccggccgcgctcggattgagggccgggcggaggtgccgcccttgagagcagccggttgtcgatgccgctcccctcagggacggctccgggcgggaaggtgcggggccaacggtcgcttccatcttgggccggccgggcgggggtggcgggagcggccgcggctcgggctccctgcgcgcggggcctccgcgccgcccccgcctcctccagccgcgggccgcggcctccccgggtgcccagcgggggagggggcgggggagagggaaattcaagcggccgcgtgtgcgggagacaaaagcgggcggcgggccgcattgtctgacggcgctccctctctgctttttgttctcgcctcgccgccccgcccctccgcagctctcgaggctcctcccgctgcgggtcggcgctcgccctcgctctcctcgccctccgccccggccccggccccgcgcccgccatggagaagactgagctgatccagaaggccaagctggccgagcaggccgagcgctacgacgacatggccacctgcatgaaggcagtgaccgagcagggcgccgagctgtccaacgaggagcgcaacctgctctccgtggcctacaagaacgtggtcgggggccgcaggtccgcctggagggtcatctctagcatcgagcagaagaccgacacctccgacaagaagttgcagctgattaaggactatcgggagaaagtggagtccgagctgagatccatctgcaccacggtgctggtgagtcctcggcgcggggagcaggggaggccttttgtgagatgcttttcattgagagtttcgcgggcacggaaacaaacgtgagccggggcttgccggactgtctgctggggtggagggttttaggtgagccctgacttccctactgtgtccctccggttgttgagactcaagaagccgcttttccaaggataagtccttttttttcgccccagatgctgggtagctaccaaacgatggaacttggaaacatccaagtaggtctctgcgagactgaaaggcgtttttaagtttcttgtgcggggagactgcgtcctgagatctgtgagccctttaaatgtattcagtcggttcacaagcttcaggcagttgaaagaaggcgcaggcacctttttgttacagacaatgtagtagggattttttcccaaacccagtaatggaaattt

SEQ ID NO: 2064 - DNA, 6000 bp, Homo sapiens
ttataaacaacagaaactcacagttctggaggctgggaagtctaaaatcaaggcactggcagattcagtgtccagtgaaggtccactttgcttcctggttcatagataatgtgatggttaatattgagcatcaacttaattggatgcaattaatttaaatagccacaaagtatgcaaagtattgttcctggtgtgtgtctgtgagggtgctgccaaaggagattaacatttgagtcagtggactgggaaaggcagacccactctcaatctgggtgggcaccagctaaccagctgccagtgtggccagaataaaatgcaggcaggagaacatggaaagactagactggctgagtgttctggcctccatctttctcccatgctggatgcttcctgtccttgaacatcagactccaagttctccagctttgggactcttggatcttcaaccacagactgaaggctgtactgttggcttccctacttttgaggttttgggacttggactggcttccttgctccttagcttgcaaacggcctattgtgggacttcaccttgtgattgtgtgagtcaacactctttagtaaacttcccctcatatataaatctatcctattagttctgtccctctagaaaaccctgactaatacagatggtcatcataaaccaaaaagtatctgagacgggtctcaatcaatttagaggtttattttgccaaggttaaggacaatgcctaagagacaggtctatacctttctctgaagatgattttgagggcttcaatatttaaaggggaaagggcagatattggggaagggggaagaaatttttaaaaggtgttgatagataagagctaagtggttgcattcttttgagactttgatcagccgttcacacagaagaggcgggtagaggaatagtcacttatgcattcacctagctcagtgaatctgcacttttacataagacaaaataaacatggcagaggaggccatcagctatgcatttgtctcaggtgagcagagggatgactgagttctgtcctttgtctatgtcctgtccatacctatgaagataagctgtcaatctacattgtccgggtgaaattcaacagaactattttagggtaaagatcttggggcccacagggaatttcctgtggggaaaatgtggaggaagcatgtagctttttaacgttgtagctatcttatttaggaacagaatgggaggcaggtttgcatgatgcggttctcagcttggctcttccctttggcttaggcactaatcccactcctgggcaatctttcctcacgacctaatcacctcccaaaggccccatgtccgaatatgatcacattggagattaggtttcaacatgtgaattttgagggaacacaaaccttctgaccatagcaactggactcaatgatatctacaattttagtttctttgcctgggctatccaatatggtagcaactacttatgtggctatttaaattacaaattatattaaattaaattaaattgaaattcacttcctcagacacaccagccttatttcaggtgccagtggccacatggggcagtggccaccatatggaacaatgtggaacatttccatcatcacagaaagccctagtggatatggtcatttcctcacggacctctggagaggacattttcaagtagaagggaagtaaaatatcttctgacagatgagggctttcaggattgctcaagcacacctgtgcagttggcctaatatttcagccctaactttaaaaatgatccctgggaagtatagtcttcagccctaacttgaaagtcccaaagcccatgccccattctgccctagcaccattttgccccaggaagcatacacaaaaacagggctggaactgggaaataccagaatttctgtgctcagaactgtgactgtatatcaatgtaaggccatggtggacaaagccaaggatgtagtggccaaagtcctggtatttgagtacccaacctggaacaaacttctctgagcctctgtaccctcatatatatatatatatatatatattttttttttttttttttttttgagacagggtcttgctgtgtcacccaggctggagtgcagtggcatgatcttagctcactgcaacctctacctcccaagttcaagcgattctcttgcctcagcctccttagtagctgggattacagtcgcctgccaccacgcccggctaatttttgtatttatagaagagacagggttgcgccatgatggtcaggctggtctcaaactcctgacctcaatcaagtgagcctcctgcctcagcctcccaaagtgctgagattataggtgtgagccaccatgcccggccttctataaagtattcttgaaatagctgcctcacaggcagatgtggaaaagcacctgtagtttacaactaattcagttattattttttcttcctctgctgtgctgctattgtgtgttagacacactctaatttagtacttatgctttctgcttatgtatctcccccaggctagtagcccctggaacacaaggtaaggccccatcagattcagttcttccctcaacacctaccctactgcttggcccatgagagatgcttcaaaaaaaaaaatgtgcaaaagattatgtcttggggaaaagccaggtcacaggcacaataagtgtgaggattgtgccatttccccgactctccccagctctgtgctcatgctctttctttagcctggaccacttgctactccgtcctgatccacaccccacctttacttgcccaaccccaactctggttgtagagaatctagtcgtccttgaagaatcttcctaaagatctgaatgccaaattaattaatcagttgtggagtcaaagcctgcctctaccactgcctactaggaccttgagtaaatttttgtaatcctgctgatcttaattttgctgatctgcaaattgggcagaaaaatacctatctttcagttttgatatgagatttacataagcaaatgcatgtggaatgccaaacacatagcagatgctgaataaatgccttcaaatggccatttctaacggctctgggaaattctccattctgcaacaatatgcagtcttctcgagacctccgctacgttctctttttttctcatcgtttatttagcaaacattaatagagcatgttttatttgccagacactttgctagatgatagagatacaaagattagaagccaggcatgggtgtctcacgcctataactccagcaccttgggaggctgaggcaggaggattgcttaaggtaaggagttcaaaaaataaaataaaataaaacataaaaaaaaattagccaggcatggtggcatgcacctgtactctcagctacttgggagtcttagctgggagatcacttgaggccaggagtttgacgctacagtgaattatgaccgtgacactgccctccagcctgggtgacagaaaaaaaaaaaaaaagattagagaaggcctctgacctcacagtctagtggggaaccagcttcttcggggatttttccctgcctcacctcgcccacctcaggctgtgtagaaacccccagtctaaccagttgtttccctccaactctgtacataccacggtgtgttgcctttttatttcaaacatgtgctggcctctgttctaatcacagcaacctgtatccattaatccatttaatcctcacaacaaccttatcaggtaagtattgtcattatttgcattttccaaataaggaaactgaggcacagacagattaagtaactggcttaataaggtcttctagtttatacgtagaggcagccaggacttgaaaacacaccttctggctccagctaaattaacatgctctgtttacttatctgtccccactgaaattggaggttgaacccgtggcatattcaaacgaataagtatcgcctgtgcccaccccaatatctgacactataggtcaacgataactcattcgtcaaacaggaaggaggaaggaaggaaggaaggaaggaaggaaggaaggcaggcaggcaggcaggcgggcaggcagaggtaaaacgattccacaatggtgtggttgctcacatttactaagcatcaacactgacctgcctgtaagatgcgctaacagagctcacgaataaatgaaggctgggtgtggtagctcacgcctataatcccagcacttgagaggccaaggtgggaggacggcttgagccccagagttcaggaccagccggggcaatatactgagaccctgtctctactaaaattaaaattaaaaattagccaggcacagtggcgcgcgcatgtagtcccagctacttgggaggctgaggtggaggatcgcttgagcccgggaattcaaggctgcagtgagccctgaccacgccactgcactccagcctgggcgaccaaaaaaaaaattaaaataaaaaaaaggaataaatgaacatctctgcggctcagaactttcagttatcacctcagaactttcagttatcaccgtcgagaattccaggcgaccgctgggttttcccggttgcctcttttctctcacccctgttcccttcctctggaattcggctccacctcttccttttcctttgccagcctctccgtggattccgcggtccgggtttcccgggcggcagccgccgggagaggatcggtgcgtgggagcgctccggcagcggcgggcatgcgcagaggggggcggtgtactgcgcatgcgggaagatggcgggccgggcgacttgagatccgcgggtctccctcctctttttccgtctgcgtcgggagctcccgggcacgtgaggccgtgccgcgtttactggcgggcgggacggcctagccgggcggcgcctcggaggaagccgcggaccccttaggtgctgggcccttggaaatcggcgcgtggggggcggtgctcgagctgagcgcgagagggcgggagagctcgtggggtgcgaggggagcaggacgcccggccgggcagcatgagtcagcagcggccggcgaggaagttacccagtctcctcctggacccgacggaggagacggttcgccgtcggtgccgagaccccatcaacgtggagggcctgctggtaagctccgggacgggacggggacgggcggtggtctcccaaatccggccccctcctccccgcgccgccgccaaccccgctggccgtcgtctgggtcgtctgctccccctgggccaggcgctgcccatcacgtgctgcgaactgcgctctcccgccttctgctttcagcatctgctcacagacgtggtatcagtcttctaggcttttacatcggaacttcagagcactgttggagaaaattgctcaactttgcattagagagtccatgtttatctccttctatggactctagctgtatctctgcaacctatcatttgtttttctgcctcctctcccatccttctgctctactgcagccgtttaaaaccttgtccacgctttatatttcccacgccacagctcccattcatcaaattatctccccacctgtttgacagagaaaatggttaggaaatttggctccctttcctgcaaaggctgatttcttctcttgttcaggaccagatgctgtattccccgcggttatcagggccctcaacaaatgcattttctttttcttttctttcttttttttcttttttttttttttttttgagattgagttttacttttgttccccaggctggagtgcaatggcgcaatctcagctcactgcaacccccacctcccaggttcaagagattctcctgcttcagcctcccatgtagctgggatcacaggcatgcgccaccacacccagctaattttgtatttttagtagagacgggatttcgccgtgttggccaggctggtctcgaactcctgacgacctcaggtgatccaccgagcccgacctctccccgtattttc

SEQ ID NO: 2065 - DNA, 6000 bp, Homo sapiens
ggggtttcaccgtgttagccaggatggtctcgatctcctgacctcgtgatccgcccgcctcggcctcccaaagtgctgggattacaggcgtgagccaccgcgcccggcggaaatatttttaaattaaatgcctgtcaggaatgtctattgcattgctggttcctagtacatgaattattattacttctaactataccagagtatccagcaatggctttcttaactggggcaaaaacggaatgatttttgtggctaaagttgttttaaatttctgtacattataataaacgaaaagtgaagtccattagtctgtaagttagtgaagatccatagactttatctttctcttctaatttcttttagaagttactatttaggaaggaatttttttttccactgaatggcattttcgttaatatttttgtaaagtgtatatgaaaaagttatgtgtgtataaatacatatgaagaatttctaagaatctacttgtaaaacattattcagagttttatatgctctgaaatattttaaaataaaaatatccataaaatgcatactttttgaccaaaggttttcttttcttttctttctttttttttttttaagaaaaagaccccataaagattgccgcaaggtggcactaaaatctaatgaaaattccaactctgctctggtctttgaggagtgtagaatgatttacaggagacacctggcaaacaaacaaaaccaaataaattaggttaaagattagagatagattaatatcctccttttgtctgaaatacaacttccctgtctcacaggtgtggatatattatgtcataagatgaatatgttaataaagttaattgttaacatgacttgttcttggctggtggcggtggctcacgcctgtaatcccagcacttggggaggtctaagtgggtggatcacttgaagtcaggaatttgagaccagcctggccaacaagggaaaaccctgtgtactgaaaatacaaaaattagccaggcatggtgtcacacgcctgtaatcccagctactcgggggtctgaggcaggagaactgcttgaacccaggaggccgaggttacagtgagccaagatcataccactgcactccagcctgggtgacagagtaggactctgtctcaaaaaataaaataaaataaaatgacttgttctcatagaagaatcaaattttatccctgtctgaggaagtgtattatgaagggcaagggacagggaggggcttgtccggcatatcacctagttgggaaaagtttatcctgtgtgtggggcagtcttggaagcagccagtctctgcagagcttgtcaaagtatcctggactaaaaaaaaaaaaataccatgaaaagaagttactaaagaagttactgcagaacacagatctatttgtttactttggcatttttaccaactgcatagttttagaaattattgcaatattgagatttgagcttggaacacctcatataatattcctggaaatcagaacacgaaggagttcaatccgttttccggattctttgttttttaaagaaaaaaacacatggtacaaagctttgtttcatatttcttggtatttgaagtttaaggacatagccaagtttcccaagctatattaagaccaaggaaagcggcgttaacaatacagctataaaaggttttgactaaaagaagaaaaatttgtgtaaataagacttttctaataggaaaaaaaaaaagcttccagattgcatccttaaatcaatgaacagaaaaactatttacttgctgacagatcagttccttagatctgaaaaacaaacccccgccccccaccgccccggccaacaacaacaaaaaaaagctggttggccggttgttgtagtgatgtgaatccagtctgagggaagcacagcacttccagtcgtctaaataagacgttccctctaggaagggctctaggcttagcagcactactgccttatttgatctgatttcatctgtggagccatatggggacctagctcttaacatatgaattacatgtgaaaacaccggggttcagtcacagttggctgcatgggtttgcttaatgattttctttttaatgtttactttttttttttcttttgagccagggtctcattctgtcacccaggctggagtggggtgttgtgatcatagctcactgcagccttgccctcctgggctcaagcaatcctcccacctcagcctcctgagtagttgagattataggtgcaggccactctcctccccacgccatcccattttatttttctcagggacagggacggggttttgtcatgttacccaggctggtcttgaactcctgagctcaaacaattctccagcctgggcctcccacgcccagggatcacaggcatgaggtactgtgcccggcctggttagataattgttaaagcgaagtgtggaactgaggtaagaaacccccagaaaattccacctgcgtttctgagcattcgggttaattccccacagtcatttactgatccttgtaaatgccaggcattgtgctgggtcttcaagatgcggagataagacagaatcctggccctccaacaactgacagagaccgagacagagacggagacaggaggcaaccacctcccggtcatgtggtgggtccctcctttgctgaaaaaacagtttgcagacatttcccatgcaatggatagacagagcccagcccatgctgttaatactttagcactcatgagccccagcatatgcagctcctagagtttgccccgctccttcccaccttcctgcttgtgttcaggctgtttctcctgcccgggagccctccccgactcccctttccccctatccccttcttcctcttttatccgtagaaatcggttgacttgggtctttccggatcaccggtactgtcatttcatgcaggatctacaggataaatgagttcagtcctggcgtgcatcaggaggctacgccccaatagaggggacaccccctaacccgctgtgccccatttgctagccccttactcctcccctcttctccagcctcaagccttttcgtctgctcaggggtcttggggtggttggattctattgaacccggaatattgtacgttctattgtacaatagtgtatattctattgtacattctattgtacaatagtgtatattctattgtacattctattgtacaatagtgtatattctattgtacattctattgtacaatagtgtatattctattgtacattctattgtacaatagtgtatattctattgtacattctattgtacaagtgtatattctattgtacattctattgtacaatagtgtatattctattgtacattctattgtacaatagtgtatattctattgtacattctattgtacaatagtgtatattctattgtacaatttatctcagacagttctctgttttaagaaccgggatcagagttcatagtgaaaagaggggccgaaggggcttcttcctgtccggtaacttcctccaagtgttcgagcctcgaccttccctttccgttgtcaagcttgggccactccgcacctcttcccttaatcttcacctagagacctaagctgggggttgggaagggtaggggcggcgggacttggaagagccagtttgcagccagccggtcgcctctcgggtccaaacccgaggctggcccacggcgagtacccgggtggggccctaaaccacaggaggggccacctccaaaagaaaagagaaaacactcttgtttgggaacaaaagtgtgtgtgtggggtgtgtgtgtgtgtgtgtgtgtgtgtgtgtctgtttatttaaaaacaaaaccacgttaaaagagctgcccctcccccacaggcccgaccacccgccgggagtttgccaggaagaggggcaattctgaatgggagtcgccaacgccccactgagtgaagcctgtctcggaaccgctcgcccagaccctggaggctccagacagccagctcccggaccccgcgcgcaaacgctgcggcgaaggaggggacccgggtaccgccagagccccgcagcggcagcagcagcgcggactccccggtcgctgcctctcccagcccggcggcctgggccgtcaatcaagctggccctgccccgccctcgggctgcagggggcggccaatcagagctaagctccgcagcgatgagctcagccggctggtttcccattggacggctatattaagaaagtggccggactctttaaatagcgggcgctagggccgcagccctcatctgccaccgcagtctggttggagctgttgtcttgtatgctcagcgaggcccggagagacccgggagagagctaggccgagtccaccgcccgagtctgctgcccgagcccgcgttacgcacaaagccgccgatccccggcctggggtgagcagagcgaccaccgcccgggagcagcgcggcgagacgcacggtgcgccctatgcccccgcgcccccaccgcccccgccgcggcagccgaagcgcagcgagagaacgcgccaccgcggggcccgggtgcagctagcgaccctctcgccacctgcgcgcagcccgaggtgagcagtgagcggcgagcgggagggcagcgaggcgttcgcgggccccctcctgctgcccgggcccggcccgctcatggcggccatccgcaagaagctggtggtggtgggcgacggcgcgtgtggcaagacgtgcctgctgatcgtgttcagtaaggacgagttccccgaggtgtacgtgcccaccgtcttcgagaactatgtggccgacattgaggtggacggcaagcaggtggagctggcgctgtgggacacggcgggccaggaggactacgaccgcctgcggccgctctcctacccggacaccgacgtcattctcatgtgcttctcggtggacagcccggactcgctggagaacatccccgagaagtgggtccccgaggtgaagcacttctgtcccaatgtgcccatcatcctggtggccaacaaaaaagacctgcgcagcgacgagcatgtccgcacagagctggcccgcatgaagcaggaacccgtgcgcacggatgacggccgcgccatggccgtgcgcatccaagcctacgactacctcgagtgctctgccaagaccaaggaaggcgtgcgcgaggtcttcgagacggccacgcgcgccgcgctgcagaagcgctacggctcccagaacggctgcatcaactgctgcaaggtgctatgagggccgcgcccgtcgcgcctgcccctgccggcacggctccccctcctggaccagtcccccgcgagcccggagaaggggagacccgtgtcccacaaggaccccaccggcctgcctggcatctgtctgctgacgcctctggcttgcgccaggacttggcgtgggcaccgggcgcccccatcccagtgtctgtgtgcgtccagctgtgttgcacaggcctgggctccccactgagtgccaagggtcccctgagcatgcttttctgaagagccgggcctcagagtgtgtggctgtgtgtctgttcgactcccctcgccccattttcaccccacccccgcctctgatccccgggggcgagattggcgcgggagtgtggccgcgccccatcagatgttcgcccttcaccagcgggagcttgatatcccttgtctgtaacatagaccccgggtactgcgggaggggagggctgctggggaggatggggggatgttatataaatatagatataattttattttcggagctaagatggtgttatttaagggtggtgatgggtgagcgctctggcccaggctgggccagactcccgcccaagcatgaacaggacttgaccatctttccaacccctggggaagacatttgcaactgacttggggaggacacagcttcagcacagcctctcctgcgggccagcccgctgcgaaccctccac

SEQ ID NO: 2066 - DNA, 6000 bp, Homo sapiens
aactataaaagttggagtaggggatagggtacaaaaggagtagaaggtgaaggggaaatggttggtaggggccagattgtagtagagcttgtccaccatgtgaagatgtctgaagttttatatcctttaagccaatgtttctcaaacttttccacttaaagtaccccaaggcagtggataacacaggcatgggaatagagggcagcccatgttgagctcaaactctctttaaaggtcttgtctttgaaatcatgtgattcttatattctactccatcttatgtctgtttgttttaatataaaaatgtttaccttaataaataaataaaaatacatttaaaattaaaataagataaatattttctgaatctctaaataaaatttaaagattacgtttaaagatgtatttattataaataaaattcaagaggtcaggcctggtggctgacacctgttatccagtgtttttcgagacccagacaggagggtcgcttgagcccaggagttcaagggtgcagtgagccatgatcacaccactgcactccagcctgggcaacagagcaagaccctacttcaaaaaaacaaatgagggccaggcacagtggctcgtgcctgtaatcccagcactttgggaggccaaggtgggaggataacttgaggtcaggaattcgagaccagcctggccaacatggtgaaaccccatctctaccaaaaaatacaaaaattagctgggcgtggtggctcacacatgtagtcacagttacttgggaggctgaggtgggaaaattgcttgaactcgggaggcagaggctgcagtgagccaagatcgcaccactgcatgacagcctgggtcaaaaaaaaaaaaaaaatgaggaagataatctattctatatttcttccgccctgtttccttacatgaatcccccatcccggaagttgcttcagcaggtctgaggacagccatagggatttaagcaggatagttatgtgataagatttatttctagaaagagccttctgacaatggtgtaaagaatggattggagatgagagaggctgaaggcagagagagcaggcgggaagctctgcagtaacccaggcaagagatggtaaaggtgaagcagataaagaagggaagagttttgagaggcatttaagaagtggaggccaggcacggtggctcacgcctgtaatcctagcactttgggaggccaaggtgggtggatcacttgagcttgggagttctagaccagctgggaaacatggtgaaaccctgtctctactaaaaacacaaaaattagctggcatgtgccacatgcctatggtctcagctatgtaggaggctgaggtgggaggatcactggagctcaggaagtctaggctacagtgagctatgatcacaccactgcactccagcctgggtgacagagcaagaccctgtctcaaagacaacaacaacaagtggaattagggtcaggccctgggcttacatctgtaatcccaacactttgggaggccaaggctggaggattgcttgagcccaggagtttgagaccaggctgggcagcatagcgagacctcatctctacaaaaaaaaagaatctaaaagaaaattagccaggtgtggtggcacacccctgtggtcccagctacttgggaagctgaggtgggaggattgtttgagcccagcatgtcaaggctgtaggtgagccgtgatcacgccactgtactccagcttgggcaacagagcaagaccctgtcttaaacaaacaaacaagctaaagaagtggaattaacagtattagaaaactgtcctggggctgggtgtggtgggtggctcaagccattaatcccagcactttgggaggccgaggcaggtggatcacatgaagtcaggagtttgagaccagcctggccaacatggcgaaatcctgtctctactaaaaatacaaaaattagccaggtgtggtggtgcatgcctgtagttccagctactcgggaggctgaggcgtgagaatcgtttgaacttgggaggtggaagttgcagtgagctgagatcgtgccactgcactccagcctgggtgacagagcaagactctggcccaaaataataataacaataacaataataataatttgcaaatcatatattatctgataagggatttatatccagaatatatagagaaatcctaaaactcaacaacaataaacaaacggtccgattcaaaaatggacaaaggacttgactagacattcgtgcaaagaaattacacaaatgatctataagcactaagacaacataaaaagtcgtccagcaagcaccctgctgtttaagtttcagccaccttctgactcacaccttgagctagaaccatccaactgcgggctttctgaattcccatcccacagaaatagagataacgaaatggttgttgctttaaaccactgaattggagtgattcattttgtagcaatagttaatggcacatagtaaaatgttaatatgtagagaatctgggtgaagggtatataggaactctttgtagaatggtcctctaccttgtgtatgacaaaggggtggggttacaaggatcatagcttcttctcaggattactcaggacagtctacaccacccaagtctatacctgtaacaatgaagctgagctggaacttcagaatgggaaagcaagataaactgagcgtgcgacttccctattgccttggtgacacccagataccctgcagatgcagttagaaacagctccagttgtccaactctgtggctagaaaaaagtgtagcctgggtttttactctcctaaccccttgatttgttttgggaattattgtctacaaagagctctctcctttctgataattgctttaggtggaagaagagaggatatgctgtgtcccctctcttttcttacttactctatttgtaactttcttcttttttccccaagaaaatgggcttagttggggtgctttggcaccaatagtcctgcggcggaatctgtgggagctagacagggagatttggaagagaatgctaggttgtgagctcttgcttttgagttgtttgaagagaatgctgcatctctggcatgtcaacaagcccagcagaatccagtaacgttcaccaagaaggcttgattagagctggttaggggatgatcaggatggttaggtgtgaagagcttacgctgattatggagggtatgggagtcacggggttggtacccagtgaggaaatttaccttagtagaaacatttgggatagtgtagaagagagaagagctagaggcgaggattcaggaaatagagaatgccagagtctcaattaacaggatggaaagctaaggagatgaaagacttataatagtagcatagtactaaaagacaaactatgtgtaaaggtattagaaatggggactgggactctgaggcagttaggccagagaaaagaagaaggaaaagatttgtcttcatttgattcaattacataagcatttctcagaatctgctatgtgtcacatgctgtggtggatgctgagggagctgatgaaaaagacagaattcctgcccaccagggtcacatagtctggagacacagacacgtaaacaaatgacgatagtgtaaggtgtgtgtaagaaaggaggaatgtacagggttggtacaaaggtgacctcaaggcatccatgggaatcagggctgagggaggaagagccagaagacatcagcacaaagagaaccaagatgctgaagtcacagggggaaagaacatactggagccccgggcagagcagtgctggacaaggacagcaagtgtggagaggaaagggagatccagaagaaccgaggagatccataacagcatgcttggaggaggaaattcgggaaaacgaatggacatgtcagagggagctagttatgaggaagtggactgcaaaccagatagtgagcaagatgaagaaatgaggtgtttatccttgcaatgggagagagacaataaggctgacaaaaactcaagtggtctgtggatagacgatttcgttagctcgatttaagggtaaagggcacactctctggtaggagatgaaaggggatgtttaaaacaggtagaaaaaaattgggccgggcgcggtgtctcacgcctgtaatcccaccactttgggaagccgaggcaggtggatcacctgaggttaggagttcgagaccagcctggccgacatgatgaaacccctgtctctactaataatacaaaaactttgccaggcattgtggcgcacgcctgtaatcccagctactcgggaggctgaggcaggagaattgcttgaacccaggaggcagaggttgcagtgagccaagatcgcgccagtgcactctagcctgggcgacaagagtgaaactccgtcccaaaaaaaaagaaaaaaaaatgaatttgggaattagagaaaaagactgtgattggaacccacacaccaagagaggagataaaacccagccttagctcttccatgtcgctgaaagagaagaaaacgtctctttttccttttccgtagccataaaagatgaaaatccgtcatccagctactgaaatcaggtgcacacggttgttcctcctgtgatgagacagggcggagggattgttaccctgttgccagggaaaaaggaaggggctgttcccagttgctatggtgacgaggtaggcgcgttccctcggtaccgccgcacacgtctgaagcggtctcttctcctcgttgctacggcaacgcagtgggcctgttcctgtcgccccccgcctcccgccgcaatcgctaaggcaaggtggaggtaggggctgtcctcccgcggctcagttgccttggagacggcgggtgccctggccccgccccgctcggactgacagcggcggccgcatcgcgcctgcgcagtgccctcgtcccccgcagtctctgtgcgttgaagccggagaccgcggcggcctcagcgaggaccctccgccccggagccgccggccggagccgcagcctctgccgcagcgcccccgccacctgtcccctccccctccgcctccgccggagccgcctcgtgcactgtgagtccgggccgaggcgacggacgccgtggggctgagtcagcgggaggccagggcccgggctgggggaggggaaccgggctccccccgcccctgcctccccacccgcactcccgcatcccgaccgcgccttccccgcgccggtcaaccccctccatccctgtcgccgggttccctccggccttggcggcccggcctccccagccactccccctccccttccctcccctccccttccctccgtctctccgggtccaccttgaggctccttccccactagacgtggccaccgcacctctgccctgggctgatattttctccaaactacctcccgtccgcccttatcccttctccctcctcctcactcctcctaggcctgacatctcccggcctctctggatctccccagtgatgtgccagaaaaagagtgacaggagagcgaggggagacttgggggagggggaacatcgggccaggcccagcctgggggcctcgggtttcttccccacacgctcctgcctggctggtttggggaagcaggtctggacagttctcactggctgctcagagcttgcagggctttccgaatagatttggctgggaagggttcagccccatcgtgatcatctagcgtttaatgaacgcggctagtgcctggtggccttctagtgggctgagctactgcccggccggtgttgcggagcggggagtagaagtagtggagggaagggagaagaggttgcgtttgggagctccaagttcctgcgcttccggtgtggtgttgtgaataagcatcttgcggaactctttaaaatgcttttttttttttttaaatcgcactacaaccctggtataatgtgaggtttggaaaaaggcctgataccatccataggaagt

SEQ ID NO: 2067 - DNA, 6000 bp, Homo sapiens
catcttgtgttgggggcttccgaccctcaggctcctggctggccccagttggccggctgtaactcgcggtcccacccgccgcccgccataggcggcctgtgcaggtccggtccccgctgcaggcagtttgcgctgctggccccgcccaccgccggtgccccgggatgggcggcgagaggcggcgctagttggtcgcggggctgggtggctggtcgcctagtgcctcgcgcggatctaacccgagtgacctgcgaatggcctcccgccctcccctgccttcttcccctccgcggttcttggctgtgcagcccgagacaagcggcctcccccagctgccatcttggtgcggggcatctccagctcccttaaactcttccccggcgacgccccgagtccagcagcctggccagagtcccttaggcgctcgcagtcagtcacgcacaggacacagctactcctgcagtgacattctgctctgtcacacactacagccattcacagtgaccctcaccagtcactgtccgactgtgacaccccacactgtcacaaagctttcagctgctcagtggtggcattgcaacacatgcaccttcctgcagtgtcactctgcattgtctcatacagtccctgccacacagtcctcgtacagtagataatttgctcaccacccgccctgtaccaggcacttgatacagaccccccatgttactgtccgtgtcttcattgaaatataggaggtcgtctactaagagtagtggctttcaaccttgactgcagatcggaatcatctaggatttttaaaactaccagtgcccaggccctacccccgatacagttagtctggagaggagcctaggtatcaatacaccgtaaagcttctaggaggtccacaagtcatcagggcttaacatggtccacacaagagaagtaccagctgccatgggagcactgcggaggtgcccggacttcacgcgagggtgttctagcagagggggcagcaaaggcaaaagcctggaggtgaaggatgtcttaagggaacaaagaaagttggtgtggctggagcatgtgggtggtcaaggaccacataattgctgcagtttatcctagggtcagaggaaagccatccaggggttttaagaagggaagggtgacatgagttatgttttaggagaatcattcagttgcttggagaatagattggaggaggaggaaagtagaagcagagaggccactgggaggctgctaacagaacgccaggctcaaaagatgcccggactggaggatacccaggagaggagtgaagatcttcaagatcagtggcagaattgataggacctggtagtagattggaggcaggggaagaaggaggaacatggatgacctccaggtttctgactgcacagatataaagtgtccatccctgggacagggaaacagaggagaggaaggtttgaagaggaagatgatgcatttagacacagacatgtagaagttggggtgctggtaggtgttttaactgtgtttccttaggttctgtatttgtctatttggcatccataaatcacagggccaacctaatggccaaggttgtttacatctcccctacaatccagagctcacactctgagcacttcctttctctaactttcacattccaagccagtatctcccctgccctaaatcaacccaggaccaggtaaccaggacctgtccctgtgccccagagcactctggaattattcaaactagccagtcccaaactgcttctcctgccttactgggagaagtaaaccccaataaaggcctgtaccttcccttcgcttctttctgcctcctgagtgacactggcacttccccctgtgaccgtgccttttgtttctaggggaactgcaaataacattaagcttttctttcaatagcagtgacctcttcatgtcctcactcagccacctttataaattaaaactcaggcacaaattagtaggatattcaatgcctgaagtggcctggggcttagagattggaggtggagaattggcaatcatcagcatttaggtggtgtattagttggcagtttgctgtaagaaagcactacaaactgggtgtcttaaaccaggggtccccaaccccctgggctgcaaattggtactggtccatgacctggtaggaaccaggtggcatagcagaaggtgagcaggatgagcaagcattactgcctgagatcagcagtggaattagattctcataggagcgcaaaccctatgtgaactgcacacaagaaggatctaggttgcgtgctccttattagaatctaatgcctgttgatctgaggtggaagtttcatcccaaaaccatcaccctcacccccaacccttctgatctgtggaaagattgtcttctctgaggctgggcacgtggctcacgcctgtaacgcccaatgctttgagagttcaaggcaggcggatcacctgaggtcaggagttcgagaccaggctggccaacatggtgaaacctcgtccctactaaaaaaatacaaaaaaagaaaaaaaaaagaaaaaaaaaaaaagattgtcttctctgaaactggtccctggtgccaaaaaggttggggactgtcttaaacaacagagatttattgtctcacacttctggagactagaagtcaagactgaaatatcagtagggtgggttcattctgggaaccgtgaggaataatctattccatgcctctcccctggcttctggcattttgctggaaatctttggcactccctgactggtagaagcatcaccctgatctctgtcttcatcttcacaaacatcttagtgagtttgtgctgctataacaaaatcccacagactgagtaatttacaaacaacagaaatttattcctcacagttctggagactgggaagtccaagatccaggcactggcaggttcggtgtctgtgaaggtccattcctcagagatggtgcgtctgggtttcctcatgtgatggaagggacagaaaggcaagagagcaagaggggtgaactctctcagaaacctctttcataaggtcattaatcccttcatgaggggagagccctcatggtttcatcatgtcccaaaaggccctactcctttttggtttttttcagaggcaggatgtcgctctgtcaccaaggttggagtgcagtggcaggatcacagctcactgtaacctcaaattcctggactcaagggatctgcctgcctcagcctcccaaatagctgggactacaggcgtgcaccaccatgcctaatttttatttatttatttattgtagagacacggtctcactatgttgcccagactggtcgaaaactcctggcctcaagagatcctcacacttcggcctcccaaagtgctgggattacaggtgtgagccactgtgcctggcttcctcctcttaatatcaccacaatggggactaagtttcagcacatgaatttggtgggatattcaggccatagcaatgttcttcctatgtgtgtgtctgtgtccacatttcctcttttgatatgaacaccagtcatattgattaggggcccaccctactccagtatgacctcatcttaatggattacatctgcaatgaccctatttccaaataaggtcacagtctgaggtattggaggttaagacttcaacatataactttgtgaaggacacgagtcaatgcataacagtgatgggagctaggtgagcagatgagcacatgagcagatggaaagtgaggagagggccctgaggaactctgacggtgaagaaaatggagacctttttgaaatgaccagaggtaggagaggtattgccgaaaccagcagaatccgtgatctaaaaaggcagtgacaagcagtgttcatcactgggaggaggacaggatgagagtgggcttgtcgctgtgatgacagtgtcgctgtgatggagtgtcacaaacaactcaggaagagttcaccctgacaccccaatacatatgcctctaacactctgcaccgccacacccctgggcagtcagtcacacattggccataccctgaagcccacactatcatttattttttatttatttatttatttattgagacggagtctcagtcttgctttgtcacccaggctggagtgcagtggcgtgatctcggctcactgcaagctccaccacccaggttcatgccatcctcctgcctcagcctcccgagtagctgacactacaggcgcccgtcaccatgcccggctaatgtttttgtattttcagtagagacggggtttcactgtgttaaccaggatggtctccatctcctgacctcgtgatccacccgccttggcctcccaaagtggtgggattacaggtgtgagccaccacgcccggcccctgaagcccacactatcacacggatgcacagtcacacaaaataccccctaccgtgtcacaaattcctcatacacagagccacacatgccagtcacaaccgcacatgctaacagtaagttaggttccattttgtcacatacatctgggtccctcaggcagagaaagtggcaaccaaagcatgagcacagttaaacatacttctgatgcacactggcctcactgtctcttggtctctctgtactcacatgtgtgcatacaggcacacgcacacatccgcgcacacatgcacgctcacacacgtgcatccttacacatgctcacactcacgctcacaatgtcacacgcatgtgcacacccgcacaagcacacgagcgcactcacgagcacacgcggactcgcacacgcgcacatgcgcactcacgcacgcacacacgcgcacactcacacgggcgcgcgcagcccctccggccgcgggcgcagcgggggcgctggtggagctgcgaagggccaggtccggcgggcggggcggcggctggcactggctccggactctgcccggccagggcggcggctccagccgggagggcgacgtggagcggccacgtggagcggcccgggggaggctggcggcgggaggcgaggcgcgggcggcgcagcagccaggagcgcccacggagctggacccccagagccgcgcggcgccgcagcaggtgggtgacaccccgccccggccggccggagacccgagcccatcgccgtcagccagccagggccgcgcggggtaggtggcctccagcctctggtccagatcccgagagcgcagtccctctgcatcccctgcggctcagacgcggcgggagcagtggcccttgcccctgtgtaccctgagggcaggtggaggaagggactggagagcgagcctgaggctccttggtgtgaatttggggcttcgcagttccccaggcgcttcccccagccccgcattccgtgttccagcagtcctgggggaggggcagctggcgggagctttccccctcatccgacggggaagaaatggagcgctggggagggcccgaggctgtcgtccgcttgcaggtggccgagggaccagctcccgggtgtgggctcctctagccctgtagccgctgtctcctttcttgggggatgggtgctgggaggcacaagggcaccagagggataaattaagaattaagggagaggattctactcaaaattttagcttcccaacagttcgactctacaggagatggaactgccggcctgtgaggtgctaggttcctgtcctggaatgattcaagcagaggccatttgacagggttgctgaggaagaaatttttgctttggatgggaagttacccaggataaccctgcaaggcccctgccacagcccagaggctctgaaatacccaagcagcacctgcttggtgccaggcacctaccctaagttttctcattgcagcctccccaaacctttaggagacagataccgttatcctcatttttaaaatgcagatcccgaccaggagcagtggctcacgcctgtaatcccagcactttgggaggccgagacgggcggaacacga

SEQ ID NO: 2068 - DNA, 6000 bp, Homo sapiens
gtagttaggactgactgcaggtgcatgctgctatgcctggctaactttaaaatttttttgtagaggcggggtcttgctatgttgcctaggctggtctccaactcctgatctcaatcagtcctcctgcctaccttcccagagcgctgggattacaggtgtgagccatcgcacctagccaatctcataacattttatgactagcaaacttagtagttctgattcaggcataaatcagttggtggggttatacaaggttgggtgagtttttctagatttctaagagaccatgttgaaatacttggctctgtctcagtaagggatagagagaagcaaaggtgtgggtaaaggttatgagcagacatgtaaagggggcaaattaaagtgtttagggaaggtgaaacagttccaaatcataatatagatcccaagcctcaccaagaagtgaaggagagggtaattgtgcgatagttctcaggactgagacctcaaggtgtaagacgaatctttattgtgggtggtcctctttgagaaaaagaacaaaaaagaaaaatgtgaaatgggtgctaaatttcagagcagaatatacatatatgtgtatgtgtgtgtgtatatatatatatatttttatgtagcaaattccagtttacaaagggcttttatgtgttttgcatcattacaacagttctgtgatgatgtggatgtggtggatattgtaattccacatcacagaggataaaattgaggcacaccataaggtagctgaccagagatcatgcagtatatggtagaatggcaacttgaggccagttcttaggtgtgtttgttgtccttattcagaatggaacaatgtggtttattgtacaaaaatttaaaaatgaatgtcgaaaagtagaaattattacccaaatctcaccctctgtggttgtttgctatgtgatcttccagactcacatatacatgtagataattttttttttttttttttgagacggagtcttgctctgtcgccctggctggagtgcagtggcgcaatctcggctcactgcaggctctgcctcctgggttcacgccattctcctgcctcagcctcccaagtagctgggactacaggcgcccaccatcacctccagctaattttttgtatttttagtagagacggggtttcaccatgttagccaggatggtctcgatctcctgacctcatgatccgcctgcctgggcctcccaaagtgctgggattacaggagtgagccactgtggccgtcctcacatgtagatacttttttaactttttgcttttaaccacttaagatattgtgaactcatttccaaattaacatatatttgcttttaacagctacatttccactggagttacgtaccatttgtaatctattcctggaaatttagatggttacaactgttttttattttatttatttatttatttagagacggagtctgactctgtcacccaggctggagcgcagtggtgtgatcttggctcactgcaacttccacctccggggttcaagtgattctcctgcctcacccttccgagtagctgggactacgggcgcacaccaccacgcctggctaatttttgtatttttagtagagacggggtttcaccatgttggccaggatggtattgatctcttgacttcatgatctgccggccttagcctcccaaagtgctgggattacaggtgtgagccaccacgcctggcctcaactgttttttattataaataatgctgtaggccgggcgcggtggctcacttatgtaatcccagcactttgggagactgaggcgggtggatcccgagatcaggagatcgagaccattctggctaacaaggtgaaaccccgtctctactaaaaatacaaaaaattagccgggtgtggtggtgggtgcctgtagtcccagctacttgggaggctgaggcaggagaatggcgtgaacctgggaggcgaagcttgcagtgagcagagatcgcaccactgccctccaggctgggcgacagagcgagactccgtctcaaaaaataataataaataaataaataaataaagctgtgtacagcctggccaacactttgggaggccgaggcaggcagatcacaaggtcaggagttcgagaccagcctgaccaacatggtgaaaccccatctctactaaaaatacaaaagttagccgggcatggtggcacatgcctgtaatctcagctattcagcaggcggaggcaggagaatcgcttgaacccacgaggcggaggttgcagtgagccaagatcgcgccactgcactccagcttgggtgacagggcgagactctgtctcaaaaaaaaaaagaagaaaaaatcctttattctggttttcccgtagcttccacagatccaaaagggtcaggtttatttccagtagccaaatattctgccatctggactgagatatctcctaggttgaggttattatagaggtagtaacctgattctttcttccttttctccttcccctttcctcctttgcctccctcctcttttcttcctctgtatttattttatcattccttcttcctttcttatttctaggccatataggccagccagggaaaggttagtaaggggtgacattgatccctatgacctgaggaatattcttcgaccttgagacatgccgattatgctcttcttttcctaggatgctcacaactgtattcctgagctggacagtgagacagccatgttttctgtctacgatggacatggaggtaactttaacagatcatattggtaacattctaggaccccaattccagacgttccagggcaagaacaggtccctttgttcatttactttccagggtctggccctcattatcatttcctgcgtggtgctgtttttctgtattctgtcattcttttttcccagtaggtactgtattggtttataatctcaccaggacttgttttaatccaaagagcctctatctttttttatttttattttttaaaatttttaggctgggcacgcggtaggtcacacctgtaatcccggcacagtggatcacgaggtcaggagttcgagaccagcctgaccaatatggtgaaaccccatctctactaaaaatacaaaaattagctgggcgtagtggtgggcgcctgtggtcccagctgctcggaaggctgaggcaggagaatcgcttgaacctgggaggtggaggttgcagtgagccaagaccatgccactgcactccagcctgggcaacagagcaagactcttgtcttaaaaaacaaaaaagtgtacccagttgagctgattctttatctttttttcactggagaactaagtatacaggtgagaaaagacgagatatttatacccgagagaattgatggtgaaatccatttttttggatcagaacttccccaaacagtgtccttcaaatagggttcaggggtgctaagatatttatcccctcaacccttggggttcactccagtatggcatataaatattgtatcactttctatgtgtggggagcagtgctccaggtgaccttccttcctttccttctaggggaggaagttgccttgtactgtgccaaatatcttcctgatatcatcaaagatcagaaggcctacaaggaaggcaagctacagaaggtctgtctgcttacaccgcccattcctcacttgtgtaggcttttcccttgttctctagcccttgggcttttcctttctttttgtcctctagctgctgctgcttatttactcttgaagaattctgttcctaaaacgagcttattggccgccttttagacttgccttattattcctaggcctctgagctgtttttatctgtgagtgtctcttagtgtggtggctcacactcttaatttgtattccatccttgtgctcaggattgtatatagggagttcattttgtactagtcttagactattttgcttatattcaggctttagaagatgccttcttggctattgacgccaaattgaccactgaagaagtcattaaagagctggcacagattgcagggcgacccactgaggatgaagatgaaaaagaaaaagtagctgatgaagatgatggtgagtgtggcatcccttgtttgaggggaaatcagcattttaagaaatattctttaatattacttatcaattctaagataggatggctttctagggacctggggagtccttatgttaaagaaacctatgatgttctcctgcattgtatgtggttatgaaaaggagggagagaattatcttcgttgagtggcatctgagctgtaagcattgtatatacattatcttttgtcattgtgatggggtcttcctggttcctgctagtatttatgtgcttttttttcccctcaagactggagcagttattagccccaatagccaatcattaagcctaaatcctaattcacagtagcattgtgggcttcctggatcctcagccagaatagggtttttacaacttaacaataaaaaatgagacgtcagaggggaagtatagtaactagtgttgttttgattaagaaggggatgaaacacaaaaaccaaaagaagtctgtggaggaggaggagctagggcatgttcttctgagacttgagcgagaggaaccttgggagtgggaggttgtggggaagttagaggctgcaagggctgttgaggtagtgagagggacggatcccatgaggagtctggcatgggggctctgatttagcctcttccctgcagtggacaatgaggaggctgcactgctgcatgaagaggctaccatgactattgaagagctgctgacacgctacgggcagaactgtcacaagggccctccccacagcaaatctggaggtgggacaggcgaggaaccagggtcccagggcctcaatggggaggcaggacctgaggactcaactagggaaactccttcacaagaaaatggccccacagccaaggcctacacaggcttttcctccaactcggaacgtgggactgaggcaggccaagttggtgagcctggcattcccactggtgaggctgggccttcctgctcttcagcctctgacaagctgcctcgagttgctaagtccaagttctttgaggacagtgaggatgagtcagatgaggcggaggaagaagaggaagacagtgaggtaagggcctgtgagggcaggcagatgctgaagttgcagagaggtcctgtttggttgccgtctgtagttttcaactctctttccttctcctattttgacatcatcccccaagacccactgtattctaagctttagtcttgaattcattgagctccatcatcacaggtaccatttgcctttttacctcttcctttgttggtactataacaagcagatctagttctggcttttcagagtctgtctcctagagagagaacaaggagatagttgttaccttggctagttgactgttttcttctctggaaaatttattttctggccacagtgcctgaaagatatttttggctggcagcccttgccttgtcctgggctttttgctagtgactgctaagcccagttcaggatgtcagttgtactcatgctagccctttccatccccccaattttcatgaccatatacttgtatctttcagtgttttgaggacctgtgttcagtcaggacctcttgattctgagtatgagctgtggggagggaggggatcatcccagtctcagcagtctgggatcctccccctggcaggaatgcagcgaggaagaggatggctacagcagtgaggaggcagagaatgaggaagatgaggatgacaccgaggaggctgaagaggacgatgaagaagaagaagaagagatgatggtgccagggatggaaggcaaagaggaggtgtgtggggaaggggagcaatgagtcttgaaaagccacaaggcaggtgtgaatcccctaattttgattttgagacaggggatccccctgat

SEQ ID NO: 2069 - DNA, 6000 bp, Homo sapiens
atattggccaggctggtgtcgaactcctgacctcagatgatccggccgcctcagccttccaaagtgctggggttacaagtgtgagccaccacgcccatccacatttaacctttaaggcaatgtctcccaggctggcaacattcccagagatctataattacatgcctcagggttcataatttcttttttttttttttttttgagacggagttttgcactgtcacccagactggagtgcagtggcgcaatctcggctcactgcaacttctgcctcccagattcaagtgattctcctgcctcagcctcccaagtagctggaattacaggcatgttgccaccataccctgctaattttgtagttctagtagagacagggtttcttttttttttctgagacaaagtctcgctctgttgcccaggctggagtgccatggcacgatctcagctcactgcaaccactgcctcctgggttgaagcgattctcctgccccaacctcccaagtagctgggattacaggtgtgtgtcaccacgcccagctgatttttgtatttttagtagagacggggtttcaccacgttggtcaggctgatctcgaactcctgacctcgtgatctgcccgcctcagcctcccaaagtgccgggattacaggcgtgaaccaccgtgcccggccagacggggtttcaccatactggtcaagctggtcttgaactcttgacctcaggtgatccacccacctcagtctctcaaagtgctgggattacatgtgtgagccaccatgcctgccataaaaacccttttttcatgtggactaacacctcaagtacatgttcaggagctggctctattaccatgtctgattagccagatttttgcagctcatactttaaagacagactcagcattatcaatcgatctatgaatatagtattgcgttttgggtgttttttttttttttttttttttttttagacagagtcttgctctgtcacccaggctggagtacagtggcgcgatctcggctcactgcaagctccgcctcctgggttcatgccattctcctgcctcagcctcccgaatagctgggactacaggcgcccaccatcacgcccggctaattttttgtattttttagtagagacagggcttcaccatgttagccaggatggtctcgatctcctgacctcgtgatccacccgcctcggcctcccaaagtgctgggattacaggcgtgagccactgcgcccggcctttttttaaaattttttttctttctcccttctagtcaaagcatgaaacctttacgtcactggaaatatactgtagtgactttgaggggaataggatggtgaggggataatcttcatactctttctcctttttcacctctttccatgatcccccttagtatctatctcccctctctgtaacattattgctctcccagtgcgttactttttccttgagtcatattgtgtgtgtgcgtgtgtgtgtttatatagtatttttagtagagagagggtttcaccatgttggccaggctggtctcggactattgaccttaagtgatccgcctgcctcagcctcccaaagtgctgggattacgggcgtgagccactgtgcccagcctcgagttatattttcttttccactttttttcttgtctgtttttttcccatttattttcaggccacctcctattttttgtgaacacaattaaatgtggcttccattccatatttagcgtgtatgtatggacacttaaacagcagtcttttgttgaataatatacaacatttatggataactcagcactttacattcaattcctcttatccttaaagcagtcttgaagagtagatgctgtatgtctgtcttgcagatgaacttagcctaagagggaataagtaacttgtgaaagatctcataggtaatatgtggcaaaattcatgctctttaaacaatgtcacattccattcttaggaaaaaacaaagtccaaaaagaaaaaaaaaaagaaagaaaaaaaagaaggcgggcatagtggcacatgtctgtggtcctggctatttgggaggctaaagtggaaggattgcttgagcccagaagttcaagaccagcctcagcaacatagcaagacctcatttcttagaagaaggaggaagaggaggagcagaaggagaagaaagaagaggctgagtaatttttgttgttgctgttttgttcatttgtttgttttttgagacagggtctcactctgtcgcccaggctggagtgcagtgacaccatctcagctcactgcaaccaaggctgagtaattttatatgctccctctacactgctttggtcagagatctcatctaggttcctggcaacctgcaagcctaattaacatcttttccactttcatggcttaactccaatctaatattttcaatgtttttatattagttgtcaccctaaactgaaccactgttttccccccaaaactagcatcccctcaaactgcacctttttctgttaatggctccaccacattttgttatgcagagtcaaaatcttggtgttattcattcattcaacaaatatttaaatattattcagcacatacaactttgcaagggatgctggaaaacacaatggtaagtttaatggaacttctgccttcataaaggcttatattctatcaggaaagacaaacaagtgtggacccaaactagtatagtgatagtagagatttcctggagaaagtgatggtcaagaggggtgtggagaggtgtgctccatgggtaaaagtgtaagagaaagcatggctttagatgcacccaaagacattgctgaagcagagttgtaggagaaatggagagttaaagagaggcatacgtgaatctggatgattagcatgaagggtcttgtaaactataaggaatttggactatcggaagagcatgaagaagccatgattagttttatctttttaaagaatcttttttttttttttgagacggagttgctctgtcacccagggtggagtgcagtggcgccatcttggttcactgcaacctccgcctctggggttcaagctattcgcctgccttagcctcccaagtagctgggattacaggagcgcaccactacgcctggctaatttttgtatttttagtagagacgggtttcacatgttggccaggctggtctcgaacttctggcctcaagtgatccaccacccccccttggcctcccaaagtgctgggattacaagtgtgagccactgtgcccggctgaaaagaatcaattttgtcatagtttggagaatttctccttttctctccatcccttgaatgcaatttattaccaaatctgtcttatttgttattgtctaatttgtcctttcatctggattcccattgccaccctgcgtggtaccaccttactcccagctcttctcatctcctgcttagagtaagagctctctaactagtagcagtgccccaggccaggcgcggtggctcacgcctgtaatcccagcactttgggaggctgaggcgggtagatcacgaggtcaggagttcgagaccagcctggccaacatggtgaaaccccgtctctactaaaaatacaaaaattagccaggcgtggaatcctagctactcgggaggctgaggcaggagaatcgcttgaacctgggaggcggaggttgcagtgagccaagatagcgccactgcactgcagcctgggcaacaagagcgaaactctgtcttaaaaaaaaaacaatagtaggcggggtgcggtggctcacgcctgtaatcccaacactttgggaggccgaggcgggcggatcacgaggtcaggagatggagaccatcctggctaacacggtgaaacctcgtctctactaaaaatacaaaaaattagccaggcgtggtggcgggcgcctgtagtcccagctactcgggaggctgaggcaggagaatggcgtgaacccgggaggcggagcttgtagcctgggcgacagagcgagactctgtctcaaaaacaaacaaaaaacaacaacacaacagtgccccagactctctccctccaatgtacactgcatacaaagactagacaaacgatgccaaaggttacaccaggacgacaatgaagtccaagtcactcatcttggcgcttctttttatcaagctagctagttaatattaccacttacaatcattctccgagtccagccagcttcctcagaaatcctccccaaatgcagttcacattcttccctcactcctccaaaccttataacattattcccttttcctgtggcataatgcaatccagaggcatcctctctgagagcctacatcctttcaatcctccaagaaacagctcctcctcccatccttgagcttttcccacccagaataggctgtaccaaacatttctacattgtattaactcgaattatatcacagatcgaggtcttcgctttcagaaaagactcacattcttctcatataggcctcgcatggcctggccaagtacttcctaagctcggaacaaatactggtcaactttaattgaaccaaatcgggcggggtttgcggagtctgagagtgcaacgttggggagagggggatgaaaacactggaggacgggctgaaagcgtcgagtccgacacaaaagaggcgtcagacaaaacgccaagaggctggggactgggaacgaaggaagaggttctgccagaggcgacctgccacctgcgcgaggaagcggagtaggacggcggccgttggtgggcgtggtcgcgctagtctcgcgggagcggccgttgggcgggccgttgtccctgcgggcggggcgagttgctaaggaaatgactgcccgcagcgcctggccccgccgcgcaggccgggcggggtctggagcggcgccgtttccgcttccgctccctcacagctcccgtcccgttaccgcctcctggccggcctcgcgcctttcaccggcaccttgcgtcggtcgcgccgcggggcctgctcctgccgcgcgcacccccggggcttcggctccggcacgggtcgcgcccagctttcctgcacctgaggccgccggccagccgccgccatgggtgcctacctctcccagcccaacacggtgaagtgctccggggacggggtcggcgccccgcgcctgccgctgccctacggcttctccgccatgcaaggctggcgcgtctccatggaggtgaggaggcaggggcccataggctggccgctgcggggcgggaatctgacggagaaagagagcgggggatggggtcctcccctgggaagggtcccaattgggagcctgcggccgcagcggccgtttgcggggcgacagagaccgcggggtcagggccgagagggagctcccgatgcttggggaccgtgtgccggtggccagtggcggcgagggctcggccatgtgggaagaggcaccttccgcccactgaccgccctctccccgagctttggcgccatcctctcgtgccaacctagccctccaggctcatcaacggtgtgaggtttagtgtgggagtaaagacgcaaataggggctatttattcatttgtttttcaagggagaggtgaatagatgtgaataactttttaaattttaatatttaaaatatctgatgtgggaagcctcttttggctaggagtttgacagtgaaaggaaccccgggcagagtctgtttcacattttggttgcctggccttgggctcttgcatgttaatttcagaggctggacccgacctccaggagttgtcactcatttgcactcttttcagggccttttactaacttcggaaaacttgaattatgtcagtccctaggttttcctttttattatgcttcgttttctttctctcttaggatttctctaaaacttaatcagtaattctcatttgcctgtaattgtagtttatagtttctttgattgtaagtcatttcatcaatttttttcatcaca

SEQ ID NO: 2070 - DNA, 6000 bp, Homo sapiens
aaaatgacaccaagaagaccccaagcagcatctggggtatattaccctaaaggaccagcttagctgtgttgggatttgggattgatgtaatcacccatctcttcagcaagatatcagtcctgtctcctgcaatcccacataacaaactgtgagggtgcaggggtggtccacagtgtcaagtaaagctgagagatcaaaggaaaggggaactaaggaaagatcatcagggttgcaaaacagcaggtcatcaacaacagtggaggcgaaattttcagcaggagtggggccagggttgctatatgcagtagtgtggattatgcactgcacaaagtcagcaatctacagggcacgtgatatggtttggctgcgtccccacccaaatctcaccttgaattgtaataatccccacatgtcaagggtggggccaggtggagataattgaatcatgggggcggtttcccctatactgttctcgtggcagtgaataagtctcacaagatctgatggttttataagtgggagttccccatggatgaagctggaagccatcatcctcaccaaactaacacaggaacagaaaaccaaacactccatgttcttacccgtaagtgggagctgaacaatgagaacacatggacacagggaggggaacaacacacaccagggcctgtcagtggggcgaggggagggagagcatcaggacaaatagctaatgcatgccaggcttaatacctgggtaatgggttgataggtacagcaaaccaccatagcacacgtttatctaggtaacaaacctgcacattctgcacatgtaccccagaacttaaagtaaaataaaacttaaaaaaaaaaataaatgggagttcccctgcatacgttctcttgcctgccgccatgtaagatgttcctttgctcttcctttgtcttccaccatgattgtgaggcctccccagccatgtggaactgtgagtccattaaacctctttcctttataaattacccagtctcagatatgcctttattatcagcatgagaatggactaatacagcatggcccccttcacagattggagatttatgacaatcttccagccaaagggagaaaagcatcttgaagaatgagtcccgtttcataactggcacaaagatgccttatgggctagcagcagccttgatggggagagaaggcatatgacaagaaggttataaatgagtggctagggaagaaatgaaagctgtgtatttgcagttcctatatggggatatgtattatttatcgattgctgcataacaaactacttcaaaatttagcagcttaaaacaacaacacatctcacctcacagttctgggggtcaggaatctaggagtggttaaactgagtgattctggctcagggtttctgataacatggcagtcaagctgttggctcgggcttccgtcatctcaagactcaactggggctgaaaaatccacttctgagcttactctttggtaagttggcaggtgtcagtcctcacaggctattgcactgaggatctcagtttctcaccacgctacgtgggcctctctgtaaagttgcccacaacatggcagcttgcttgccccagtgcgaatgatctgagaaagagaaagaagaggagggcaggggaggagagggaaggggaaggaaagggagggaaggggagggaagggaaaaggaaaggagtggatacctgatacagaagccacagtctttttataacctaatctcagaaattgtgtccatcccttttgctgtattctatttgttagaatacgtgtatagctcaaggggagggccttacacaaggccatgaacaccaggaggtggagggcattgggggccatcctacaggctgtgtcatcaggatatataggctcaaccactctttcaaaaggcaaaatctttctctcattctgggggtgaaatcatcaagatgcaaacaaaattcaggaaaagtgggaggttactatgaatccaaatgtcaaagtcaagggtagagactgacatgagatcaaagcaaaaacatacaaaagacttagcatctgaattagagagccatggctaatgctcactgtaaaccaggaccagggtgtgctccagttagtgacatggtggctgaattgagccagatggcaggaaaaatggccattggctgcccctcagggaaggcctcatcattggctgcacaaggctttagctttggtgccccaagtgagttgcctgcacctaccttatgtgggtatgaagaaagctcatgaaggctgagaggtttctaacccagagtgaacagcctatgcaaaaacataaagaggcattaaagggaaacaaagaacttcacagatgggcactgcttctgctttctgtgtggacagagcctatcacgcagagatatggaggtaagaacacaccagatcagccagtaacaggtaggacctgttcccagcacttccaacatccagggccatccaggcttcccaaagggctgggtttgaggctgcaaactattcctagatatgcaagtcctatatggagaactgcccccttggccctccctgactcacccaccatgagactctatgctttcttttaaatttctggagcacggagaagcacagagatgaaaagagttattttcaacttggaacatatcatgatatgacagccaactcttttgtattcttttagaggttcctggaatttctgaactgctcctgagttgactcaacttcataaatatttattgaaggcctgttatcatgatgggtcagctctaggccatggttgcttcagatgaagtgagccagaaagaaggagaactaggaggtagaccaagctggtgagcatagtggcaggaagttgccatgcccgagattgtagttgggggccagttcatcagggaggttaccatgaatccaaatgtcaaagtcaagggtagagactgacatgagatcaaagcaaaaacatgcaaaagatttagcatctgaattagagagccatggccaatgctcatcagttccaagagaaaagggaaaacactgcctagcccgggccagagggtagcagcctggagccagcatccagtcctgagagtgggggtgatgtgtcacttgttcagcatcctatccccaacacccagcacactgataaatttaggtgctcaagccaggcaaggagaacacaggggtgtggtcagcagtcatccatgtaggctcccataaatcaggatttgggatccaatttgggatgagcatcaggaaacaaacagggaatggttttcagacacagagactgggaaaggcaactcaggatccagaacagatgagtagggacacctaacagcccgagttatgaatgctgatgccagggcattcctaggattaataatagaagtatgatggctcacgcctgtaatcctcaactttggaaggctgaggtaggaggatcacttgagcccaggagtctgagaccatcctgggcaacatagcaagaccccttctctacaaaaaatttttaaaaattagctgggcatgttggcatgtacctgtagtcccaaccactcaagaggctgaggtgggaggatcacttgagcccacgagtttgaggctgcagtgagctatgattgtaccactgcactccagcataggcaacacagcaagaccctgtctctaaaaagattttaaaataggaaataaataataaattccaggatgaatcattttaagcagcctttctgcttctgctagactgaggatcaaagccatgtctgtcttgcttattgggtgtcccctggcctagcacagggcctggtatgaaatgggtgctcagtaaatgtgtgtggaaagagcaactgctcccagagaacagtgggaatctgcaggggatggagcacaggcttaggactcagaagtcttcaaggccaatgctgaggtaaagattgttttttttcttccaggttataggaaatcaaggttggggggtgccagattacagatttcaaagagtgaccaatatgatgccaatgtattccacgttcctcactctgtcaccctcctgggcctccttcagagtaaagcataggatagaaatgacaacagccattcacttttctcaggacctaatccccagatcgtgaatatacgtaggcagaaaccaagctaacaacttcaacgtgggactgtagaatattctctctacccttaactaggcaggtggccttgagcagatcatttcacctgtctctatcatagccccaaactatgtcctcgtctgtaaaatgagagaattagactagaaagaaggctctggggttctctttcttttctgacattctgtaattcaattattctggtttgttttgaagataacatggattaggattgacccaccatgaaaatatgctgtggttcatcagcttctaatgagaactggagtggccctaaaagaaatgccatatacacactctctctctccgtttccatggagcttggttctcctagaagcctgtgtctgtggaggaaggtgaagcatatttcctgtaggcagtttctcctgtttcctaagccctctggggaagaggcagcatgatatggctgaaagctcattggacttgaaaatggggagacctggatgctcgtcccaaaccaggcatgtgagcttggcagtccacctgtcctctctgggtctccatttgttcgtatgtaatggacagaatacctgccctggcaccctcctagactgctgtaagcaaaaggcttctgtagaacattaagtgctaaacctatgtgtaatactgctggggaatccatcagaatggctgattggacatgagagaatgtgtggggcaaatggcccatacttcagaggcacaaaagactttttttttttttgagttggagtttcacttttgttgcccaggctggagtgcaatggtgcatctcagctcactgcaacctccgcctcccgggttcaagtgattttcctgcctcagcctcccgagtagctgggattacaggcacacaccaccacgcctggctaattttgtagtttagtagagacagggtttcaccatgttggtcaggctggtctcaactcctgacctcaagtgatccacccacctcggcttcccaaagtgctgggattacaggccagccactgggcctggccaggacttcttaaatatttatacattctagaaaattaagcttcaagccggcattcgtgagtctgtctggtaggaggcaacatgacatggctgcctaattggcagaaccagaggagcacggttccaaccctgccgcttaccagctgagtgactgtgtgcatagcactttacctctctgagtctttgttttttcatctttaagatggttataatattcttaccctgcctacttcccaaatcagtcaccttgattgatcaaacatgatcaagtgatcaactaagtcatgtttctaaaattatggcccattttaaaggggccatagaaactggtcacataaaatgggcactgatgctccttgcagtgttaggcactttgcaggggcgctgagcaatcaatcctgctgagtcagtgaggcatagcccagcctgcaatgccagctctctgagcacacagaatagacagacacctacatgggatgatctgtgggcaactacaaggcttcatctacccctaaaactttcccttccttccccagcctagagttcttcccattagaatcactcctccaaagtatctgtgagatagctcagagcacaaaggtctccagggtagaggcaagtagggactggaatccaacccaaactctgcccaccaaggcccataactgcccagagggagggcgcttttctctcattcttatgggtggcttgccacatgggccagcatatactttgcctggaggttagaaaacacgttatcagggtttaaatgagcaaatgctacctgaaatggaaggatcactcttctcttgcctc

SEQ ID NO: 2071 - DNA, 6000 bp, Homo sapiens
tgatagactggatttggtttaaatcaagatttaaataataattaataaatattctatttaaccagtgtttcctatataaaagacctattggtgttggatgtaactctgatgaatatatttcacagctcacaaatagtttggctttagttttaacagacatatgctattaattttaatgtggtcttatatattatgagaagctactcattttataactacataaaaaaagtaatgctttccttgtcttatctaccaaaacccaattgaaacagagacataaaaaccagttagggccaggtgcggtggctcatgcctgtaatcccagcactttgggaggccgaggtgggaggattgcttgagcccaggagttcgagaccagcctgacacagcgagaccctgtctctactaaaaataaaaaaaaatagccgggcatggtggcacatgcctatggtctcagctactacggaggctgaggcagaaggattgcttgagcctgagatgtcaaagctgcagttagctgtgaatgagccactgtattccagcctgagtgaggctctgtctcaaaaaaagaaaaaaaattaagccatttagcggtaaacctccaactgaaaaggtgaattatatgtgatttggatatactacaggagaaacagagcaacaagaaacaaaacatttacagtacactgtttcatttgaaacaaatattcacatattgtatactttccctcatcaaacagttatttcctggtatccatttcagtgagcaggatggggggaggggggagcaataaaagagaaacattcttacctgtgtagatgacttgcttttattgtaacaaaggcaactggccctgtaatctaattacaagaaaaaaaggccacagataaactcttcaacaattaaatagtcattacttgtggtagctgttcacctagctttaattgccttatagttaacagttctaaatagccagttaactccttcaattactagacatttatttttcaatcactttatcttgaaagatacggatgtactatggagttagcttaagacaaactgagagagagagaagagagagttggttggggccaccggggaggttactgaccaagggcagggaaggaggcatttatttatatttgccttataattctgggggactaaactggctgaggacatgccttatggcttagctataattttggctattctcatatgtataatgaaatgaaaccaaaactaaatcttaagaacaaatcttggccctgcctggctgtaccacctaggcctggctctgtattgagagaggtggcctcctaatgatgcatatatgtccttgtctggttttccaattttcttgaattgagctgactataaaagcttaatgcatgcgatataaagaatggctgacctccagatacaactagtaaaatttcaacttaccactacttaagacttattaaacacttgattgagaagaatcatatttatggaaggacagcccaatgaatgttgattcattcatttaaaagtcatcttggattaagccagagcagcaaaaaactatatatcaccccctccacattttgctacctaaacttactcactttcacaccagattggctactggctaatactgacaggcatataagaaaaacatccctatgaaagtctttgctgcgtttactaaccggagtcaccaggctgctgtttactgtgttccgaaatgccttctctaaggactatccatagagacagctctctggtctcaattcagagatggttgggttcctctgagcactggtttgcctttatctgataggcacagacattatctattagtaaaaataaaataataattttattaagacccctaaatcatgatgcccaaaccccttgcaatcaggaagtctagataaataacaggagtttcccttcatagagatttctggaattacccaaggatattaacatgcatgacccagatgcctccctaagccttatggtgtgctggcaaatgtttaacaaccattattcagaaataagacaggaaaactgccatctatgactggtaagattataggtgatttttgtattttttttcttcattttcccaacttccttcaggaaacacattttactctgaagggggtgagggtggtggctaatacttgggattatggtgagctgccctagaaactatcgggttattaagtaacacttaatatatgtaccagtttcacttcaaaatctgaagcattctgaactcttaattattttggagggatatcccacagaaaagttggctgaggccctagtgataaagctctttcttacagtggcccattcctgcccaagactccaggcactggaaaacctggtgggggtggagaaggtaacatcagcaggcaagtactcggaaccactctcctatctcctacctcttcttctcacgacctccaaaactctgctgagaccggcctccctctgcctcacttgtggtgattttctctcggatgctcactttctctctgtgcaatctttcctttgggtgtcccttgtctttaaacatgtctgcgtatacctgaactctaattgtggacagggttcaaagttctttttcatgggattcatgggccccatgaaaattagaggctaagtaggcatctaagtaggagcatttacgtgctcccaggcattctgttacacttaaagaggctcatggaagagatttgggcaagtggtataactctacaagctgctatattcaagtcctagttccagcttagccaaaacacctactccgattgcaactgatctttttcttggttgctagaaaactgagagtcatatgtgtggcctacctccagcaaaccaataggaccttacaccatgcattttgcatacaaaactgctggcttaatcttatctttcacactcacggttttcttttgtcctatttttctctgtacttatttttaatttaccctgatgtacacatttatgtaaactacgttaaatcctttcctctggaataaagtagggtgtaaataaatttaacaaaacaacaaagagtgatgatgagccaggtcttcactcctgaaggcctcaaaacgaactggcagtgatctgtgaaaactacagagaactgcccgttcatctccacagattactgaagtctgtgaaaactactccagccaggaccaccattatagcctgctgcctgttgtgttcacaatcgatgcacaaactcaaccctgaaatggagagaaaaataggggaaaaaagacattaggaaatcctagctctatgtcatctggacattagaaagcacttggttggacaaagctttttctcccccacagcacatgcctgtttcagcatctcagcccacattcacggagagggagaatatagcaattgttaagaatgcagactctagcactgcatgctctgctgtttatttgtgttatttgggctaggttttttaaccgtctgtgcctcggtgaatcccatctacaaagtagagataataatagtacctacctcacagggcagttgtaaggattaaatgaggtaacccgggtgtaacatttaaaacagtggcagagtacatacagggatctgaacaaatgttagctactattagtgatatgtgagtgggggaagcacactgccttggacttgaggcaatatcaagtctgagtttctggaaaaacacttgtggaataagtaagggctggccacctcctaaaaccggacaaaagatctggcttgcctagatccttagcgtgactgcttctcctcctgcctttctagaggcagtattacgtgatggaaatacttggtgggtgctgtgggcacaaagataagttaatgtgtttttattccctaggagctgagtcgagagtaggagaaaaatgcataaataattaccaggtaggatgattaagcaatatactggaggcagcaacagaaacacaccgtggaaaaaaaatacccacggcgtggatgaagatatgagatgtgtgaaagcgctagacacaggcagccacctgcacccatgtaaaattggattattgctgactcctacaaggcccactttaacgcttctttcaaccagaatccctgcagaactaattttgtagaaccgccggggataaagacctttatttgcaatgtcgaactccagcagagtaaccccttttgctttccacacgcgcaaacccgggtcccaaacgctgcagttcgcgtttcccggctaacggaagaaacacgaggaactgtttgcagatctaggggatgaagccaaaaaacggaaagcgaggccgaaagggcgcaaccaccacgtctggaggaggccagtgaagtagagaaaggggaaggtcagccctgccccagcgcgctctgcgtaaccgggacttcctccgcgcggcaaagccggggaacctccctggcgcctgcgccaccgtggcgagactcggcgccgtggacgtggagagagggcgacgcacctgcgcgaagacggcagcgggagaagccgctccagtgcggttgcgcggcggcccaggcgtcgaggggagcctcggcggggagcgcaccgcgcgcctgcgcggagagctgcgtgacgcggcggcgcgcaagggacgtgcggagtgagtggcgctgcgggtggggccgtcggcggcgctggtgagctttgcggagctgggcggtgccgaggaggaggaggtggcggcctgggtctgacgcggccctgttcgagggggcctctcttgtttatttatttattttccgtgggtgcctccgagtgtgcgcgcgctctcgctacccggcggggagggggtggggggagggcccgggaaaagggggagttggagccggggtcgaaacgccgcgtgacttgtaggtgagagaacgccgagccgtcgccgcagcctccgccgccgagaagcccttgttcccgctgctgggaaggagagtctgtgccgacaagatggcggacggggagctgaacgtggacagcctcatcacccggctgctggagggtgagtgcgcgcctggccgcgggacagagggaggtcgggcaccgccgccgacccctgcgtccccgtctgccgccggaacgcgaggggacccctttcccgccccgagacgagtctctgggagcgcggcgcggcggacgaaccgaggagggggcgaggaggctctgggcgcgggggagcggcctctgggagcgcggtcaggggagatcgggggagagggggccgttcccgcggaccctcgggggccaggcccgccggccgaaggctgtgcggagcgggtctgcgggagacagcctttcggaaaggccgccgggctccgcgcgccgtggtgctcgcctccggtgacccgaggatggggagaggatgcctgccactgggctttgtgcgtccgtggaatcactgttcttctctgttctctttgtgcattgcccttggctgcctccgattgtcgttccgggagtgaattttacgtatatatatataaacctgtccttaacaggactgcttcgtctgctctgcatttttacacaatgctatatagaatggattcttcttaaagagaggataaaattagcgggaattaatctaccgtttgttacttggcctaaaaaaattgtaagacaagatatttgatcaggttgaagatgcacctaagaaatgtgatgtatgtagatgggtttgctgaagggattggcttttgcatttgatttgagcagagcttaatttctgcacaaacttagtgaaaatctatttttaaagcctgtcttgtattcgaaaggtatttgtaggtctacgcagcatttgaactttccgggctcaagtgttcttattgaatagttttatgttggtgggaaggcaaggggggaaaacgaagaggtggactagccgggagttaaatgtattgattcattgcaggatattattcaaagttaaatgcagtcttctgccaaa

SEQ ID NO: 2072 - DNA, 6000 bp, Homo sapiens
gaaaggggtccagtttcagtcttctgcatatggctagccagttatcttagcaccatttatcaaataggcagtctcttctccattgcttgttattgttgactttgttcaagatcagatggttgcaggagtacagctttatttctggctcctccatcctgttccattggtttatatgtctgttttggtaccagtaccatgctgttttggttactgtaagccttataatgtaccttgaagtttggtagtgtgacgcttctggctttgttctttttgcttaggatgctttggctattcgggctctttttcaatttcatatgaattttagaaaagttcttttctaatgctgtgaaaaatgacattggtagtttgataagaagagcattgaatctgtaaactactttgggcagtatggagattttaacaatattgattcttctatccatgagcatggaatgtttttccatttgtttgcatcacctctgatttctttcagcagtgctttgtagttgtagagatctttcacctccctggttagctgtattccttgatattctttttgtggctattgtaaatgcagttcttgatttggctctcagcttggatgtttttgatgtatagaaatgctactggtttttatacattgattttgtatcctgaaactgattaacaaagttgttcatcagttccaggcacgttttggcggagtctatggggttttctgtgtatagaatcattatcgtcagtaaagattgtttatcttcctctcttcttatttggatgccttttatttctttatcttgcctgattactctggcagggactttcagtactctgttgaataggggtggtgagaatggtcatcctagtctcttgttccagttctcaaggggaatgcttccagcatttcccttttcagtacgatgttggctgtgggtttgtcagatggctcttactattttgaggtatgttcctaatttttcagtgcctaatttgttgagggtttttaacatgaaagggtgttgaattgtattgaaagcctttctgcatctattgagatgatcatatggtgtttgtttttaattttatgaggtgaatcacatttattgatttgcatatgttgaaaccttgcaccccaggaataaacccttcttgattgtggtgagttaactttttgatgtgttgctggattcggttttagtattttgttgacgattttgcatctgtgttcatcagggatattggcctgaggttttcttttttccttgtgcctctgctaggttttggtattacaatgatgctcacttcgtagactgagttaggggggaggtcctcttcctggattgtttggaatagtttcagtaggattggtactagctctttgtacatctgatataattcagctgtgaatctttctgggccagggctttttttggtttataggtttttttattactgattcagttttggaacttgttattgttctgttcaggattttaatttcctcctggttcagtcttcggagtttgtgtgtgtttctatgaatttattcatttcttaggaggtcatgtgtgtttctatgaattcatttcttgggagcgcatgtgtgtttttgtgaatgtattcatttattctaggtttcctagtttgtgtgcacaggtgtttataatctctaggtattttgtatgtctgtggggttggttgtaatgtcacctttctcatttcagattgtgcttatttggatcttttcttaatctagctagcagtctatcttgtttattcttttgaagaaccaacttttggtttcaacatttacatttttaaaagaggccagttttagctttagtgtgctcctacaaatcattcttgttcactgagtaaaacagcttcagtactttgcttttgcaaaggctattctatgtctttgatgtacacacactgtatttctcttaaaatgcattggggctttcccattcctctttctctttatcataatatactgtttccatcaattagtacaattgaatggtaaatggttgattgctcatttacaaattaaatatagtaaccataccttatccttccagcagttgtcatagtggtgttggattaatatattctcttcactaaggcactattatgttctaaatagtttttaaaaaatactttgtacatatttctatactgttttagttttggaaaatcatgacttttttatgtataatgtaggttaaagctctatttacatccaccagaatgagtgtagtaaaaaagccagactgtatcaagttttggcaaggatttggaggcattagaatcttcatacattaatggtgggaatagagttctcatatgatgcagcagttttacctctaggtatatacccaagatatatgaaaacatgttcacacaaaaactgttacataaatgtgcattattccttatagccgaaaaagtcacacaattcagatgtccatcagctactgaatagataaactgtggtacatccatacaatggactgtacaatgtacaactcagcaataaaaaggaatgaaggactgatacttcaaaactggttttgaaaacctgagtgaaagaagccagtcacaaaagaccacatattatatgatgccagttatatgaaatgttcagaataggcaattctatagagacacatagtagattagtagttggttagagttagaggatgtggagagcaggaatggggagtgactgctgatgggaacaagctttctttttggggtgacaaatgttctaaaattagatttatatcaataaagctgttttttaagtaaaaagatctatttatacataaataaataaggtctgaagggtttgtgacttgtaggttagttaccctcctaagttactgtatcagaattatgatgacaacatagatcttctgactcttaaaccagtgttcttttcctcacaacagagatacactaagttcaaaaagttttttacttaaatctaaggattggatagttgatagagttagtgtacttttgttattaaaatatgagtggaatgacaaagttcagacatttgcacactttaagaaatgtttatggaactttgctattctacatttttattgcatttttgcagtttatgccatttattgaaaatcacaattgtaacaattttcttaacttctgtacatgaaaaaataacattatttgttaataatttactttaagatattgaaaccatctgaaaagaaagctaaataccagtatggtggactgaattctggacgtcctgtcactccacctcgaacagctaatccgccgaagaaaaggtgaagaaaggaattctgtaaagaaaccatcagatttgttaaggacatacttcataatatataagtgtgcactgtaaaaccatccagccatttgacaccctttatgatgtcacacctttaacttaaggagacgggtaaaggatcttaaatttttttctaatagaaagatgtgctacactgtattgtaataagtatactctgttatagtcaacaaagttaaatccaaattcaaaattatccattaaagttacatcttcatgtatcacaatttttaaagttgaaaagcatcccagttaaactagatgtgatagttaaaccagatgaaagcatgatgatccatctgtgtaatgtggttttagtgttgcttggttgtttaattattttgagcttgttttgtttttgtttgttttcactagaataatggcaaatacttctaatttttttccctaaacatttttaaaagtgaaatatgggaagagctttacagacattcaccaactattattttcccttgtttatctacttagatatctgtttaatcttactaagaaaactttcgcctcattacattaaaaaggaattttagagattgattgttttaaaaaaaaatacgcacattgtccaatccagtgattttaatcatacagtttgactgggcaaactttacagctgatagtgaatattttgctttatacaggaattgacactgatttggatttgtgcactctaatttttaacttattgatgctctattgtgcagtagcatttcatttaagataaggctcatatagtattacccaactagttggtaatgtgattatgtggtaccttggctttaggttttcattcgcacggaacaccttttggcatgcttaacttcctggtaacaccttcacctgcattggttttctttttcttttttctttctttttttttttttttttttttttgagttgttgtttgtttttagatccacagtacatgagaatccttttttgacaagccttggaaagctgacactgtctctttttcctccctctatacgaaggatgtatttaaatgaatgctggtcagtgggacattttgtcaactatgggtattgggtgcttaactgtctaatattgccatgtgaatgttgtatacgattgtaaggcttatgtcactaaagatttttattctgattttttcataatcaaaggtcatatgatactgtatagacaagctttgtagtgaagtatagtagcaataatttctgtacctgatcaagtttattgcagcctttcttttcctatttcttttttttaagggttagtattaacaaatggcaatgagtagaaaagttaacatgaagattttagaaggagagaacttacaggacacagatttgtgattctttgactgtgacactattggatgtgattctaaaagcttttattgagcattgtcaaatttgtaagcttcatagggatggacatcatatctataatgcccttctatatgtgctaccatagatgtgacatttttgaccttaatatcgtctttgaaaatgttaaattgagaaacctgttaacttacattttatgaattggcacattgtattacttactgcaagagatatttcattttcagcacagtgcaaaagttctttaaaatgcatatgtctttttttctaattccgttttgttttaaagcacattttaaatgtagttttctcatttagtaaaagttgtctaattgatatgaagcctgactgattttttttttccttacagtgagacatttaagcacacattttattcacatagatactatgtccttgacatattgaaatgattcttttctgaaagtattcatgatctgcatatgatgtattaggttaggtcacaaaggttttatctgaggtgatttaaataacttcctgattggagtgtgtaagctgagcgatttctaataaaattttagttgtacacttttagtagtcatagtgaagcaggtctagaaaataagcctttggcagggaaaaagggcaatgttgattaatctcagtattaaaccacattaatctgtatcccattgtctggcttttgtaaattcatccaggtcaagactaagtatgttggttaataggaatccttttttttttttttaaagactaaatgtgaaaaaataatcactacttaagctaattaatattggtcattaaatttaaaggatggaaatttatcatgtttaaaaattattcaagcactcttaaaaccacttaaacagcctccagtcataaaaatgtgttctttacaaatatttgcttggcaacacgacttgaaataaataaaactttgtttcttaggagaaaatgattctgtaattccagtgtcactaatttatattgttctttcctctgatttttttcaggttagtgatttttttgtatacaatttaatccaaatgttatgacattcagaaatcatgaaacacagtagatatctgttataatgtggtgtatcacatggattataaagcaaagttatggtcgatttctattcttgaaagaatcaactacagtgaatcctttgcatttgaagccttaacatgcattgctttaattttgcccagggacaaattttaataatcagcaagactggtttgtgcaaagcgttgagtcatcaggtatttagag

SEQ ID NO: 2073 - DNA, 6000 bp, Homo sapiens
gaattatcatgtgattcaattccacttatataccacaaatattcagaagtagggacttaaacagatatatgtataccagtgttcacagcagcatgattcaagatggccaaaaggttgaaataaccagtgtccattcataaatgaatgcatgaacaaaatatggtatatatacacaacggaatattattcagccttaaaaaggaaaggaattctgacatatgctacaacatagatgaaccttgaagacattttgctaagtgaaataaccagacacaaaaggacaaatactgtttgattccacttatatgaggtacctagaacaggcaaatttacagagacagaagagagattagaaaatataaaaaattaaccaggcatgcccacgcctatggtcccagctactcgggaggctgaggtgggaggatcgcttgagcccagagttcaaggctgcagtaagctgtgatcacaccactgcactccagcctgggcaacagagcgagaccctgtctcaaaaaaaaaaaaaaaaaaaaagattagcagagactgaaaggactgggaaatggggagttactgtttaatgggtacacactttctgtttggaaagattaagagttgtggatgtggatgtggtggcggctacacaacattgtgaatgtacttaaaggcagggaattaatacattgaaaaatagtacatttcatgttatgtgtattttatcacaattttaaaacataaaaaaaaaaatcacaatggttgcagggtagagaaggaattgaagtagctgtcggaactggttctgagattctcacagcaatccaggaatgaggtggtgttggcttgaactaggatggtaagtgtagacatctttgagaagtagaaagattttggtgacaggacttagttatagattagaaggcagggagaggaaatgtcaaggatgcctcccagattgatggctttcagacttggatagatggtggactcatttcctgtgaaaggaaacttcaaaccagcttgggagaagatcatacatgcagtacaggatattttgagtttaaagttcgttcaagatgttcaagtggagaatttggatagagagatctgaaactcagagcggttcataaggaatatgtaaactttagaggtaatggcgtatagatgatcactgaaatcatggacgtgaaagaaatcaccttaaggagaaagtatagagtgaagagaagaggattgttgggccatgccagcatttagagctacaaagattaaggtgtgttaaaaagagtggcccggccaggcgtggtggcccacacctgtaatcccagcactttgggaggctgaggctggtggatcactggagttcaggagttggagaccagcctggccaacaccgggaaacctcaaaaatacaaaaattagctgggcgtggtggtgggcacctgtagtcccatagtcccagctacttgagaggctgtggcaggaaaattgcttgaacctgggaggcagatgctgcagtgagctgagatcatgttactgcactccagcctgggcaacagagtgaggccctgtctcaaaaacaaaaaacagaaagagtggccctggaagaaagaagatcaaaagagctttccaagaagaattaagaggtttacaggatctgatttctgcctttatggatttaccgattctggaagtttcatataaatgggaatcatacaatatgtgtgaaattttatgtctggatttttcattttgcataatgtttttgaggtttatccatgtttttgttgttgtggttgttgttttttgagatggagtcttcgctctgtcgcgcaggctggagtgcagtggcgcgatctcagctcactgcaagctccgcctgccgggttcacgccattctcctgcctcagcctcgcgagtagctgggactacaggcgcgcgccaccgcgcccggctaattttttgtatttttagtggagacgaggtttcaccgtggtctcgatctcctgacctcgtgatccgcccgcctcggcctcccagagtgttgggagtacaggcatgagccacggcgcctggcctatccatgttgtagcatgtatcagtacttcattttttttgtgactgaataatattccgctgtgtagatatatttcacattttgttcaccatttatccgttgatggacacttggtttgtttccaccttttggctattgttaacagtgctgctatgtacattcctgtctaagtctttgtttggaaacctgttttccaattctttgaaatatctaggaatggaattgctgagttttatgataattcaaagtttaccttctagaggaaccccagcaaccgtattgttttacattcttatcagcagtgtttgaggggtccagtttctccatgtcctcaccaacacttattttttattatttcctgattattattattattgccatactagtgggtgtgaaattgtatttagttgtggttttgaattccatttctttaatgactcatgatgttgagtatcttttcatgtgcttattggcgatttacatattttctttggagagatgtctgttcaagcccctttgcctatttttttaattgggtggtttgtctttttgttgttgagctgtaagaattctttatatatctggttactagaccctcatcagatatatgatttgtaaatattctattctgtagattgtcattttattttcttcatagtgtcctttgatacacaaacgttttaaattttgatgaagcccaatttatctctgttttcttttgttgcttgtgctcttgctgtcatagctaaaattttatcaccaaatccaaagtcatgaagatctcccccatattttcttctaagagttttatagttttcgcttgtacatttatattttatatcctctaaattttgtttataatttaaatcattgctatagacttggtccagtgagacctataaacagaggtcttaatttactcagtggttaaattgtcctaaaattgatttctgcaaaattcagaggggagatttttgggatttcatagagaaatctatatccatacagttaaatccttcatgatttcatacacttcacttttttaaagtattaaaacttttttatttgaagaatacgtggggagaagagaaatatatttcagcacttagatatgtagattatttccaaaatagtttaccactcaactagtcacttctgtgtaaatcagttttccctgaagcaagcattgtgttgttcccggctacaagcggtcctcattttgcatggtactgtgggaccataaaaatggccatgcaaagcaatcttaataatcaatggggaaaatgatgattgttccatgacctttaaaattctgctaaaatattaaaactcttaaggtcagttataaatgtagaaaaaaatgcaaaaaaaatttaaaaatatttagtacactgtaatttaaaacattaaaaatagaattaaagtgttttatttcattgtgaaaactaagtagtttgaatagggattgccttttttttctgccaagtgacttatgatactgagtaagcatcttttctattcatggcaaactgtcatactccttttaagtttgggtgagcttccagccttttattgcttgtgctttcaatgttgtgaagtatttctgtattcacattaaatgctctttagtgtgaagtttgttttttttttttttttaccgtcacttcctctgggacatatttatctttattgcaatcacttttcttatttgtgttgataagtttgccttcactaagctcctatgaatgcacagcaggaagaacattcccatgatcagtgacttcttctacaaatccatttatgtttgattcaaatttcacttccagtgttatcatttttcgttgctttgttggactttcatctttgttggccagttctttcgattgttcacttctataaaatgtcaggtggaggacaaagagacagtgtaactacgtgctctgctgtgagtgaactgattaacagatgcacagggaccaaccactggaagaatttgaaacaagtaacacgactggtcactgatcatgaagcatatctgttatttacatcgtgatttgtagactgaagaactagcagagaagtttgtacttcctgtaattactcagagttatactgtgctacctaaaattttaacctaggtttaaacaacaccagtttccttaccagtttcctttccttcctggtaaggaaactggtatttaaactaaatctaggtcactgaaatttgtgccatgggaaccgtgcacattgaggacctgcctacaccctacatgtttatattggtccaggcaggcttaatgctgactactgagaaataggctatctgaatttatatcaaatagtgaatcttaaagcacccaagatgaaaaattcgtgcacattgaggtgcttttaaaatctttgtcatttgacaatcaagcttaaaatgtatcttagagtaaccgaattttagaaataaagacctttaaaggccccatagtttgataccacagattatccagcatgtttataatgaattatttctcctccttcaatttcagtttgctcatactttgtgacttgcggtcacagtggcattcagctccacacttggtagaaccacaggcacgacaagcatagaaacatcctaaacaatcttcatcgaggcatcgaggtccatcccaataaaaatcaggagaccctggctatcatagaccttagtcttcgctggtatcactcgtctgtctgaaccagcggttgcatttttttaagccttcttttttctcttttaccagtttctggagcaaattcagtttgccttcctggatttgtaaattgtaatgacctcaaaactttagcagttcttccatctgactcaggtttgcttctctggcggtcttcagaatcaacatccacacttccgtgattatctgcgtgcattttggacaaagcttccaaccaggtacaagcggtcttccgaattttgcactcagaaaagtggcatcatctaagtcaattacatgcaaattctggggggctagttttttgtgtatgttaaatgggtcacaacacgacttctgtaaatcctcaaatctgtcaatataaatttttatgtgatgaaagcaaattgtattgttcctagaaagtgtccttccagttctaagttgaagtaaaagcatgtcatttgatgacaattcttgcaacatcttaaaacctgtgtgacaagtatagtaggttttatggcactcatttgtagtacgaagctggactgcaactatcgatccatcattgttgattctagcatattttccttgttttattttgtctagagatctaggtcacgggctgatcacccttagcttgagctctcctccgcctggcttccggcaggatccacgtccacacaggcacacttgcctgcccgttcatttcccagcctgtccccatgctaccactccacttcacttattatatatactctaaatctttttcttctcaacataaaacattctacaatcctgcagcctttttacttttttaagcaggtaggcaaacatgtagttgatactcagtggaagcacagagcagagttaaagagaaggaccccctttcactgaccagttgagttttttttctttcctttattttttaaaacaatttcaaaattgagatggggtttcgccatgttgcccaggctggtctcgaactcctgagctcaggtgatccgcccaccttggctgggattataggcgtgagccaccacacctggccaagttgagtttttaaagtagaaaattttggagaaattaactttattgtgcagtgaatgagaaagaaagaacggttttgaaagaaagtctctgcatttatgtgagactgagatgagtcctataaaggggagtctccccaacccctctgtctcctaaactgcattgggaaactcagattaa

SEQ ID NO: 2074 - DNA, 6000 bp, Homo sapiens
ctccacctcctgggttcaagcgattctccttcctcagcatcccgagtagctgggattacaggcatgtgccaccaccccggctaattttgtatttttagtagagatggggtttctccatgttggtcaggctggtcttgaagtcccgacctcaggtgatctgcccgccttggcctcccaaagtgctgggattacaggtgtgagccaccgcgcctggccactgaattgatgttttaaaaagatcatgatgtggctgtattaaaaaagaaaacagataataacaagtgatggtgaggatgtggagaaattagaaccctcgtgcattgctggtggaaatgtaacatgggtgtaaccactgtggaaaacaatttggtgattcatcacaaagttaaacagaattatcatgtgattcaattccacttatataccacaaatattcagaagtagggacttaaacagatatatgtataccagtgttcacagcagcatgattcaagatggccaaaaggttgaaataaccagtgtccattcataaatgaatgcatgaacaaaatatggtatatatacacaacggaatattattcagccttaaaaaggaaaggaattctgacatatgctacaacatagatgaaccttgaagacattttgctaagtgaaataaccagacacaaaaggacaaatactgtttgattccacttatatgaggtacctagaacaggcaaatttacagagacagaagagagattagaaaatataaaaaattaaccaggcatgcccacgcctatggtcccagctactcgggaggctgaggtgggaggatcgcttgagcccagagttcaaggctgcagtaagctgtgatcacaccactgcactccagcctgggcaacagagcgagaccctgtctcaaaaaaaaaaaaaaaaaaaaagattagcagagactgaaaggactgggaaatggggagttactgtttaatgggtacacactttctgtttggaaagattaagagttgtggatgtggatgtggtggcggctacacaacattgtgaatgtacttaaaggcagggaattaatacattgaaaaatagtacatttcatgttatgtgtattttatcacaattttaaaacataaaaaaaaaaatcacaatggttgcagggtagagaaggaattgaagtagctgtcggaactggttctgagattctcacagcaatccaggaatgaggtggtgttggcttgaactaggatggtaagtgtagacatctttgagaagtagaaagattttggtgacaggacttagttatagattagaaggcagggagaggaaatgtcaaggatgcctcccagattgatggctttcagacttggatagatggtggactcatttcctgtgaaaggaaacttcaaaccagcttgggagaagatcatacatgcagtacaggatattttgagtttaaagttcgttcaagatgttcaagtggagaatttggatagagagatctgaaactcagagcggttcataaggaatatgtaaactttagaggtaatggcgtatagatgatcactgaaatcatggacgtgaaagaaatcaccttaaggagaaagtatagagtgaagagaagaggattgttgggccatgccagcatttagagctacaaagattaaggtgtgttaaaaagagtggcccggccaggcgtggtggcccacacctgtaatcccagcactttgggaggctgaggctggtggatcactggagttcaggagttggagaccagcctggccaacaccgggaaacctcaaaaatacaaaaattagctgggcgtggtggtgggcacctgtagtcccatagtcccagctacttgagaggctgtggcaggaaaattgcttgaacctgggaggcagatgctgcagtgagctgagatcatgttactgcactccagcctgggcaacagagtgaggccctgtctcaaaaacaaaaaacagaaagagtggccctggaagaaagaagatcaaaagagctttccaagaagaattaagaggtttacaggatctgatttctgcctttatggatttaccgattctggaagtttcatataaatgggaatcatacaatatgtgtgaaattttatgtctggatttttcattttgcataatgtttttgaggtttatccatgtttttgttgttgtggttgttgttttttgagatggagtcttcgctctgtcgcgcaggctggagtgcagtggcgcgatctcagctcactgcaagctccgcctgccgggttcacgccattctcctgcctcagcctcgcgagtagctgggactacaggcgcgcgccaccgcgcccggctaattttttgtatttttagtggagacgaggtttcaccgtggtctcgatctcctgacctcgtgatccgcccgcctcggcctcccagagtgttgggagtacaggcatgagccacggcgcctggcctatccatgttgtagcatgtatcagtacttcattttttttgtgactgaataatattccgctgtgtagatatatttcacattttgttcaccatttatccgttgatggacacttggtttgtttccaccttttggctattgttaacagtgctgctatgtacattcctgtctaagtctttgtttggaaacctgttttccaattctttgaaatatctaggaatggaattgctgagttttatgataattcaaagtttaccttctagaggaaccccagcaaccgtattgttttacattcttatcagcagtgtttgaggggtccagtttctccatgtcctcaccaacacttattttttattatttcctgattattattattattgccatactagtgggtgtgaaattgtatttagttgtggttttgaattccatttctttaatgactcatgatgttgagtatcttttcatgtgcttattggcgatttacatattttctttggagagatgtctgttcaagcccctttgcctatttttttaattgggtggtttgtctttttgttgttgagctgtaagaattctttatatatctggttactagaccctcatcagatatatgatttgtaaatattctattctgtagattgtcattttattttcttcatagtgtcctttgatacacaaacgttttaaattttgatgaagcccaatttatctctgttttcttttgttgcttgtgctcttgctgtcatagctaaaattttatcaccaaatccaaagtcatgaagatctcccccatattttcttctaagagttttatagttttcgcttgtacatttatattttatatcctctaaattttgtttataatttaaatcattgctatagacttggtccagtgagacctataaacagaggtcttaatttactcagtggttaaattgtcctaaaattgatttctgcaaaattcagaggggagatttttgggatttcatagagaaatctatatccatacagttaaatccttcatgatttcatacacttcacttttttaaagtattaaaacttttttatttgaagaatacgtggggagaagagaaatatatttcagcacttagatatgtagattatttccaaaatagtttaccactcaactagtcacttctgtgtaaatcagttttccctgaagcaagcattgtgttgttcccggctacaagcggtcctcattttgcatggtactgtgggaccataaaaatggccatgcaaagcaatcttaataatcaatggggaaaatgatgattgttccatgacctttaaaattctgctaaaatattaaaactcttaaggtcagttataaatgtagaaaaaaatgcaaaaaaaatttaaaaatatttagtacactgtaatttaaaacattaaaaatagaattaaagtgttttatttcattgtgaaaactaagtagtttgaatagggattgccttttttttctgccaagtgacttatgatactgagtaagcatcttttctattcatggcaaactgtcatactccttttaagtttgggtgagcttccagccttttattgcttgtgctttcaatgttgtgaagtatttctgtattcacattaaatgctctttagtgtgaagtttgttttttttttttttttaccgtcacttcctctgggacatatttatctttattgcaatcacttttcttatttgtgttgataagtttgccttcactaagctcctatgaatgcacagcaggaagaacattcccatgatcagtgacttcttctacaaatccatttatgtttgattcaaatttcacttccagtgttatcatttttcgttgctttgttggactttcatctttgttggccagttctttcgattgttcacttctataaaatgtcaggtggaggacaaagagacagtgtaactacgtgctctgctgtgagtgaactgattaacagatgcacagggaccaaccactggaagaatttgaaacaagtaacacgactggtcactgatcatgaagcatatctgttatttacatcgtgatttgtagactgaagaactagcagagaagtttgtacttcctgtaattactcagagttatactgtgctacctaaaattttaacctaggtttaaacaacaccagtttccttaccagtttcctttccttcctggtaaggaaactggtatttaaactaaatctaggtcactgaaatttgtgccatgggaaccgtgcacattgaggacctgcctacaccctacatgtttatattggtccaggcaggcttaatgctgactactgagaaataggctatctgaatttatatcaaatagtgaatcttaaagcacccaagatgaaaaattcgtgcacattgaggtgcttttaaaatctttgtcatttgacaatcaagcttaaaatgtatcttagagtaaccgaattttagaaataaagacctttaaaggccccatagtttgataccacagattatccagcatgtttataatgaattatttctcctccttcaatttcagtttgctcatactttgtgacttgcggtcacagtggcattcagctccacacttggtagaaccacaggcacgacaagcatagaaacatcctaaacaatcttcatcgaggcatcgaggtccatcccaataaaaatcaggagaccctggctatcatagaccttagtcttcgctggtatcactcgtctgtctgaaccagcggttgcatttttttaagccttcttttttctcttttaccagtttctggagcaaattcagtttgccttcctggatttgtaaattgtaatgacctcaaaactttagcagttcttccatctgactcaggtttgcttctctggcggtcttcagaatcaacatccacacttccgtgattatctgcgtgcattttggacaaagcttccaaccaggtacaagcggtcttccgaattttgcactcagaaaagtggcatcatctaagtcaattacatgcaaattctggggggctagttttttgtgtatgttaaatgggtcacaacacgacttctgtaaatcctcaaatctgtcaatataaatttttatgtgatgaaagcaaattgtattgttcctagaaagtgtccttccagttctaagttgaagtaaaagcatgtcatttgatgacaattcttgcaacatcttaaaacctgtgtgacaagtatagtaggttttatggcactcatttgtagtacgaagctggactgcaactatcgatccatcattgttgattctagcatattttccttgttttattttgtctagagatctaggtcacgggctgatcacccttagcttgagctctcctccgcctggcttccggcaggatccacgtccacacaggcacacttgcctgcccgttcatttcccagcctgtccccatgctaccactccacttcacttattatatatactctaaatctttttcttctcaacataaaacattctacaatcctgcagcctttttacttttttaagcaggtaggcaaacatg

SEQ ID NO: 2075 - DNA, 6000 bp, Homo sapiens
atagatgaatgaatgtggttgtgcactaataaagcattatttacaaaaacaggcagcagcccagttttggcccagatctattctagacaatgaaataattagcgaataaaacagtcaaaaatccctgtccatgtgactttacatgtcagaggaaggagaaaacaaagacaataaatcaataagttgtattgtataatagaaggctgtaagtgccatggaggggaaatagaatagaatgagggggatagggagtgacaacagggtgacagtagtgattggaacttaaatagtgtagtcagggggcttcgtgagcaagtgacgtttcaacaagatctgtgagttttgcagatatctgaaggatgaggttccaggcaaaaggaagagcaagtacagaggcactgagacagtagtatacctggcattcttgaaaaaccacaaggaggacaatgtaactagaggagaatgaaagaggggcagagaaacaagagacgaggttaaagtggcaaccagggtgcaggaaatatagtgtcttgtaagcccttgatgattctgggcttgacttttttctttctttctttctttctttctttctttctttctttctttctttctttctttctttctttcttttctttctctttctttctttttttttttttttttttttgagacagtctctctctgtcgcccaggctggagtgcagtggcatgatctcagctcactgcaacctatgcctcccaggttcaagcaattctcctgcctcagcctctggagtagctggaactataggcatgcaccaccatgcccagctaatttttgtattttcagtagagacaaggttttgccatgttggctaggctggtctcgaactcctggcgtccagtgatccacccacctcggcctcccaaagtggtggaattacagccgtgagccaccacgcccggccttctttctgtattctgcatgatgaaagggacaaggcagatctctggggcctcttttataagagcaccagttccaccacccaaaggccacacctcctaataccatcacattggtgattcgcttttaacttatgagttttagggaggacacaaacattcagaccatagcgatgattttataataatgtgcatgtggggactattgacaagaagagtttataagtaagcaagacaaattactaaagcagaaacatctgaggaaaagagccacaagagatatggtacaacataaatatggaccactctacaatttccaaaagcaggaataacagttattatttttcctctgctagtaaaaagagaattaagaataattgatacatacgattcttctatctgtgtctgattcgttgctttagcattacacattttgatctaaaagtcactgtattaaaagagatagacttatgggattgactataggtcaataaccatactgatattcacaaagagttacgtagtaaggcctgagaagcccatgtggataaactcacacatatcctccattcctgctgtcacagcctctttatttgttgaaacaagcacagggatagctggggaaaaggctaacagaagtcttcttgctcaactgcttctcaaaagcctctttagaagtggttgcctttggtgaacattcaaaagggagcccaatatgcacactctgcccattcgaagtggttcaagcacatcatttccctagacctcatcatcagccctctgatatcattccttccaactctctgaacatcagctgcattgccagccactggctctgtataagccactgaaggaggggactttggatcttcttggggtccatggttaggaagtaagtgactaggttgcataagatgaatctactccaatattcctgactccctaagtatttttgatttcttcatctgcattacttggcattacatttacatttagtgtgagctgccactgagctgatattatagtaaaccaactgggcaaactggcttagcgctcccactgctagaggcagtacatcaactttctttcttttttttttttttttcttgctctgttgccaggctggagtgcagtggcacgatcttggctcattgcaaccccgactccctggttcaagcgattctcctgcctcagcctcccaagtagctgggattacaggcacatgccaccacgcccagctaatttttgtatttttagtagagacgtggtttcaccatgttggccaggatggtctcaatctcctgacctcatgatccgcccacctcggcctcccaaagtgctgggattacaagcatgagccaccgcgctcagcctcaactttcagctttcttcacgtcatctttagactcattgccatgtctatttcttgctttctgttgctcttttgttgtgtaaagcatcacccctccatcagatcttgtccatatcctcttggggcgcattagcatctgattctagttctaggagtgaaggcacaggtagagataggatatttggagaatcagcacctccttgcagggtgactgtttcatgctttttaatgtaggctgtaccagccttatcagacaatggtgggaagcctgtggagacacagcagaatttaggagggcagtggcacttggattcattcaaatccacccaaattcccagggcttctttctttcacaatcaatgccctcagtgttcacagaagagacctgatgaggctgcaaatgaaaatttttgttgtaattctaggctgggcgcggtggatcacgcctgtaatctcagtactttggaaggccgaggtgggggaatcacttgaggttaggagttccaaaccaggctggccaatatggtgaaaccccttctctactaaaaatacaaaaattagctaggtgcggtggcacacgcctgtaatcccagttacttggcaggctgaggcagggaaattgcttgagcccgggagccagaggttgtagtgagccaagattgtgccactgcactccagcctcggcaacacagcaagactctgtctcaaaacaattatattgtaattctggtgcctgcagcaccaagctttgcagctgagagcccagacagtagggaattgggctcctcagggagtccaatatgctcacactttacccattccaagaggttcacccatatcatatcattcccctggacctcatcaccaaccctctgatatcattccttccaaatctttccccagcagagaaggcagatttttacatcacccctgaggctccctgaaataggagggttttctggtacagtcataaaagcgtgtgtcctctgatcatgcttaagcttgccatttttcattctttaagctctcttgggcagttcaggggctcaaaaagtcagaaaaacttgtccttgctactgccattgctgctgccacagccatcccacacccacaaagctgacaaatggacacacagcactgtcagagttttcttgtcacctggaaatgccacaaaaagatggctctgcctcatgtctaccttctaaacctcccgccagtgctttacatataggggacttaagctatgcccaggaccagagctacaaggaaagtgtagattttagttgttgataccctgcaatgtggggttgttgggggatggagaagggaggctggagaggatgcctgcctaggtgtaattttttttttttttttttgaattggagtcccactctgtcacccaggctggagtgtagtggcatgatctcagctcactacaatctctgcctcccaggttcaagcaattctccctgcctcagcctctggagtagctgggattacaggtgcctgccaccacgcccagctaatttttgtgttttttagtagagacggggttttgccatgttggccaggctggtcctgaactcctgacctcaggtgatccgcccgtctcagcctcccaaatttctgggattacaggcatgagccaccgcgccggcctaggcataatatttaatgtatatttgaggtctgtctttggaccaccttcctctcttatcccagctaagatactgagagtacaaactcctggttataattctaactccgctgcttactacctgtgttaatccaaattctctgtgcctcaatactcattagtcactgtgccaatgaactctggaactctgtgtgactctgggagtgtgtcgcagtccatcaggtgagtagaatttctataaatcgaggactactggtgttggactatggtaggaagctccctggggtactgtaggaagcaggtgtctctatttagcagcaggactggcccacaggtgcttttacagcggctggcaagtgtctgctcatgaatgaatggatgggtgggagcggagtgaaggagattacgcccccaggcctctgatccccaggcttgtaaaggtgagggggccgcggtgtggcaagagggaaagagtgctttggtgtttacaggccccgacttgaactgaatcctggctttgccacttacgagcggcaggacccctgggtgagttcatttactcagtttcctctattgtagaatggagctggtaagatccatcttcccaaccccaccccaaatatttgtgttgagagtaagtggaacccttgattcgagaacctagtgcggccagcggactaggccagcggagaaccctaggagccccgggggcgggggatgggggtgcagggtcctggccgtgcaggggcagcacgtgggtgccaagcccgcctgccggtgccaagcccgcccgccggtgccaagcccgcccgccagtgcctctcgcgcgcactctggatccagcgccaatttaccccaatcccgtagcagacgagggcttgtgcgagagggggccgggcggctgcagggaaggcggagtccaaggggaaaacgaaactgagaaccagctctcccgaagccgcgggtctccggccggcggcggcggcggcggcggcggcggcgcaggtgagcagggcagggggcagccgagggagcgcggggagcgggggccggggggccacgtacgaggggctgcaggcccagccggggcgggactcgccaatcctgcgtccccagctcaggacgcggacgctgatccgaagcccctggccccggctgggtcagcactgggagagcaggcccaggtccgcagcccgggtgtggggccctccccaaatccagggaaaggatcgtggagcggggtggggactgaaagccatttccttcccgtgaagaatttttatcagtgcaagtaacaaatatttcccaggcagcagttgtggggcggggtctagtggaagacgaataggcctagtggcttgacacatggaaaatacggaggcctgaaatactcatagactggctgaacaatctttggctaaaaatctcttccgtggagagttgcagtagtttcccaattgcctggccgcagttcctgttcccactccgtatcctcacccctgaacctccaccccctacctcttctccacacctcagcatctggaatgttcctttaagtaagaaccagactctcccctgctccgaccttccccgtagctttcctgtctcatcagaatcctataaacatttattaaggctcacaggcaaggcccctcgcaccccctactccggccacgctggcttccttgctgttcctggtgcacagccaagcatcctccagcctctaggcctttgcactgcttgtttcttctttctggaaagcttcttccccagataactgcatggggaaatccctcccttatcctgcactgcttcccatgccagcttatcagagcagccttcctcaaacaacctgcctatacaagaaaccccgctctgcccttgctgttcccccttccactacttcggttgtcaacatagtagttatcacctggtgacattttctttcttttcttttctttttttttttttttgagacagattctcactctgtcgccaggctggaatgcagtggcacgatctgggctca

SEQ ID NO: 2076 - DNA, 6000 bp, Homo sapiens
ctcagcctcccaaagtgctgggattacaggcgtgagccaaggcgcccggcctgtaactcttgttagtactacaataatgaaagtttagttcattcctgtttttcgatagaaaacctggctgtttactcacacatcacaaaacttctaagtttgccagcaccctcctttggcttttcctcttcccattttcatttttatttgtttttcttaaacttttaaatttttattttttactattgccaacaatcaacctcttcccattttcagacaaatattttaactgggaaggttagaaagtaacaaaaatgttaactagaaacctttctaggaaaattaggaaaatcaaaatatacttaatgaaacaaggcctctgcttcatgttactattgcaagctaaacttaaaaacatagaatgaggccaggcatggtggctcacacctgtaatcccagtactttgaaaggccaaggtgggcagatcacctgtggtcgggagttcgaaaccagcctggccaacatggtgaaaccccgtctctactaaaaatacaaaattagccgaccacggtggcgcatgcctatagtcccagctactcgggaggttgaggcaggagaatcacttgaacccgtggagcagaggttgcagtgagctgagattgcgccactgcactccaggctgggcgacagagcgagactccgtttcaggggggaaaaaaaaagaacgatgcaaacagtaaggcttaggaaaacggggcttaatggtggtctcgataataaactaatgcagagaaaaatacaaaataacaacaaacactgtctttgaattggagtaaaacctaagagagataagatacatacagccctctcttcttttcttttcttttttttttttttgagacagagtttccctcttgttgcccaggctggagtgaaatggcacgatctcggctcaccgcaacctccacctcccaggttcaagcgatcctcctgcctcagcctccccagtagctgggaatacaggtgcatgccacaacaccgggctaattttttgtatttttagtagagacagggtttcaccgtgttagccaggatggtctcaatcccctgacctcagctgatccaccctcctccgcctcccaaggtgctgggattacagcatgagccaccgcacctggcccctcctctcttcttttctaaccttaaccagttcctggctcagtcctattattgagggtctaggacatcgtgggctattcattctaaagagaaccttcatttggatggctgacaaagtattattgttttgtaaaacctatttcataaattattaaggaaattgtattgttattgccaacattcccacatatgccttacgtctgcttggatctgacaggaaagtatttttgtttgtttggttttgttttgttttggaaagtattttttaaatataggaaagctggccgggcatggtggctcatgccttttatcccagcactttgggaggccaaggcaggcggatcaccgggtcaggagatcgagaccattctggctaacacggtgaaaccccctctctactaaaaatacaaaaaactagccgggcttggtggtgggcgcctgtagtcccagctactcaggaggctgagacaggagaatggcgtgaacccgggaggcggagcttgcagtgagccgagattgtgccactgcactccagcctgggtgacagagcgagactccatctcaaaaataaataaataaataaaaaataaatatcagaaagttttaaaaacatttttacccttcattagcaacagtgctttgcttaaagtactctacacaagtgtttatgtttttgttttgttttgagatggagtctcactctgtcgcccaggctggagtgcagtggcatgatctcggctcactacaacctctgcctcccgagttcaagtgattctcctgcctcagcctcccgaacagctgggattacaggcatctgacaccacgcctggctaatttttgtatttttagtagagatgggatttcaccatcttggccaggctggtcttgaactcctgtgatccacccaccttggcctcccaaagtgctgggattacaagtgtgagccaccacgcccggccatgtttaggttttaatatttgttgaaatcccattttaatggagaaataatgtacattaacactctgatgaaagccgatgtttaacatttatttactgcctaatcccacgaacaaaaataattccaatttcacagaaaaagaaatgtttgtaacttgaaacatttcagatacttaaagcatgtctcaaaactttaagactctcccaagaagccaataatggcatcttccaaattctgctctgtcctttatggctgacagatcgactccttacactggtagaactagtagtttagtaagcccctagagatcatctagttcaaccctcctattttacagatgaggaaaatgagacccaaaggatttaagtggccttccttaggtcacatagctaataagtagcagagctattaataaactcaaatccagtattttacatcccaaaattaatgcatttcctcatcacccacttgtttccaacatattacatcagttgtctaaacaaataaccatagaatttatgtgctacttgggagtattctggtcctctgaagagaagtcggcctcagaggtttatggatcttcatttcctagtgctaatatccttcttttttttttttttttttttttgagacaaagtcttgctctatcacccaggctggagtgcagtggcgcaatctcggctcactgcaacctccacttcctggcttcaagggattctcctgcctcagcctcccgagtagctgggattacacccccggttaatgttttgatttttagtagagacggggtttcgccacgttggctaggctggtcttaaactcctgacctaaagcgatccacccacctcggcctcccaaagtgctgggattacaggcgtgagctactgagccaggcccctagtgctaatatgctaaatgtgtgttaaagaacaacttggcgaggtggctctcgccaagcctgcaatcctagcactttgggaagccgaggcgggcctatcacctgagctcgggagttcgaaaccaccctgtccaacatggagaaaccccgtctctactaaaaatacaaaattagccgggcatggtggtgcatgcccgtaatcccagctactggggaggctgaggcaggagaatcgcttgaacccgggaggcggaggttgcggtgagccgagatggtgccactgctccagcctgggcaacaagagtgaaactccgtctcaaaaacaaacaaaaacaaacaaacaaacaacaccaccaccacctcataattacaagattaagtacctttgaacatttgtttctgaacctaccacacgcaactgtcactttgcaggtgcttaataattgtgagcgaacattcaacaaacctcatttcataaacttccctactgaaatatagtggtcataggagaccagcagtttagctcatggcttctggtccttgctttgtattggaatactgcttctatctactgactcgtttaccctgggcttcagttccttctttgggctccagttctctcaccttttaagtaaaggattattgtgaggactaaacgagatataaaacgtgtaaaggtttagcactgtgcttagcagataacggaaataaatgatctttattataatgtttacgttccctaagagtcagtggctacgtcatgcaggagacactagtgtagaacaagcgggcggtggtaactagacagacctgatttggcagtctgtcaaacctccaccacccagtatcaaccaatacgagataactaacctcgcctcattccaaatctcccttttctgactccctttcaaaatgaacaaaactgcataaaatgcaggtctatgtggccgggcaaaaacagactcagtcatatcccttagagagttattccggcgcccaccccacctcgcggatagatccagccggagttaaaggagggcacctccgggtgggcgcggtggctcacgcctgtaatcccagtactttgaaacgctgaggagggtggaccgctttgagccggggaggtcagaccagcctgggcaacacagcgaaacccagtctcgctatgtttcgaatacaaaaattcgctaggcatggtggcgggcacctgtcgtcctggctagttgggaggctgtggcgggaggatcgcttgggccccggaggtcgaggctgcagtgagccaagatcgccccactgcactcccgcctggacgacagagcgagactctgtcaaaaaaaaaaaaaaaaaaaaaaaaggccgggcttcgtggctgacgcctgtaatcccaacactttgggagcccgaggcgggtggatcacctgaggtcgggagttcgagaccggcctggccaacatggtgaaaccctgtctctactaaaaatacaaaaattagctgggcatggtggcggacgcctgtaatcccagctactcgggaggctgaggaggatcgcttgaacctgggaggcggaggctgcagtgagccgagattttgcgccactgcactccagcctgggcaacagagtgagactgtatccaaaaaaagaaaaaaaaaaaaaaaaaaaggaggggacctcatagccgtgcaaggtggagtgaggaaatgcggatgtcctcaccactcgcctttaaaatcgcgcgttgtcattgctgcctcgcgtaaaggttcccccggcgctcttcacccacagcgccccgggcgtacaatctcgccagcccggagcccaccgcacgcatcctcctcgcccggcgcgcagcggacagcctcctacgtcacgccagcgccgcgcggcaaggaaggcccccttctccgcctccgcctcctcccgacgccggcgccgctttctggaaggttcgtgaaggcagtgagggcttaccgttattacactgcggccggccagaatccgggtccatccgtccttcccgagccaacccagacacagcggagtttgccatgcccgagaatgtggcaccccggagcggggcgactgccggggctgccggcggccgcgggaaaggcgcctatcaggaccgcgacaagccagcccagatccgcttcagcaacatttccgccgccaaaggtatcactctcatggcctgacccgcggcgccgcggggttgtgctctgcgctctcatcgtgggcttgagcgggtttggctcatttcccatttcttcgggtgatcctctcttgtcctccctatagaagcagcccagtggagggatccttatttctgtttttctgccgatgatcgccaacccggagtatggaggcctttggacttgccccattttgcatcttaatctcccttagtttttcatcctgcactgtgcatcattcatattggagccgaaagcagttcaaaatgccgaggattgcatgcagtcttcactagggatctgacgcttgagggctgtcgcttattgcttattggaactggtagaatgcacagtatctttcagctttgttattcttatttaaagaactattaaataaacttcacttggcacaactgttgagacgaattgggtgaactctccgagtctaaattggggcggggcccattgtactgggatggatgtgggaaccgacttacgtgtcgtgtttgaaatagttgcggaaaagttacgttgatgtcgtctccgcatgtgcagtgaaacataggcaaatcaagaaacaattatttgttttttttgtggaagtgtgtggcacacgttggaaatcaggaagaccagagtttcattctctgcttccgttacttcatgtcttagtgacctgtaacctctgtgccaaagattcacttataaaattggaggaaaatgtttgctttttagagttaagattaagagaaatcgagttgaaatagaaaaatctggaagg

SEQ ID NO: 2077 - DNA, 6000 bp, Homo sapiens
tgatgcattgctattaatgggctatttttcaataagagaaaatgagtagggggttgtaggcccagtgacccatttctgagcaagcaaatgatagaactttcctggcatggatgagaggtttttattcaaatccagtgggacctctgaaggaaaagcacactccagaatgaatcctgatggatacgttttattaagcatttccaggaattacagactaggaatgtaggtagggagagagcataattgaataaacatggaaactcaaaattctctgaggcacccttgaggatccaatgtcaccatctgaagatgtgttctttcagaagtgaaaagattgcatatgtgtgtattgtgttctatgtaagacatagaaaaggaaaccaattctgaccggtcaccctacagaaaactcgatgatttacaaaactgtgcttcattgttcactggccttagggcaagtcctttactttggcctcttctgccagggaagccatggtgtggtggcctggggtcctcgcaaggccctggctctaggcaccgctctgccagcgctagcactttggttccaaccatttgggatcttattctcatcttttaataagcagtttagtcatttcccagcctgactgctgttatttaattaacacaccatcagtatgagtgcttttacaacattatctctaaaccgcttcaatttgaacactgaacaaagtatagtgttattatttctggattagccaggacataattataaagcaacatgttgctatcactttatgatttctattcctcatatgggcatactttctttaaatctttttcagaacgaattgtttaaccaggcttgattgtccttcacgatgataaacatgaagttattggtcagcgttgtctttacctctactttcatatatttcatacacatgatgcaattactcaggagatcttctttttgcaagatttttccaaaccccatttatattactctatcactcaaggtaacaactaatcttaggcataatatatcactgcctgcctctgaggggatccagaagttttggcaaacgcaattgaacagacatacaaacagccagagaaagccagagttatatgtattttggaaggcaacggtcccagaggaaacaacaaaaatatctgctcagtaatgcaaagtgctccctccactctgctgtaactcgaaaagaatttctcccctatataaaaataattatgtattaagtttggattttctggaacttgaagctcctctagcaataactattaaaacgttattttacatgtttctatcgctattttttagacgtgtcattcctagccataagtacatatggaggctttgataagggtgtgtcactgctgcaagcaccaaggctgtagtcaccggaaccatcatgagagtcttagctacaggctgggaaatcaagaccagagaggggcagaaatttctccacagcgaagtgtattcagacctcataatgaaccacttgactggggaccatcaaaaggaccatcagactggtgtgcagtttgctcagaaagacaaaagtaaaggcaaggagactgaaatagagtctgcatgaagggacttccacactcaaacaaataaattatcatttgcaggcaaatggactaaggccagttgagtcctaactatcagaaaatggagagcaagaatgaaaaggaagccaaggttactaagggcttcataggtattaataacctctaggtcagcccattaacaggtctgtgcagagacggaatcttgaatgagaatatttaatgattaaaatgtaccctataggcaaacattcccttccactcagagaacaagaaggaatgtgaaaagtctgatttctgtgggaaagcactttggttccaaccatttgggatctgattgacatctttaaatgagcagtttagtcctttgcaggcctccctccagttgcacacaggagcatattgcacatgggatgcatcccgtctgctccacacggagggagtttccactgagcacaacacagggtgtggagtagaatgaagccttgggtgtgtgtgcattgtgagataaaatgacgataggggcttgtttcttggcatggcccagcatcaatctctgtaggcagggcaggctctatttacccatgggctgatttgttccacactaaccccaagccacagaggtcacaccatcaactgagactccctcaatgtgtcatcacagccagtgtagggcagcccctctcaggctggcaccaaaaccagaaatgactaaatataacgcactttttatcctgtagcttaacatctcctttacgcaagtaaaatttttacaaggggcctactgagcaccatatatgtgtctgcatattttagattctatggaggtgaccaaaaacattggtatgttctgtcttcctgggaagacattcttcttcaagggaagaatgaaacataaaacacagttctcagggcaaaagtcttgctcatgcttcattaggacttttggccttggatgagaccaggattgaggtgagggttgacccccaccttgacccccacactccctctcccccaacctcccacaccacacaaagtacagaaaaagaagtttttctggttgtagagccattgaagtaacaaatattgtataaaggaggaatttcttctcttttacccacaagaaacctaaggcctaaaccaaaaaaataaatgactcattgaaagatgggaaaatagaatctaggtctcctggctcccagcttcatccagtagctccccaaatgggttttcaaatccagggtgcatcctcagaggtggcacaattttttcactaaggcaggggtccccagagttgttatgagatgttaggacaaataaataaaagaaaaagggaaaacgatcaggttctgtagtcaactaagatgagaagaacctggatgaaacagagatttttcccctataaatttcttagcccatttgatgtgtgaatgtgaattgtcagtctctaaaggggggattattggacccggaactctacctatgtatctatgtatgtgtgtgtatctatgtgtgtatacgtgtgtatgtatgtatgtatgtatgtatgtatgtatctatctatctatctatctatctatctatctatctatctgtctgtctgtctgtcatggaacatcttccagaccagcatttcacaggtccactgcagaacttcaggcccttgtccttggtatgacatgcaaaatgtgtgctgggcactgcacctgtgtaccaagatgactactggtggctgagtttaaacgtagagaccatgctacccactcattgacttctcagtgacatgaagtttcctaaagcagatgaaggcctcttcacacatgtctgccccttactccaggcttattaccttctgtggataaagagtgagtttgaaagaaatcagtggacacattaaaaaatatccagtaatactgcagctgttctaatccactcctaccaacagttttgaagagatgttgatagcgaatcaagctttataaccatgtgatcccatcttatggtttcaatccatgcacaggaggaaaattgtgggcacgaagtttccaaagggaaaatttatagattggtagttaatgaaatacagttttcctccttggcaaatttaatttactagcttcactgtataggaaaaagcaggaaaaaaattaaaaccaactcacctccaaacctgttttgagcttttacttgtctgcccaattgatagtttctactctctgcttttgatgaaaatattttttattattttaatgtaacttctgaaaactaaattatctagaagcaaataaaaagatattgcttttatagttcccagaaggaaaaaacaaacactaggaaagttctatctatcagatgggggagatgtgatggaggcagtgatatttgagctgagccttgaacaatgaacaggagtctaccaagcgagaggctagcgggtggccctccaagataaaacaacagcatgtacaaaggcatggagacatacacatcttgacttttccaggaatggtgggaacgctggtggagctagaatgtaggtacatagcataaagtggcagacgggaagcctttggaaatcttattacataggaccctggatgccattccaatgactttgaattttctgtaggctgccagcgaaatttccaagcgtgatagagtcatgtctatctatgcacttcagaaagacaacctcagggttaatgaagaaaatgcattggaatataagaaactggtgaccagagtgatcaattgcatgactgttgtgaaagtccaggtgaggggagctgtgggcaaggtcagagttgagaggcatttcagagataaaatgacagtaactaagtagatgtcagactgagaagaaagggctgtaccagatatatggtgctatcattaagtgagctcaacattgcagaaaaggggtaggtttggtgggagttgctcacaaaacatgtttagtctaagcaaaaccattgccatgggctcagataaaagttaagaagtggaaaccattcctacattcctataggagctgctatctggaaggcctagtatacacgtggcttttcagctgtgattttgtttgattttagggattattctttttctgaatctgagcaatgttagcgtgtaaaatactcacgcccacagctttgactgggtgagaagttatcataaatcatattgagtttgttgtgataccttcagcttcaacaagtgatgagtcaggtcaactccatgtgaaagttccttgctaagcatgcagatattctgaaaggtttcctggtacactggctcatggcacagataggagaaattgaggaaggtaagtctttgaccccacctgataacacctagtttgagtcaacctggttaagtacaaatatgagaaggcttctcattcaggtccatgcttgcctactcctctgtccactgctttcgtgaagacaagatgaagttcacagtgagtagatttttccttttgaatttaccaccaaatgattggagactgtcaatattctgagatttaggaggtctgcttcttatggccccatcatggaaaatttgttttaaaaaaattctctcttcaaacacatggacacagagaggggaacaacacacactaggtcctgttggggggtggagagtgaggggagggaacttagaggacaggtcaataggggcagcaaaccaccatggcacacatatacctatgtaacaaacctgcacgttctgcacatgtatcccttttttttagaagaagaaataatgaaaaaaaatcttttttctatttatataatcatggcatttataagcatctctatagagaaggataattgtgctgagattagacagctgtctgagcacctcacactgacctatttttaacaaaatgactttccgcatcacctgattccggtctccatgcagggtaagcagttcctaagccctagaaagtgccgatcatccctcattcttgaattcctccttttatttaccaaaattcctgagcatgttcaggaaagatgaaaagcttattatcaaaataagtggctgagatagacttcttgtcacatttgttacagtaaaatgggtctccaagaaagaaagatttgccttgggctctagcatggccatttatttaagaaagcatctgaaacatgaagctaccacagcatctctcctgtggttccagacagaagcctgagagtctaggaggaggtggaccgagaaaccctgccaaagtaactagtagtgccgggtttctcacaacacgatgcaaaggggctagaatcagatgactattttcatgtttcaacatactacacactggaaaacgttacggcagactctactttataatggggctgcaaatgtaaaatgactacctagaactaggtcctcttaatagcagcaaagttt

SEQ ID NO: 2078 - DNA, 6000 bp, Homo sapiens
ttccttgattcttcatattttctttctcctatctctcttttgcttctgttaatcatcactaccctatttccatcaacatcattaagtgtacttgcctgagtatttctgggtgcttgatttaggactttcccaggggcactcctgctggggcaatctttccagtctccagaagggtatggctgtgtggttgagactgctgaggaaagtagcaaagataggaggacagaattgaatgcaaagctatcctgcctccaagcacgcttaatggaatggcttcacagcagctgcgctcaatcctgtgggtactgctactgcatcctgtcgtctaggaagttcacaaactatataatgtctttcacgtggtagccacctggtggccctgagtcccagagactctgacctagcaccttgactaggacatggagctgcttggaccactagtggaacaccaacctccacacttcaatactgggctttagagccattctgtgaaatctcctctggaaaggaaagatttgagcttcaatttcaacttcaatgtgcattccaaacgtaggcctgagagctgggggatggcagatgttaagcagaaggtcagaccaatctttggacaacactggcaacgaaaatcacgcaggtagctgagaacaaagcaaatgcctcttatctcttcttacctcgcccattatgctggtgatgaaaactgtaaaaatgagcccagcataaggtttcctactttttcctttggcaagagataaggaacacactaatagctaaggccccagagggagctgatatttagacaatagatttctttttctaaatcccttaacacattaaaatctcctcactctccctaaacacagttctccagagtccttaataaaacttccctctttctttctcatacacagatgacatctctcctttgccctccctctgcaccaggtgccccatcctgttttccctctgagcctggctgtctgctgctgtcacccaggaaggtcctgcagccacctgaaccagcccagttactgctccctggggcttgactgtgggaattgtaattccttcaatgctgggcccatggctgtgcttcctcccaaagaatgtctgggctgttcaatccccagtatcttgggtaactgctgatctaaaacagcaagctcagctggcctgaattattcagggaaggctctggtgctcatagctccacaatcacttccacaaatgaatcaggaaggaaggggaggctgatcacagtgaagaagagggctctttaaacataccctctataataagcatgtaggagaaaggaaagggaaaactgacagggcggtttaccggctctcagtagagcataacatagttctcttgtttgcacagggaggagaggctgtgattggcttctcacagaagagattatactgagctcaaggccagctgcagcaagtgtgtgcaaaggcagtccaggcagactcttagtgggaaggccacataatcatcaggctccacgtgcagagaaacaggagctgcagtggccacgcgagacagatgcagtgtctgtaggtgaaggcgcatacctgagtctccacacagcttcaaggggctacagttggaatttcactcggctcagagagtgaggtgttccaatacaaaatgtcacaccaccctttaggaaaaatgattgctttgctctaaatcgcgttctgtcaatttttttcttatttctttcacaccacagctgagaaacaacttcatacctcctgattcacctatgaaaatatttcccataggaagaggtatgcacgtgcatgtacatgcatatgctcaagcaaagaagctgatatgaaaatgataacataaagatagtggtaaggaactaagacaagggaaaggtgtgtccactgagggagttttcctttaaataataggtagttttgttgatgtcaaatattatgctaagtatgcaaataaattcttgcatttagtactcacatcaacccaatgagttaagcattatccttattgaaaatgtggaaaccgaggcagtatagcagagaagccagcacataagcctcagaaccagcttgttctgctttcaaaatcaagctctgccctttattggctgtgtaattctgggtaagttactaaattcactcagtcttgattcttctcttataaaaggggatgggatctatctcataagattattgtgaggattaaatgagatatataaaatacaaaagatagagcatcaacaatttaggatattaggtttcctctatgactaaacgtttaaaaatcatttcaattcagtttaccaaaaaaatgatctttaagttaaaaaaaaaaaaaaaaacacccagcccctgatgacctgtttgacttgaatgaattggagggttataaaaccacagatatggaccagcttttgaaaatcttggagggagaattaatgattttcaagcattagaatgtactttgatttggatactctttagtttgtaagatggcaagttatctctttttttctttttttttttttttttttttttttgagacggagtctcgctctgtcgcccaggctggagtgcagtggcgggatctcggctcactgcaagctccgcctcccgggttcacgccattctcctgcctcagcctcccaagtagctgggactacaggcgcccgccactacgcccggctaattttttttgtatttttagtagagacggggtttcaccgttttagccgggatggtctcgatctcctgacctcgtgatccgcccgcctcggcctcccaaagtgctgggattacaggcgtgagccaccgcgcccggccatctctttttttcttttttttttttttttgagacagagtcttgttctgtcatccaggctggagtgcagtggcacaatcttggctcactgcaacctctgcctcccaggttcaagtgattctcgtgcctcagcctcccaagtagctgggactacagacgcacgccaccatgtctggctaattttttgtatgtttagtagaaatggggggttttaccatgttgcccaggctggtctcgaactcctgagctcaagcaatccacccacctcagcctcccaaagtgatggtattacaggtgtgagccaccatgcctggcctgcaagttacctcttgatttaaaatattttccaatcatgaaggaaattgacttgattctgctacttccctccacctctgactttgggggtaggggacagataagcagaaactgctgaacatgaccctcagccggctgggcagccatccctcagccacagtgagcttgatttgcgtgttccagtaggaagcaaggagtcaggtccttctctagtcctggggaacaggagaagggtgggggaacccctgattcctccccttctgtagccaaagcagactagtttagggaggagacagggaaaccaccagagcaggtcaagatcaacctgaaggaagtgggagtcagggacaacctactaaaggaagtgcatgtgtgccttgtacatgcatggggtggaccaaggaaaagatttaccctaaaagaacaaagtatgctccgacaaatctattgaaaggaatgatttacactggtgcttcctgcccaaatgttgagaccaatggcctggtgcttccttcttgaaactaggttgctctacttacatgaaacaaactgggcagaggtcaaccgtgagagcctgagcctccccaagtaaacagcaaaagattccccaggcccaacagcccccacccccaccttcaaggaaagtggatctacccggagcacgtaggccagaggaggcaggagaagagggtcagtccgtgagctccgggtacctggagaacatgaatctcccgggtgtactgtccccatgagggtcaccgaggaacctatggatcttccactcttcgcccagaatgtcttccctctatcccctccacctccccaaattccagcaccaggggccacctcagagccacaaatcctgaaaggaccacccaggtgactcgggcccacacacccctctttcggggtacacttggtggcaggctagcaggcttttggcctcagctggtggtgccatataaccagattcgtcacagagacccattttttatcagtcccaggccagaagtacgaagactgatcttaacgatgtggcctgcctgggaggtaaggcggcaggcgttgccagaattgatgggaactgtggcacaggtgggaaacctggtttaacaaattcttcattgattcaggggaccactttccttgagccaagtcttggcaagcggccggcgaaactcacaggtccctttcctggctgcgtccccagcctccagccttccccgccccagagatgccccaggagcggcccctcggtgtaggtaacgggtgcccgggcggctccgctccgccgcctagagcctggaagccgccactgcggcccaggacaatccggctacgcggccggcgccgaccccgcacgctggagtccgctgccgcacggcgctggcagtcgggggtggtgtctgaagtcaggcgcttcctgccttttcgtcggcccgggtgcccggctcgcgccgccaggctctgggatcccaggtcgccccgcccagcagcccgcgccctgctcggtgcgctcagcgtccccgccccttaccccaaacccccaccctctgtgccctcaggggggcacccccatcggggcgggaggggggggtcagctgtgccccggtcgccgagtggcgaggaggtgacggtagccgccttcctatttccgcccggcgggcagcgctgcggggcgagtgccagcagagaggcgctcggtcctccctccgccctcccgcgccgggggcaggccctgcctagtctgcgtctttttcccccgcaccgcggcgccgctccgccactcgggcaccgcaggtagggcaggaggctggagagcctgctgcccgcccgcccgtaaaatggtcccctcggctggacagctcgccctgttcgctctgggtacgtacgccggctgcggcgccccctgcgccgcgcgacaccctgcttcccccggtccccgccgagttcccctttccgggggtttctgcgcccgcctgggagagtggagagaagcgagtagtctcaatgggttggcgcctgggaggcaaggggagtcattaagaatgacaaagaggggactgtccggtcgagcgccgaggcttccccgggaaagtggctgcctgggccgtgcgtgagaacacctgggaaggggaagcggagtgtgaacgggcttgaactttaatccgccgcagctgtgtgtctgctcagacacatgcctacacctacctgcttacctggctgcctccaagcccggctcagccggcgtcgctggcgtgtagactgggccgcctcggaacgggggccggcgtctaaccctctggccgggtcttgcctgcgcccctttggcaccccctgcccacctctaagccccagcgacgagcagagatgttcaagatcggcagaggcgccctcgatctcttttcagagctcttgagctttgggggtaggttttggatttttgggcggattaatggttcctttaattaacttccctgggagaagtggtttcggtgtccgccgagggcaggagcgaaaccctagaccgagtgttgccagtttcctttgagtatgtccttggaaatgaaggagggatgggaaaggtgaggggaagttaaacccctctcccgggtcgggtctgcggagcggtgcgttttttggcggtgaagttcaagggtctgtctggacgcggtgagggcgcagcgccgcgcgcctcctggccaattcttgccccttgtgctggtgggtctctctggtgttgagatagctgatcaatagcgcaggtgtcctggttattgctagtcttccgtgaagtgaattgttcgttcgatatgccccgagtttaacccgtatagcatgcgg

SEQ ID NO: 2079 - DNA, 6000 bp, Homo sapiens
acatttcttaaagacgcttaaaaagatgaaattttcaaaaacagctctttcaaagcactactaccaataatctcagaatctgccgtatgcctgcccactcctcgtgtcctgcctgcccactccttaccccctctccaccagagcaatctggtcctggatgaagaaaccgttgctgagttccccgcaggcctctggaggttcagcggggacaaggtgaatctgctcataccttgtgtgctgaaaaacatttaacatttggacaggtgagagtgtaatgagacacacctgctttaggactgggctgacaatcccatcttattggcaccttataaagtgtgaaggaaacatggagtggtttctgtatcgccagacacttaaacatttttacttaattctcgcaaaggcctatctggttgtcctacaccaccctacccttctatgagataggcaggggacttggttgtagatccagagagaggaagtgatgtgccttaagtcacatagttcacaggtagagctggcagaggaagctggtgctcttggcttttcacttcatgtcccctaaaaagacaacttgtccctccatggtgcctaggtttatattatactcaggggagtagctggaagagcttcctttctgtgctgcagctcatggaaggcagagctgattctgctcccttccctgtcccagcactcaggtgggatgagagggtcactgcagctcagtgaggggaagggggaggttgaggatcagagatcaggggcctcccttaacttacaaagataccaccaaagtccttggcaggtgtggctgtgaagatgtatcgaatgtccccaggactcagcacttgaaagtacaaataatcatggatacggaagcctgaaggataaagagtacaggtaagaagcctcccaggaacaagctggttcaggttcagatcccagaccctgtgtcttcagctgggctggctatagtctgggctcagggtcctggcttcagccaacggggtccactagtggcagggttgggggctagatggcctctgtcctggggaggatagagttgatgcagagtcattaaccccagaggcttatatcagctgctgctgctgcttacgcagtaagccaggaaaactgagagctccagggttagtatttttgctctgaagacctgggagtttcagggtagagatgtagtggcctgcgtacaaagcaattctcactaaaatttaaaagttgactttctggtcccactgccatccccttaagtctagtcactatcatctcttgtcctgacagctcagcttcttacctggcctccctgcctccattcttgctccccaagcaacaaccagaaatcgaaaacatcttagcaattatgagcacatcaccatacctagggtttcaataactgccctttgcatttaaaatttaaactctttttaaactgtggcctacaagaccctgtttgctgtggcccctggccactcttccaacctcatctcctccatcctgtgttcaagctacactggcctttcagtgtcttcacttctctgggtctttctgcaggctgttccctgagcctggaaggccccctactcccacgccaccctacttccacccctttacctgactctttcctagtcatccttcaggtcacaccttaaatgtcacttcctcagagaaagcttctgcctcatgattgccctcccatacccattcaaatgtactttttaataaatggggactttcaacataatttgtaattatacagctttcataacttttctttttttctttttttgagacggagtctcgctctgtcacccaggctggagtgcagtgttgcgatctaggctcgctgcaagctccgcctcccgggttcacgccattctcctgcctcagcctccggagtagctgggactacaggcgcccgccaccacgcccggagaattttttgtatttttagtagagacggggtttcaccgtgttagccaggatggtctctatctcctgacctcgtgatccacccgcctgggccttccaaagtgctgggattacaggcgtgagccaccgcgcccggcctctttttcttttttttgagacagggtctcactttatcacccaggctggagtgcagtggcgccatctcgcctcacagcaacctccacctcccaggctcaagcgattctcatgcctcagcctcccaaatagctgggactacaggcgtgcgccaccatgcctggctaatttttttttgtattttttagtagagagggtttcgccatgttgaccaggctgatttttttttttcattttttaaataggaatggggtctcgccttgttgccagggcttgtgatcctcccaccttggcttaccaaagtcctgggattacaggcgtgagccaccgcacctgccctggattcataatttttaaatatctgcctcttccactttgtaacttcattcagtgaagagtcaccagtgtcttgcacagtggctacaatatagggatagccctataaactttcctgaatgggtgaacaactatatctagctccacagcaccgatgaagagaatttccagaccactagatttttctggggcatgggatcttctcctcagcaccaaagtttaatgttgtacctggacttgagtccctggtttccttaacccagagagactgcggaatgttgaaagataaaaactgctgtcatgggcgggcgcggtggctcacgcctgtaatcccagcactttgggaggccgaggcgggcagatcacgaggtcaggagatcgagaccatcctggctaacacggtgaaacccccgtctctactaaaaatacaaaaaaattagccgggcgtggtggtgggcgcctgtagtcccagctacttgggaggctgaggcaggagaatggcgtgaacccgggaggcggagcttgcagtgagccgagatcgggccactgcactgcaacctgggcgacagagcaagactccgtctcaaaaaaaaaaaaaagaaaaaaagaaaactgctgtcacaagtctgttagtctatcaacaaactaccaagtcactactgtgtaccaaggatggcattaaggctttagctgtctttgtttactgcccaaatcacagccatcagttagagctcccatggcttggcactgggctatacagtcctgggagtggggactccctctcggatacaaatacacccccagaaagccttcctggactagcgtcaaactcactccctcctccccaacccttgcttgcctttgtgtgtgcttatttgtgtaagttgtgggtatacgtatgtgctcacttatgtgcatagatgtatacatttatgtgcttgtgtaggtgtaaacggtttgtgcgtgtgtgcccacgtgtaggaatgtgtgctcctgtgtacatgtgaatgctcacatacatatctccagcctgtagtatccttccttagctgtcccttctggtcgcaccctaagtcacctgggtcggcgctagtgggcggggaggggcgagtggggagatctgctttgtcgtgggaaggtgaggagtcagagcttcagcctcaggctgcgcccactttatgtccttggaccaccacccacttattccggccgcccgctcccagacctgtcctgctctgaactcgcagggtccccaaggtgacccttggcccccaacccgagacgcgcgcaagctggacggccagccccgccctgcaacgcagtcccacccgttgccgctcaccgtgggccgcgacgcacgcggggagccagagcacgagacaacaccagcccgcggcgccggggaccatctccagggccgggcccggcccggcgccgcgtttcctctcgccgccccgccgcgcgtcgctcgcaggacttcagcctgacagctgctccggcctcccgcccacatacccgctctcgccgcgggctggacgacgggaacgaggctcaaggctgattggctctgacgcctgctcatgtagccacactttccgcctctgcgccttagcctacttcctattggtcgagagaagtggagccgggggctgattggcttaaactcttaacagctacaaccggccttcgcctcagccccgccccagcatactctccgggtcctcgctggcggtgggcgggccagggaggacaagcactggaggtgtgcccgtagccggacttgcttcagctgtcgatagtcgaggccgttaacccttgcggtctcggtcctgtccactccaaggccgcctcgattgacgacgattagccttctcccagctgcgcttccctcctcccagctgcgcttccctcctccccacgccttcacgggaaggcactcgtcttgcgccagggggtcttccgcccagtgccaccaacgcttgcgcgctcaccgtggataggcgctggggccgcggcctggcgcacgccatccacgaggagcctctggccagtgcaaagccagaaaacgggcattgggggcagcttcccacgctcgtcccgttgacactgactatgtaactgtgacactggacaccttgacctctcagcctcctttctgtcatcagtaaaatggccttaataggaccaacgcaatagggttgtgaggattaaatgagatcgctcacgtaaagtgctttggcaccagcctatcccacactttgcgtcccacacttttgcctttattgcattccttggtctggcgtccggggatggaggagggtggaattaagttagtaggtgatgcgggccgagcaaagaccctccgtgctctaagaagcacgaccgaaatgcggcgacccctctttaatgaacgcccctcactagagagtccccgaagcccagcctcaggtccttctagccgcaccgagtcggtggtaacgaaccatagagtagcggaagtggtccgttctcttcctctcccggcccaagcttctgggtatttctattgcgcgaggcattgtgggttgctgggcggcccggtctcggagaagaggggagagtggcgggccgctgaataagcttccaaaatgatggtgagtggcgtctcgcgcatccgtcgccatcagctgccatctggccggtggccggcgccgctcggcctgggcttgctctgtaggaccctcttttgcttgccgcctctgtcctcgcccagatccccagcttaggggcgaccccagccagccgcggcctggctcggcccgagcacggcgctggagccgttggcgagggctgcgtggggctttagaggagtctctgggctggccggttggggactacaagtcccagggtgcttcgggcccgcgaacccacgtcggggacctcttttttagccccgcatgatcgggacttgcgtgaaacgagtgcaggtcggccgtggttacgcggtcggcagctagacttggaagctggggctgctctgagatttgcgggctgtaaagacgtgtgcttcttggaaccggcacaggcacattggggacctcatattgtgcccgcctagggactcactatgttcactcgctgaccctcaccgcagcgtgcagagaagcagacgccttccctagtacttttaattcattcactcattcgctcagtcattaaataaacgcgtctttagtgcctactgaatgtaccaggccctggtggttgctgggggttgcagcctctcagccaggagaacgggaaaggtagatggagacactgtatcggaggtgggaagacccaggctcggactctggtgacataagaaaggcttttctagttggctacctaactctgggtctcgttttcttgaaatttggggcgagggagttgctgtgagtcctggagccacctaaagtgctccttgtagccctacttcccacacttcttttctctgtctctcggagctttagatactttccgtgggtcccaagcctcgatggtatctcctgggttgttattgagtagggccagcttccgaggtggtgtttgaccctgactgag

SEQ ID NO: 2080 - DNA, 6000 bp, Homo sapiens
cagctagacttggaagctggggctgctctgagatttgcgggctgtaaagacgtgtgcttcttggaaccggcacaggcacattggggacctcatattgtgcccgcctagggactcactatgttcactcgctgaccctcaccgcagcgtgcagagaagcagacgccttccctagtacttttaattcattcactcattcgctcagtcattaaataaacgcgtctttagtgcctactgaatgtaccaggccctggtggttgctgggggttgcagcctctcagccaggagaacgggaaaggtagatggagacactgtatcggaggtgggaagacccaggctcggactctggtgacataagaaaggcttttctagttggctacctaactctgggtctcgttttcttgaaatttggggcgagggagttgctgtgagtcctggagccacctaaagtgctccttgtagccctacttcccacacttcttttctctgtctctcggagctttagatactttccgtgggtcccaagcctcgatggtatctcctgggttgttattgagtagggccagcttccgaggtggtgtttgaccctgactgagatactgctttctgtgcacttggcagttcacttattcattttggcctgtccgactctatcttctgctcttttcctgcttcctgcagcttttctctgtcctgttagggacgcagacaccttttaggtgttctaccaaatgccctatgaatcccgcttgtacccaaggtagaaggaaattagcatttaacagtacttcctctcccctttatgtctctagcattgctcattcttgaagtcgtcttcatcttctgtgcagaggcagcatagtacagcagttgagagtaaggcctctggagctacactgaatgcctaggtttgtaacttagctctgccacttactagctgtgtgactttgagcatgttatttaatttctggttctcagtttgtcagtgtgcctagcagatagtaagcactcagcaatgttagctcttactcggcgaggtggttgtttgcttcctttcatctctgaaatcagtccatcccgctgccagggcttccgtaagagctttggttcacattcacacagctagggatcagaaccgccattctctgccgtgataaaacttcaccagtgggctctagatcatcacacttggattttccctgaactgacccctcctctgtcagattgacgtttccctgctgtattggctcttgatatctcctccccatttttggaatgtgaaacttctatctccaagagtcttcctgtcttcaaattggcccctgatattctagaatacttctgtaatcgaaagagaggtgaaaaggtcccctgaaacctcagtcctgtgatgttggtacagcttgcataaaatgtatgtccttgcctttgtggcgttgagcgctgtgtgccttggcatagacacacttgttttgtaagccattaagcttaatgatgcttagtgaaagttttaaagtaggatgaagaggaagatcagtaagctgaaattccaaaaccttccattatacctgtggccaattactggagtctgctcttgtttctttttcttttttttttttcccgagatggagtcttgctctgttgcccaggctggagtgcagtggcaccatcttggctcactgcaacctccattcccaggttcaagcaattctcctgcctcagcctcccaagtagctgggattacaggcatacgccaccacgcctggctaatttttgtatttttagtagagacggggtttcaccgtgttgaccaggctggtctcgaacacctgaccttgtgattcacccaccttggactcccaaagtgctgggattacaggcgtgagccaccgcacccgaccttgtttcttatttattagaggaataaaaaaaaggagcgaggttgaaagtaactaagggatggaaactggactttgcatacagtgcctgctgctggggaactgttagaagaggacctatcctgcttgtcttggcttgactcaatccagctctgccaccttttccaccccatagatgctctctacccagcctgctgtttcttcagggcctgcaaagcatagggaacctggggaatctgtggttagctgcttccaagctcttcttgcattgtgcttaagaactctcagtaaatgtagtgttactgtagtgccagtgcttttctccccaaaagtcaagaagccagtgctgtcaagcacttacaagtagcagttggattttcagccccaaaagctgctgaatattgcttcatgtgtggccaaatcttggcactcttcaaattaaggttattttggtccttgtctttggaaagcttgtacttaagctggatggtgataaaaagttgcgagcaagggcaagtgaagagaaagttatgggattcccctattcagatgcccttgtttattactgtagagaaaacttcttggaagaattggagctctgaggaattggtggcctggtggtgagaaagtggttttggtagaagatggcagagtgactattttagatgggggtacactttgcaggttgaggtgagaaaaagtatacacaagcattgggtaagttaacctgttgaggtgaaagaacctgttgaaggtgataggaagtgattgagactcatgttagtttttgatttaaagtgtaagactccatccgtggcaggggtggaccagagaagacttggggctgccataaggaatgatttagcaagactgggagatggtagggcctttcaggacacacatctttcccttacagaaggtgccagggactgggccagctgaagagccagaaagaatgctgggagtatagagaagccatttcttgccaccagacctgggacactccagcaaaaggaaggaattttcccttcagttgacgcctgatcccaaatgtaggggtttacatgacaagcattctttttaaaataaaaaataaaaggagtaatgtatgattatttgacaagcatttaaaaaaatttaatgagggcctggcatggtgcctcatgcctgtaatcctagcacttcagaaggctgaggcaggagggttgttagaggccaggagttggagaccagcctgggcaacattttttaaatacaaatttaaaaaattagccaggtgtggtacctcatgcattgcggtccagctactcaggaggcttgagcttatagtaagctatgatctcaccactgcactccagcatgggtggtggagcaagaccctgtctcttagaaatatatattaaaaaatgaataatatattaaattactcccactctcttattccgtagagtttattgggtatttttcgttttctttttgtagagacagggtcttgccatgttccccaggctggtcttgaactccatgagctcaagtgatcctcttttttctacagtggtttttgttttttatgtaaatcacagtatgccattcctctgctgaaagcttcccagggctttcctttttaggaatgaaatctgaactcctcaccatagtgtgtctacgagtgtgtatgtgatctggttcctgcctgcctcttcagctttattccagtcttcctcttgcttactaccctccagctgcgctggccaaaagagttgaactttttaaggaattgaccagttaataaggaatcagcctcatgagtggcaagactctgtctttggcaggaattcctcactcctcattgttaggttgggaaagctctgtgctttcctgtgccttccttgctcagacatccacgtacctctaaggactaggtgatggctttcaaactttttattgcattccacagtaagaaatacatttttaatcatagcctagtaacaaatttaacacaataaaagttttgaaatagtatttatccttactacattctgtgtcacacacaaaattagccagaaacacttgagaagactggatctagttcgtgggcttatctctgaaggctcagatttgaatgtggagagaaagtagtctggtttgctaagctgagaaattgctctctctgctaataatggtggtcactagagcaaagatatctgagcgggccctttaaaacaagcaagtatccctgtttctcagtttctaaagcaggtctgcaaatgaagcccttacggggatagggaatgttctggagaccaatgcaatatagaaagaggaaaacttctttggggtatctgattggaaattagtcacacagaagctttattcagccagcatgagagatggaaacattgctgtatgaattagatttgccatcatttttcaaaacagggcaaaggtgctgtttgtttctctgcctgttttcctacactgcagctgaacatcactgttacataaagctgactgcctaggcatctctaggacaacacctcaagctcttggcatcttgcattttgcatcagtgtcccatctgcttctctaagattgagctgtaacacagacaagtggatgttttgctgcggaatgaacacttagcagggtctgcctcttcctcctgtgttgtgacccaattcctcagcacagggagtaaggtcagaagttgaaaaggccatggtcattcagctgggtactggagaactcatgattttttcttttagattaggtcagtgcttctcaaaccattttcctgtctagcatacctgcagggtaggctaaatttgatagtgtctctggaggtagaggctggttggggaatggatgtggtagacagttgggggaatgtggtttaagaagacctctagataattctgttaagggagagatgggagcattttcccctttcccctgccagtctcattataatagatgattattaaaagcagttaatttctttcttttctagcccacaccagttatcctattgaaagaggggactgatagctcccaaggcatcccccagcttgtgagtaacatcagtgcctgccaggtgattgctgaggctgtaagaactaccctgggtccccgtggcatggacaagcttattgtagatggcagaggtaagtctacagagttcctcaggcctgtgtgcaggaaaggaggctcctgagggggtgtttgggactagcataggttggtatcagaaatcccactgcttttaagatcgttgaaagatgactcactctgaagcagttccaattcttatattgtcctgactgctgagcccgtgtgggactatatgagagaacctaggctcaggagcctgttgcctcatagggagacgtggcctagaaacatgaaatagaaccatctggagtttcctgtgttcacttccattgttatcaagatgagaaaattcctgtttatatcttggtatattaattgatgtgtgagggtatcaactgtggtaagaatatctaagtggttacttttatttaaaaaatcttttctgtatccagttgacctgtattaattgctcttcaaggaaaattgggagtctgtggtctgcaaaagcttgtgattttagaccctttgtgtacagagctaattctgtatagaaagatcagataggtatcctttcccttcagccctgccgtgatcccctctgccccatcccagtaaagtgtagatgggttctaggtcccacttgaagacagcatttaagaaaggggctttagatttttgtttgtttcttttaaggcaaagcaacaatttctaatgatggggccacaattctgaaacttcttgatgttgtccatcctgcagcaaagactttggtagacattgccaaatcccaagatgctgaggtaggaaaatagttgtgtgtttaaatggaggttgaaacacatgcttgcttgctccttagttctcctctattaaatttttttaagattttatataattataattgtacaagtaatacatgcttataaaagtatttagaattaacagccttttaaaattcatactatttcgttacatgtagcttttcatatccattaat

SEQ ID NO: 2081 - DNA, 6000 bp, Homo sapiens
agagcataaataatccagctccgtgtcaattgatttatagtcagatttcctggtgctgatttgcctcctgactacttttcccctgaatttaactccaatccagtacagatgtcttattttttaatctttctgatatatttcagatgtcataaagccagtttgtctaagggcattttaaacttagcacattcagtgactgttgcgagtggtggaggtttgtcaggctttgggactggccagcccctttgaacatctttcttatgttttggaacttttctgcattatggctcctcaccccctgagcccactttcccagattctcttgcagcgagggcatgggaatgtgatccaagctctgccaaccagctgtaaagtgccaatttggaaataaataccataagataggaggtgccatgcagaattccttttatcaagggtgctgagagacagatattcagctgtcaaaggtggctgtggcacctccaggctaaatagcatcccatgttcagtgtcaggagtgtgggcagagatgccagcccagtagccatagcaatagcatctcccctggcagagtttagtggtataactcgagcatcactcttggctcagttagcctctgagcctgatcctctggccctcctgaagagcctgcaagggacttaaatattcttcaataaactcattttctgtataaattagcttgaatgggttttgtttgcaactgtgacagataaagtggggtgttgtgtatctgtgtggcttccacttttctaactgctttccattttctttctttcccaatccctcaaatacatacattataattgaactataaaacatagggcacagtattaaatgtaataggatgcatagactcatgagtatttacatgcagggcaggtccaccctcagtcttaaaattttctacataataccatcgcttatgatatgctgcaaacttgataaatcctaattagaaaaaggaatatttggcagttggaggtcatttggcaaagtggtctcttcccaggatatagctccctggagcctgatggctaggctaaggtcagtcatatgtggaaccagcaccagcagtagccttgtgttaagatcaggaagctgcatttgcatctgtcagaccacccttggccaactctagcctgtggctctgtctcttcctccttcagaactccaccatgtataaagacagatacatatttggctcttaatgataggcttttctattctgtaatatttgtttcatgtgttcgtttatatctctgactaaacagttaatccctcaggtgcaagacccacattttgtgtttctttttgtatttcactttgaggagagtgtcctgaacactgtaagggtttactaatctttgctgattgatttccttcctagggctgtggaatataaattacatgaccatctgtctcttcaattttcaacatctctgtgtgtgcatgtgtgtacatgtgcacgtatgtataagagagatctgagattcaataaataataaacttgaggaatggagttcagaggcagaagaaccacagaaacaagtcagccttatgtgggtagcctcccctccgtttgttgtgtatcaattggggttaataacaattttttttttttgagacctgtctcgctctgtcccctaggctgaagtgcagtggcatgatctctgctcactgcaagctccgcctcccgggttcacgccattctccggcctcagcctcctgagtagctgtgactacaggcgcccaccaccatacccggctattttttctgtatttttagtagagatggggtttcaccgtgttagccaggatggtctcgatctcctgatctcatgatccgcccacctcggcctctcaaagtgctgggattacaggcatgagccactgtgcctggcctataacaatactgattccaaccacctcccaggattactgggaactttgtaagagataacatgtacttaaagttccttatgattattatccggttcacatgaaatgggaccacagaggggagtggagaagaggcattaaaactagtgtgtgaagaaagtatcatagctgacccaaccccactggctttggttctacctgcctggagacaatacattttgtagcaccaggctattgaatttccatccgattctaggcagcaggcatcctcctcttcattttccttcacccaccccagccaaatccatcagttccacctctgacttcacaatacctaaacccataaccttcctccctgccccactctcatcttggcttaggtcctagtcttaccttatagcttctgcctctttctgcctttggtctctgacctctttccctccccatccacatggagggcagttatggccctaaaaaagcaaacgcgattgtataatttcctgctttgagaatcttggggccaggtgtggtgcctcatgtctataatcccagcactttgggaagctgagatgggcgatcacttgaggttaggagtttgagaccagcctggccaacatgtcaaaaccctgtctctactaaaaatataaaaattagctggacatggtggtgagtgcctataatttcagctatttgggaggctgaggcaggagaatcgcttgaacccaggaggcggaggtggcagtgagccgagattgtgccactgcaccccagcctgggcgatagagcaagaccctatctaaaaaaaacaaaaaacaaacaacaaacaaacaaagaatctttgttaaatatctaagtctatatatttatggtgtctatatctgaagagggaagcccagttatgaggctgttccagtcaggtgagagataactgggcatatgatctagggtagacagagaaatgggaaaagatttgggaaataatatataaaactataaactctatgtgtgtgtgtattgttacacaacatgtgaacagtagtcatctctaagattcttctatgaattcattcaataaatgtttattgcatgtctgccatgcgtcaggcaccattttaggcactgcaaacttgaaggaatgacagacacagaccctgctgtcttttagcttatcatctattgaggagaggaagaacatagcgaaaataaataggaaatcaactagggccaagtgatagtgacttggggaactatttgagataaactggtcaaggaaagcctgatgaggtagaaggtggggacttgactctggaggtgggggctaagactcgggaccagactctagattagagttccagatttaacacctagaagtcactgcccctttccatggcaatgactcaacaacccgttaccaacctttttctagaaatttctgtataacctgccccttaatttgcatgttaactaaaagtgggtagaaatatgagtgcagagctgcctctgagctgctactctgggcacacggccttatggggtagccctgctctgcaaagaccagtgcctctgctcctgatgtacactgccacttcaatataagctgctgtctaatgccacctgcttgcccttgaatttttttttttttttgaaatggagtctctttctgttgcccaggctggagtgcagtggcgcgatctcggctcactgcaagctccgcctcccgggttcacgccattctcctgcctcagcctcccgagtagctgggactacaggagcccgccaccacgcctaattttttgtattttttttttttttagtagagatggggtttcaccgtgttagctaggatggtctcgatctcctgacctcgtgatccgtccacctcagcctcccaaagtgctgggattacaggtgtgagccaccgcgcccggcatcccttgaattctttactgggtgaagccaaaaatcttcccaggctaagtccaaattttggggcctgcctgccctgcatcatgaggaggtatctgagtggaacgtcaatgaggaggaagaatgagttggagacaggcctggagaagaatattctagatagaaggaaaaggaagagcaaagacccttgggtgagaaagagtttgtatttttgaggaaagcatgctagtgtgaatgccaagcagtattctgtgggaagatctcaggaggtgtctaagggcatggagataagtggtcagatgcacggtctgttttataggtggaattaactgcttgctgatggattgactggctgtgagggtgagtggcaagaaggaatcgaagacgagttagggtggatggcgatgccatttgctgagacaactgggaaagaaaaagatttgggaaaaaaagttgagttcagctttggacatgttaagtgtgatatgctagtcacttcagtggagatgacaaatggcaagctggagaaataagcctgcaactccaggagaggacctcgctgtagatttactatggtgagtcatcagcatgcatatgatataacagtcatggggctaggaagttagtttctcctcagggagtttgaaactgtaactagttcagagaagagggtggagggcagccccgaataccccagcatttaccaatagagcaaacagggactcaggagcctggggagtgaggttagccagaaaccctcagagtggagcactggtgctcttactgagagaggaaggtgtgtccagatggaggatgtgattaactgtcctcaacatccctgagagaaggagtaagacaagggcagggaagagaagagaatgcaagatttggcaacatgtaggtcattatgatgactatgacaaaagcagtttgagctcaattctgtgtggagtatagggaaggagggttgaggacgtgcatttagaagggtacatagttctcaagaagttttgctgagcacatctgtaatcccagctatttgggacgctgaagtgggaggactgcttgagcccaggagttcaagaccagcctgggcaacatatcgagtccctgctttaaaaaaaaaaaaaaggaagttttgctgagaggctagatggattatgatttttgtttatttttcctgtttatccatatattatttttcaacaatgagtattgattacttatataataattttaaggctgtacacattgcagacagcaccccactgtttgaaaaactcctcctcagtagaacatggcagaccttcatcttccttccctgaaccttttccaaccttaggcttgccattctccaccagtgctaatgtcatgtctcttgaaatctgtattgaagtcagtatttcattcttgccagtttccactgtgtgtttaaatttggagtctggtgtctagcattagctggggttggagcttccactcctctcagcattggtaagcctcctcacccaccccatcccatgtccaagatcacccagttacacacttaccatctacccagttcattcacatcatcagtcccagagctgcagagatgctctttttctacctcctacttctctggctcttagagaggcagcatgggataatggggcaagcgaatagggccttaaagtagagggacaagggttctcttccctatctgccacttattagctatgtgacctcgtgtaagtctcttttctttttgagacagggtctccctctgtcacctaggctggagtacagtggtatgatcatagctcactgcagcctcgaactcctgggctcaagctatccttccaccttagccttctgagcagcagggactacaggcacatgccaccatgtccggctgatttatttatttttatttgggaagatgggggtctcactatgtcgcccaggctggtcatgaactcctggtctcaagcaaccctccaaccttggactcccaaagtgctgggattacaggtgtgagccctggccttgcctcaatttcctcatctgtaaaacggggttagtgaaactcacatcctatcagtggttttgaggatgggccgactcttgtattgcctgctctagtacaatcagcagctaaggcggctcactttc

SEQ ID NO: 2082 - DNA, 6000 bp, Homo sapiens
aggaatggagttcagaggcagaagaaccacagaaacaagtcagccttatgtgggtagcctcccctccgtttgttgtgtatcaattggggttaataacaattttttttttttgagacctgtctcgctctgtcccctaggctgaagtgcagtggcatgatctctgctcactgcaagctccgcctcccgggttcacgccattctccggcctcagcctcctgagtagctgtgactacaggcgcccaccaccatacccggctattttttctgtatttttagtagagatggggtttcaccgtgttagccaggatggtctcgatctcctgatctcatgatccgcccacctcggcctctcaaagtgctgggattacaggcatgagccactgtgcctggcctataacaatactgattccaaccacctcccaggattactgggaactttgtaagagataacatgtacttaaagttccttatgattattatccggttcacatgaaatgggaccacagaggggagtggagaagaggcattaaaactagtgtgtgaagaaagtatcatagctgacccaaccccactggctttggttctacctgcctggagacaatacattttgtagcaccaggctattgaatttccatccgattctaggcagcaggcatcctcctcttcattttccttcacccaccccagccaaatccatcagttccacctctgacttcacaatacctaaacccataaccttcctccctgccccactctcatcttggcttaggtcctagtcttaccttatagcttctgcctctttctgcctttggtctctgacctctttccctccccatccacatggagggcagttatggccctaaaaaagcaaacgcgattgtataatttcctgctttgagaatcttggggccaggtgtggtgcctcatgtctataatcccagcactttgggaagctgagatgggcgatcacttgaggttaggagtttgagaccagcctggccaacatgtcaaaaccctgtctctactaaaaatataaaaattagctggacatggtggtgagtgcctataatttcagctatttgggaggctgaggcaggagaatcgcttgaacccaggaggcggaggtggcagtgagccgagattgtgccactgcaccccagcctgggcgatagagcaagaccctatctaaaaaaaacaaaaaacaaacaacaaacaaacaaagaatctttgttaaatatctaagtctatatatttatggtgtctatatctgaagagggaagcccagttatgaggctgttccagtcaggtgagagataactgggcatatgatctagggtagacagagaaatgggaaaagatttgggaaataatatataaaactataaactctatgtgtgtgtgtattgttacacaacatgtgaacagtagtcatctctaagattcttctatgaattcattcaataaatgtttattgcatgtctgccatgcgtcaggcaccattttaggcactgcaaacttgaaggaatgacagacacagaccctgctgtcttttagcttatcatctattgaggagaggaagaacatagcgaaaataaataggaaatcaactagggccaagtgatagtgacttggggaactatttgagataaactggtcaaggaaagcctgatgaggtagaaggtggggacttgactctggaggtgggggctaagactcgggaccagactctagattagagttccagatttaacacctagaagtcactgcccctttccatggcaatgactcaacaacccgttaccaacctttttctagaaatttctgtataacctgccccttaatttgcatgttaactaaaagtgggtagaaatatgagtgcagagctgcctctgagctgctactctgggcacacggccttatggggtagccctgctctgcaaagaccagtgcctctgctcctgatgtacactgccacttcaatataagctgctgtctaatgccacctgcttgcccttgaatttttttttttttttgaaatggagtctctttctgttgcccaggctggagtgcagtggcgcgatctcggctcactgcaagctccgcctcccgggttcacgccattctcctgcctcagcctcccgagtagctgggactacaggagcccgccaccacgcctaattttttgtattttttttttttttagtagagatggggtttcaccgtgttagctaggatggtctcgatctcctgacctcgtgatccgtccacctcagcctcccaaagtgctgggattacaggtgtgagccaccgcgcccggcatcccttgaattctttactgggtgaagccaaaaatcttcccaggctaagtccaaattttggggcctgcctgccctgcatcatgaggaggtatctgagtggaacgtcaatgaggaggaagaatgagttggagacaggcctggagaagaatattctagatagaaggaaaaggaagagcaaagacccttgggtgagaaagagtttgtatttttgaggaaagcatgctagtgtgaatgccaagcagtattctgtgggaagatctcaggaggtgtctaagggcatggagataagtggtcagatgcacggtctgttttataggtggaattaactgcttgctgatggattgactggctgtgagggtgagtggcaagaaggaatcgaagacgagttagggtggatggcgatgccatttgctgagacaactgggaaagaaaaagatttgggaaaaaaagttgagttcagctttggacatgttaagtgtgatatgctagtcacttcagtggagatgacaaatggcaagctggagaaataagcctgcaactccaggagaggacctcgctgtagatttactatggtgagtcatcagcatgcatatgatataacagtcatggggctaggaagttagtttctcctcagggagtttgaaactgtaactagttcagagaagagggtggagggcagccccgaataccccagcatttaccaatagagcaaacagggactcaggagcctggggagtgaggttagccagaaaccctcagagtggagcactggtgctcttactgagagaggaaggtgtgtccagatggaggatgtgattaactgtcctcaacatccctgagagaaggagtaagacaagggcagggaagagaagagaatgcaagatttggcaacatgtaggtcattatgatgactatgacaaaagcagtttgagctcaattctgtgtggagtatagggaaggagggttgaggacgtgcatttagaagggtacatagttctcaagaagttttgctgagcacatctgtaatcccagctatttgggacgctgaagtgggaggactgcttgagcccaggagttcaagaccagcctgggcaacatatcgagtccctgctttaaaaaaaaaaaaaaggaagttttgctgagaggctagatggattatgatttttgtttatttttcctgtttatccatatattatttttcaacaatgagtattgattacttatataataattttaaggctgtacacattgcagacagcaccccactgtttgaaaaactcctcctcagtagaacatggcagaccttcatcttccttccctgaaccttttccaaccttaggcttgccattctccaccagtgctaatgtcatgtctcttgaaatctgtattgaagtcagtatttcattcttgccagtttccactgtgtgtttaaatttggagtctggtgtctagcattagctggggttggagcttccactcctctcagcattggtaagcctcctcacccaccccatcccatgtccaagatcacccagttacacacttaccatctacccagttcattcacatcatcagtcccagagctgcagagatgctctttttctacctcctacttctctggctcttagagaggcagcatgggataatggggcaagcgaatagggccttaaagtagagggacaagggttctcttccctatctgccacttattagctatgtgacctcgtgtaagtctcttttctttttgagacagggtctccctctgtcacctaggctggagtacagtggtatgatcatagctcactgcagcctcgaactcctgggctcaagctatccttccaccttagccttctgagcagcagggactacaggcacatgccaccatgtccggctgatttatttatttttatttgggaagatgggggtctcactatgtcgcccaggctggtcatgaactcctggtctcaagcaaccctccaaccttggactcccaaagtgctgggattacaggtgtgagccctggccttgcctcaatttcctcatctgtaaaacggggttagtgaaactcacatcctatcagtggttttgaggatgggccgactcttgtattgcctgctctagtacaatcagcagctaaggcggctcactttccggccgtgctacaataggtaagaactaggatgctttagacgtgtgactgggcagtgggagcccctcacatgatcccgagatgccagacagtgtctctccgcacagggcgtgtgctggtccagaggcccgtttttccagtcgccccacaccccgggtccgcgatcacgctccccccacccatagccgagcctgacgcggcggtggctcatgcgcctttccgtcccagcctttagccacggaccacacgtcccatctcaggcgccccgcccctcccccgccccccgcccccggcgcgcctccccaggctgccggctccggtgtctgagcggccgcgcccgcgagccgtgagcgatgattggctgcgccacggcggcgggcggtccgtgggcgcacacaccctccccgcgcagccaatgggcgtgcgcacgtcactgatccggaggcccgcgggccggcagcccctcaataagccacattgttgcatgaaactccggcgcaggagtcccgggctgccgctggcaacatcgtgtcacccagctaagaaaatccgcgggcccgagccacgcgcctgtgaatcggagaggtcccactgcccgagtggagccgggctgagattcttctcaagttgagcctcagtgatcctgtggccgaagttagcgccttgacgtgggacaaccggacacgtcgccaggagagaactgaggcgccttctagcagttgtgacgccaaaatcacgtctccggagacccgcgccctccgccagccgggcgcaccctcgccggtagccttctttgtgcgccgtccggactcccagctcccggcccggcagccgagccccagcacaaagcagtcggaccgcgccgcccgcctcccctctcgcgtctccgcctcggtttcccaactctgcgccgtcgggccgcggcaggatgattgcctcgcatctgcttgcctacttcttcacggagctcaaccatgaccaagtgcagaaggtaagtcagcgcgggcggggcggcaggctgggctctggcaaagtggtctggcctccatcagtctcttcctcgaccctgcggggacccgcttcctccctactccgggcctgggagcggaaaaagtttgggcagccgggacactcctgggcgccaggagccacgtccgctaagcacagccggcgagtgcgcgcgggcggggagccgaggtcgcgctccgccgggcgccctccctccctgagctccggcacgcgctcacgctctctcccccagtccctttttccctgttactggaggggcgggtcaccccgcaggtagtcagggattgctgcgcccacgtgggagggagcccccttctgcagcgcgagttccggcgagagcacgtggagagaatcgtggctgcgggaggctgctccgctgccgcgtggggccgccgggggccgtccgcgctcgcggaccgcgtgtaggagacgagcggttcccttctccttccccgcggccctgcgggggtgggctcgaggagaagctgacccgggaaggagtag

SEQ ID NO: 2083 - DNA, 6000 bp, Homo sapiens
ttgagaccagcctggccaacatgtcaaaaccctgtctctactaaaaatataaaaattagctggacatggtggtgagtgcctataatttcagctatttgggaggctgaggcaggagaatcgcttgaacccaggaggcggaggtggcagtgagccgagattgtgccactgcaccccagcctgggcgatagagcaagaccctatctaaaaaaaacaaaaaacaaacaacaaacaaacaaagaatctttgttaaatatctaagtctatatatttatggtgtctatatctgaagagggaagcccagttatgaggctgttccagtcaggtgagagataactgggcatatgatctagggtagacagagaaatgggaaaagatttgggaaataatatataaaactataaactctatgtgtgtgtgtattgttacacaacatgtgaacagtagtcatctctaagattcttctatgaattcattcaataaatgtttattgcatgtctgccatgcgtcaggcaccattttaggcactgcaaacttgaaggaatgacagacacagaccctgctgtcttttagcttatcatctattgaggagaggaagaacatagcgaaaataaataggaaatcaactagggccaagtgatagtgacttggggaactatttgagataaactggtcaaggaaagcctgatgaggtagaaggtggggacttgactctggaggtgggggctaagactcgggaccagactctagattagagttccagatttaacacctagaagtcactgcccctttccatggcaatgactcaacaacccgttaccaacctttttctagaaatttctgtataacctgccccttaatttgcatgttaactaaaagtgggtagaaatatgagtgcagagctgcctctgagctgctactctgggcacacggccttatggggtagccctgctctgcaaagaccagtgcctctgctcctgatgtacactgccacttcaatataagctgctgtctaatgccacctgcttgcccttgaatttttttttttttttgaaatggagtctctttctgttgcccaggctggagtgcagtggcgcgatctcggctcactgcaagctccgcctcccgggttcacgccattctcctgcctcagcctcccgagtagctgggactacaggagcccgccaccacgcctaattttttgtattttttttttttttagtagagatggggtttcaccgtgttagctaggatggtctcgatctcctgacctcgtgatccgtccacctcagcctcccaaagtgctgggattacaggtgtgagccaccgcgcccggcatcccttgaattctttactgggtgaagccaaaaatcttcccaggctaagtccaaattttggggcctgcctgccctgcatcatgaggaggtatctgagtggaacgtcaatgaggaggaagaatgagttggagacaggcctggagaagaatattctagatagaaggaaaaggaagagcaaagacccttgggtgagaaagagtttgtatttttgaggaaagcatgctagtgtgaatgccaagcagtattctgtgggaagatctcaggaggtgtctaagggcatggagataagtggtcagatgcacggtctgttttataggtggaattaactgcttgctgatggattgactggctgtgagggtgagtggcaagaaggaatcgaagacgagttagggtggatggcgatgccatttgctgagacaactgggaaagaaaaagatttgggaaaaaaagttgagttcagctttggacatgttaagtgtgatatgctagtcacttcagtggagatgacaaatggcaagctggagaaataagcctgcaactccaggagaggacctcgctgtagatttactatggtgagtcatcagcatgcatatgatataacagtcatggggctaggaagttagtttctcctcagggagtttgaaactgtaactagttcagagaagagggtggagggcagccccgaataccccagcatttaccaatagagcaaacagggactcaggagcctggggagtgaggttagccagaaaccctcagagtggagcactggtgctcttactgagagaggaaggtgtgtccagatggaggatgtgattaactgtcctcaacatccctgagagaaggagtaagacaagggcagggaagagaagagaatgcaagatttggcaacatgtaggtcattatgatgactatgacaaaagcagtttgagctcaattctgtgtggagtatagggaaggagggttgaggacgtgcatttagaagggtacatagttctcaagaagttttgctgagcacatctgtaatcccagctatttgggacgctgaagtgggaggactgcttgagcccaggagttcaagaccagcctgggcaacatatcgagtccctgctttaaaaaaaaaaaaaaggaagttttgctgagaggctagatggattatgatttttgtttatttttcctgtttatccatatattatttttcaacaatgagtattgattacttatataataattttaaggctgtacacattgcagacagcaccccactgtttgaaaaactcctcctcagtagaacatggcagaccttcatcttccttccctgaaccttttccaaccttaggcttgccattctccaccagtgctaatgtcatgtctcttgaaatctgtattgaagtcagtatttcattcttgccagtttccactgtgtgtttaaatttggagtctggtgtctagcattagctggggttggagcttccactcctctcagcattggtaagcctcctcacccaccccatcccatgtccaagatcacccagttacacacttaccatctacccagttcattcacatcatcagtcccagagctgcagagatgctctttttctacctcctacttctctggctcttagagaggcagcatgggataatggggcaagcgaatagggccttaaagtagagggacaagggttctcttccctatctgccacttattagctatgtgacctcgtgtaagtctcttttctttttgagacagggtctccctctgtcacctaggctggagtacagtggtatgatcatagctcactgcagcctcgaactcctgggctcaagctatccttccaccttagccttctgagcagcagggactacaggcacatgccaccatgtccggctgatttatttatttttatttgggaagatgggggtctcactatgtcgcccaggctggtcatgaactcctggtctcaagcaaccctccaaccttggactcccaaagtgctgggattacaggtgtgagccctggccttgcctcaatttcctcatctgtaaaacggggttagtgaaactcacatcctatcagtggttttgaggatgggccgactcttgtattgcctgctctagtacaatcagcagctaaggcggctcactttccggccgtgctacaataggtaagaactaggatgctttagacgtgtgactgggcagtgggagcccctcacatgatcccgagatgccagacagtgtctctccgcacagggcgtgtgctggtccagaggcccgtttttccagtcgccccacaccccgggtccgcgatcacgctccccccacccatagccgagcctgacgcggcggtggctcatgcgcctttccgtcccagcctttagccacggaccacacgtcccatctcaggcgccccgcccctcccccgccccccgcccccggcgcgcctccccaggctgccggctccggtgtctgagcggccgcgcccgcgagccgtgagcgatgattggctgcgccacggcggcgggcggtccgtgggcgcacacaccctccccgcgcagccaatgggcgtgcgcacgtcactgatccggaggcccgcgggccggcagcccctcaataagccacattgttgcatgaaactccggcgcaggagtcccgggctgccgctggcaacatcgtgtcacccagctaagaaaatccgcgggcccgagccacgcgcctgtgaatcggagaggtcccactgcccgagtggagccgggctgagattcttctcaagttgagcctcagtgatcctgtggccgaagttagcgccttgacgtgggacaaccggacacgtcgccaggagagaactgaggcgccttctagcagttgtgacgccaaaatcacgtctccggagacccgcgccctccgccagccgggcgcaccctcgccggtagccttctttgtgcgccgtccggactcccagctcccggcccggcagccgagccccagcacaaagcagtcggaccgcgccgcccgcctcccctctcgcgtctccgcctcggtttcccaactctgcgccgtcgggccgcggcaggatgattgcctcgcatctgcttgcctacttcttcacggagctcaaccatgaccaagtgcagaaggtaagtcagcgcgggcggggcggcaggctgggctctggcaaagtggtctggcctccatcagtctcttcctcgaccctgcggggacccgcttcctccctactccgggcctgggagcggaaaaagtttgggcagccgggacactcctgggcgccaggagccacgtccgctaagcacagccggcgagtgcgcgcgggcggggagccgaggtcgcgctccgccgggcgccctccctccctgagctccggcacgcgctcacgctctctcccccagtccctttttccctgttactggaggggcgggtcaccccgcaggtagtcagggattgctgcgcccacgtgggagggagcccccttctgcagcgcgagttccggcgagagcacgtggagagaatcgtggctgcgggaggctgctccgctgccgcgtggggccgccgggggccgtccgcgctcgcggaccgcgtgtaggagacgagcggttcccttctccttccccgcggccctgcgggggtgggctcgaggagaagctgacccgggaaggagtaggaaaggggcagaggaactccgcccgccgcgccccctccccggaactgtggcgcccggaactgaggctcggcgaggggcgtcccccattaacccccgcccctccaaatcagcctcgggaccgcccagcctcgtgtcctcaggatctgcctctgagtaaggggaggactttggttgttactttctggtttgccctaaaagttactcggagaggccaacgcgccgcgttcctggattacttgagattcttgagatttatgtccttccgaaaacgagcttttttttccttaagcctcgacctgtctgttcccacctggctccgcagctccctatggctgagcgctcaccgcggccgggtcatttacataagaaagagcctcaggccaagccgggaagctctcattccccgcctcggggtatgggggtggggatggggccggggccggggacgggcagggccaggggcgcgctcagaattgagtttctgaaatgcccgggattaggggattggctcctggcccgggcctgggctacgatttgaggtaggggacaagttgggaggggattagctggagggaggttgttttaagagctgtgaggcaacggagcgttgctcagttacatacttggaatttcaatatctgatgggaacacatttttgggaaaatgtcttgccattaccgttctgtgcgacaacctgctcatattcccattctggcggtcccgagggcataggaggcatattaatgtagtgatggcgcgtgaacctccaagaaaagcagaagttacccagcctcaagtctggaggagcgagcagaggcggttgatttacttgggttttactgtttgtaaatggctgttattctctaattcctgggatgtggctctgcaccttgattcagtttacttaaaaacgtgcctttgatttgagctggcaggatcttggtaacttctcaacttctaagaactcttggggaaggctatcat

SEQ ID NO: 2084 - DNA, 6000 bp, Homo sapiens
ggcgcctgtagtcccagctactcgggaggctgaggcaggcgaacggcaggaacccaggaggccgaggttgcagtgagctgagatcacgccactgtactccagcctgggcgacagagtgagactccatctcaaaaaaaaaaaaaaaaaaaaaaggccaggcgcagtggctcacgcctgtaatcccagcactttgggaggccaaagtgggcagatcacgaggtcaagagatcgagaccatcctggtcaacatggtgaaaccccatctctactaaaaaaaaattagctgggcatggtggtgcgcacctgtagtcccagctacttgggagactgaggtaggagaatcacttgaacccaggaggtggaggttgcagtgagccaagattgtgccactgcactccagcctggtgacagagcgaaactctgtctcacaaaaaaaaaaaaaaattgactttggctgagctcaggggagttaattcattcaaaggtagaggaaaaagtgcttcttagctctctctgaaatgtaagtttggcaatataaaacaaacggatggttaacaaaagctacaaagtattcctaactaccatcagttgtcttctgagcagagaaagggacagagttaggttaccaagatgttacatattgaacaaatggagtgaattgtacctgtcaatgtcagtttgtccaatcaaaattaacatagacaaaaataatattattaaggtttcaatcagcaatttactcttgatactctaatcccatacgtgcggactaatggcacgtggtaggtgtccaaaatgtgccaaggttccttgaggctctaactccagccccacccatggtaattcactcttttgacctagcagccatatctctctagacaactgaaaagtatctgggtttctgtctcccatatcacactcagagggccttgcactcactgtaggttcttaaaaaaacattaaaattcttggctttcttgactcttggggtctctgttcaatcttttcgcttccaagatattcctctcaagcccagcattgaaggtcaccccttgctcatacaacaaggaatctacatgagctatgtctattacaggattccagtgcaaatgtcaccagtctatgcgtattaaaacaatttggtcaatggtcagagaaaggagtatatacttcattttatctctatggttaaccctgattctccattcttaaatgacaaaatcctgcatcttgtatactaacttatctcaatcaatagaaagaatcagccaggcgcggtggctcactcctgtaatcccaccactttgggaggcggagtcaggcagatcacgaggtcaggagattgagaccatcctggataacacggtgaaacctcgtctctactaaaaatacaaaaaaatacccgggcatggtggcaggcgcctgtagtcccagctactcgggaggctgaggcaggagaatggcgtgaacccgggaggtggagtttgcagtgagctgagattgcgccactgcactccagcctgggcgacagagcgagactccgtctcaaaaaaaaaaaaaaaaaaatagaaagaatcttccatctctccataggcaggacacacagtcttgattgctgaaggacaggaaactctcctccctttctctctccctcctcaggaccggcctcaggtcatgctttggcctcaggtcatgctttggatgaagagataactgcgaactacccctccaagtgtccacccatataccatccctttagcctaagactagctggccctgcccagctcctccacttcctgcagccctggtttagcttctttctccagaaaggtctcctcctttactcttgtactcactgagcacctcaccagtggccaggaactgcagcgacaaacctaacagccaagattctccctgccctgaggaaggaacccaaactgaaaaccatcaactctaacagatggtggaatgaaacaaatgtcatgcaaggttcaaacacactaatgttggcacacaggagggggagaaggaagcagaaagaaaattaagacagtaaactgcatttgagctggaaggggttaagtggaaagaagccaagcagagttcagggccacaaaaatggcaagggcaggcctcgtgcggtggctcacgcctgtaatcccaacactacgggaggctgaggcaggtggatcacaaggtaaggagatcgagaccatcctggccaacatggtgaaaccctgtctctactaaaaatacaaaaaatagctgggcatggtggcgcacgcctgtaatcccaactactcaggaggctgaggcaggagaatcgcttgaacctgggaggcagaggttgcactaagcagagatagcgccactgcactccagcctggtgacagagtgaaactgtgtctcaaaaaaaaaaaaaaaaaaaaaagacaagggcaaaaggacctagtgtgaacaggcaggacagaggaatgaaaggatggagaggaagatgaggctaagctggggggtagaagcgggaggcaattaagagctgtagagagctcctgaaatgatccagtctggctccagaaagagttttagggacacccttagcaggcctccaaagtaaccaagagaccagttgacagagttagagagttgatgaaaatgaatccaggactctcagctggagtagccagagggtactggtgccactgatcaaaccaacagaagagctagttccatctgtggtcatgatgggtgggggtgctaccagcagccaggagtgggcagaggcccgggccaggagcccgctcacattccccagagacaggcaagtatgtgctcaagagcatggtgctctaaagccaaatgcatggcttcgattcccagctcgtacagaaaagctggagaccttgggcaagttacccctgggcctcagttaaacagggatgctaataacaatcagtcttcacctcatggggctgatttgaatgttaataagctgacatacctaagagcttagaacagtgccaggtacacagtaggtgctctgcagtcgctcctgagttccaattggcaaaagtgaggaaataaccctgattctcatctctaatgccccaaaacactgggcttgtccatcaggagacgacaagtgacctcgttgggcaggtgaacccaagccttccacgtcctcagactacaacccagaatatgtaagattatcttatcacaaggggatttcagaagggtccaaatcaaaaggtcttttcaaaagactctaaagttatactaaattttcattcttctctcttaattcttctttccaatggcagctcagaaagatggttccaagatactctgagtctctgctttctatgtaactgccactggaatcaaacagcttcgctcacctaagctgggagtcaaatcccaggttctgacaattactgagttaaaggcctgattcaattctgcccctattggtagtttagaggaaatacacccaagggtcttcagggacacttctcaaactgacaggtggctgcaagggtagagaaaacctacaggaatgacagttgcacactgcagcgcttaataatcgcaactccataaagtggacaagcctactgttattattgcatttcacaaagagaaacgggctgtccaaagaggctcagggtgctatggttaataaaccacaagacagagattacaactcatttccagataccctggttaattcccgttccactctgggggaagagagatgacccccattccaagattgagagtggtataactccaacggggttccaaccctggtgccctcctctggattgaggaagagtaaatttatgcaaggattcaaatgtcctggggtaatacccaaaggagaactccctgagattaatgacgctccactgtgtattttaggacttgccaagagatgatagccttccccaagagttcttagaagttgagaagttaccaagatcctgccagctcaaatcaaaggcacgtttttaagtaaactgaatcaaggtgcagagccacatcccaggaattagagaataacagccatttacaaacagtaaaacccaagtaaatcaaccgcctctgctcgctcctccagacttgaggctgggtaacttctgcttttcttggaggttcacgcgccatcactacattaatatgcctcctatgccctcgggaccgccagaatgggaatatgagcaggttgtcgcacagaacggtaatggcaagacattttcccaaaaatgtgttcccatcagatattgaaattccaagtatgtaactgagcaacgctccgttgcctcacagctcttaaaacaacctccctccagctaatcccctcccaacttgtcccctacctcaaatcgtagcccaggcccgggccaggagccaatcccctaatcccgggcatttcagaaactcaattctgagcgcgcccctggccctgcccgtccccggccccggccccatccccacccccataccccgaggcggggaatgagagcttcccggcttggcctgaggctctttcttatgtaaatgacccggccgcggtgagcgctcagccatagggagctgcggagccaggtgggaacagacaggtcgaggcttaaggaaaaaaaagctcgttttcggaaggacataaatctcaagaatctcaagtaatccaggaacgcggcgcgttggcctctccgagtaacttttagggcaaaccagaaagtaacaaccaaagtcctccccttactcagaggcagatcctgaggacacgaggctgggcggtcccgaggctgatttggaggggcgggggttaatgggggacgcccctcgccgagcctcagttccgggcgccacagttccggggagggggcgcggcgggcggagttcctctgcccctttcctactccttcccgggtcagcttctcctcgagcccacccccgcagggccgcggggaaggagaagggaaccgctcgtctcctacacgcggtccgcgagcgcggacggcccccggcggccccacgcggcagcggagcagcctcccgcagccacgattctctccacgtgctctcgccggaactcgcgctgcagaagggggctccctcccacgtgggcgcagcaatccctgactacctgcggggtgacccgcccctccagtaacagggaaaaagggactgggggagagagcgtgagcgcgtgccggagctcagggagggagggcgcccggcggagcgcgacctcggctccccgcccgcgcgcactcgccggctgtgcttagcggacgtggctcctggcgcccaggagtgtcccggctgcccaaactttttccgctcccaggcccggagtagggaggaagcgggtccccgcagggtcgaggaagagactgatggaggccagaccactttgccagagcccagcctgccgccccgcccgcgctgacttaccttctgcacttggtcatggttgagctccgtgaagaagtaggcaagcagatgcgaggcaatcatcctgccgcggcccgacggcgcagagttgggaaaccgaggcggagacgcgagaggggaggcgggcggcgcggtccgactgctttgtgctggggctcggctgccgggccgggagctgggagtccggacggcgcacaaagaaggctaccggcgagggtgcgcccggctggcggagggcgcgggtctccggagacgtgattttggcgtcacaactgctagaaggcgcctcagttctctcctggcgacgtgtccggttgtcccacgtcaaggcgctaacttcggccacaggatcactgaggctcaacttgagaagaatctcagcccggctccactcgggcagtgggacctctccgattcacaggcgcgtggctcgggcccgcggattttcttagctgggtgacacgatgttgccagcggcagcccgggactcctgcgccggagtttcatgcaacaatgtggcttattgaggggctgccggcc

SEQ ID NO: 2085 - DNA, 6000 bp, Homo sapiens
taggagtgcatggttgtttctagtctaatagataaaaaagaaaataaaggccaggcgtgttggctcatgcctgtaatcccagcactttgggaggccgaggtgggcggatcacttgaggtcaagagtttgaaatcacctggccaacatggcggaactgcgtctctactaaaaatttaaagaaatttgccgggtgtggtggcacacgcctgtcatcccagctactcaggaggctgaggcaggagaatcacttgaacccgggaggcagaggttgcagtgagctgagatcgcgccactgcactccagcctgggtgacagagcgagactctgtcgcaaaaaaaaaaaaagaaaaagaaagaaaaagaaaacagaaagttatgagagtgggcagatgattacaaagggagcagtcagcaaaacttgggtggagcagagggtgcaagaaagagtattaaaaaaaagaaaaaacacacaaacaagtagtaatggaaagaacagacctgtagtgctctgggaatacttttacaattaaagaggaaacctctccagataggaaactaagctttattctaaaacaaaacctggctagcccccaggatacaacagcagttatagtaatgggaatgcttaatgttcactgagtttgccagtgttcaggacactgttctgatggctttacatctggtaactcatttaatcttcatactataaccccatgaagtgagcccttcatcccctccattttacatgtgaggaaactgaggcgcagaaagggtatgcaacttccccaaggtcatgtagctagtggcagagcctggaagaaactatctgccattgcaaactttcagcttggtcttggaaataaaacaagatgtaagggttaaagggctttgagaagcaaaaagcactatattttaaaagatggtatgttactgtttagaaattctagaagacagaaattgttggttcttagcccagtcttaaggaggtcaggaatttcatatcacatgcaaacattaaaggcatttgcgccaggtgcagtggctcacgcctgtaatctcaacgctttgggaggctgaggtgggcagatcacctgaggttggaagttcgagactagcctgaccaacatggagaagccttgtctctactaaaaatacaaaattagctgggcatgatggtgcatgcctgtaatcccagctacttgggggggctgaggcaggagaatcacttgaacccaggaggcagaggctgtggtgagccgagatggcgccattacactccaacctgggcaacaagagtaaaattccgtctcaaaaaaaaaaaaaaaaagaaaaaaaaggcatttgcttggaggccaaaacgaacgcaaagccatttcaactatatgcctactaagtcccagtgacttgatggtttctatcacagactacatcattatataagccagctgcaggctggaaagtcagggcaaatttgaagccaaaagattgcttgttcaggtagccaatggataacactattgtttctcacctaaactaaggcagtttcccatttatttgggggaagtagaatctccatgaagagtaaaatggggtggggaaggaagacgacaccagctctgcttttctggcagcctaggattagtggaggaaccttaactactttacttttgcacaaacagaggtattgagctttgtacaccactgagatcagtgataaatcattcactcttctttatttatttattattattatttttttgagatggagtcttgctctgttgcccaggctggagtgcagtagcacaatctcggctcactgcaagctccgcctcccaggttcatgccattctcctgcctcagcctcccgagtagctgggactacaagcacccgccaccatgccaggcaaattttttttttttttttgtatttttagtagagacagggtttcactgtgttagccaggatggtctcgatctcctgaccttgtgatctgcccacctcggcctcccgaagtgctgggattacaggcttgagccaccgcgcccggccaaatcattcactcttttggcacccttcatagtcctaaaaacaaaacaaagatggcattcagagcaggaggtgaaagacctgcccgcataaggcagccctggcccagagagacactgggcatggagctggctttgccttcctgcacgtgaagctggaagcagctcaggtggctccattattcccacagaacagcctcaaggctcacctagtgggtcacttagtagctttcctcccccagggcttccaagctgttcttcagaggctcctgattcagtgtatcacctaacccttgctactcttatgtacacatggaatccagaggatcacacttgtcccagtgtcctccctcagatgcattcagcagagagaacaagtgagggagatgacagggaccccagcatatactgaccaagtccagtgcggggatagtgccttccccattttatagacggggaagaaaatggggcccagagaggttaacatgcccaacccaggatttaaaattgtcttccagatgtactcattgaatacatatttaagtacttgctatgtccagggccagcaccaggccatgggaaaaccatagtgaacagatatggcttcatcctcatggagctgacggtctatgtaggagacagacatgaaatagtcaccctagtgcatggaaaattgcagctgtgacaagttctcctgaagcctccagtatggagagttgtgtgtatcagggaaggtctccttgaggaacctgaggggagtagaaacctaactggagctacgggggtgaagatggggatgaagaggatcctagctagaggagtgtgtgtgtgcagaggcctgggggtaggagcaggtgtgatgagaggaatctgaaaaaaggccagggcagctggagggcagggagcaaggggagcaaggtccctgaggaggctggagaggctgcaggggtggggaggctggcaggaagacccttccaggaccttgtaggacgcttagaggttcccagggtggtggaacccctgaagtgttatacttccgggaggaagtggtgggggacaagtgggagtgacagctcagatttggactccgcatacactactcagggcctgagggggggccagagcaggccagtgagaaggtaatgtggatggaaggagaaaggcaggattggcaatttttaggaggtgaaaatagcttgcttgatgatggattgtgtggggagagaaagggagggaatcccccaggatgactcctgggtgctgatttgggttcttgggtggctgatggtatcatttgctgagataaacagtgtcaacctgttttctctaacccacacagccttacgctgaagatttgaaggtggtcactagaagaacaagtttatacgaacaacagataggcttaaaaagtggttttcagccaggcgcagtggctcatgcctataatcctaacactttgagaggccaaggcgggtggatcacctgaggtcaggagttcgagaccagcctgaccaacatggtgaaaccccatctctactaaaaatacaaaaattagctgggtgtggtggtgggcgcctgtaatcccagctattcaggaggctgaggcaggagaatcgcttgaacttgggaggtggaggttgcagtgagctgagatcgtgccattgcactccagcctgggcaacaaagcaagactctgtctcaaaaaaaaaaaaaaaaaaagtggttttcaacaaagggtggcactttttgattgccaaaatgagcgacagcactgatggcatttagtgggcaaatgatgttacgggggcttaagagcccacaaagagggcaaacatcctatcatgccaaggattgtttcaccctgaatgccaacagtgcccttgaagagaaacactgtaaaagatgccagatatgagagttacaagaaattctaggatgtgctggggatattccagggaatcaccctggcctttactcccataattcaatccttagggttagatgaaactgaggggacagatggcattttatgcttatttcgctttttcgacctttatttattttttgaagggtggggggtgttcacaggaagctattcacaagaatctgaataaaacgatggccttcatcttacactatattaaatgtacattttgtactatatttaatgtatacatagcatttctgcatcagttcttccccacctggaccgctcctcattcccacgtaggctcccgctcccctccgtccctcttcccggaggttttcagcgttttgctgcccacacagcacagatctctaagggaaataaacctcgttttctcgatcatctgcctccccattataaagtaaattccacgggctgagcgcggtggctcacgcctgtaatcccagcacttcgggaggccgaggtgggcggatcacctgaggtcaggagttcgagaccagcctggccaacatggtgaaaccccgtctctactaaaaacacaaaaattggccaggcgtggtggcaggcgcctgtaatcccagctactcgggaggctgaggcaggagaatcgctttaacccaggaggcggaggttgcagtgagccaagatcgcgccactgcactccagtctgggggacaagagctagacttcgtcccaaaaaaaaaaaaaaaagaaagtaaattccacgaaagacgggccttgctcaccctgctcgacgctgggttcccaagcccagtcctgcacctagtcctcgaaggagggggttttcatactatttcagggggtccaccgaccccaagaagcccaatcagacggggtcctcaacccaaaactcactctgacgccgcccgcggaggcccgaggtggtctgcgcaggcgcgctgctggcccggcccgccggcgacgtcacgcggccgttacggcgctcaggcgtctcgacgcgcgcgatttaaaaccagctcaggagacgccaaggaaagatgggacctcccggcccaggtgagccgggcggtcgggaggcgcggcgggaagggcccctagcgaagcagtacttcgggcgggcagggctggcgggctggcctgggcggggagagaggatatgctcagctcgggtcttggccctgcggctgacagcagaggccggtgcggggggaggggagggccggcgcggggcgggcggaccttgtgcgctcagccaatcagaaagcggcttcggccggagtcggagagcgcgcgggccctgcctcacactcctcagttcccgggcgggcggtggggcggcctcctccttgggctcctaaagcgtgctcggtgtctctccattaaaatggtggttttcctggaatagacgttattttcagggctttggaagcgatgtggttaccgttgtatgcttagcatgcatgcatttatttttgcatctattcaaaagtactgagctctcccgttgggcgaacaaaattgataatatctctatactgttggagttggggagacagacagtaaacaaaagaaataattacacatgaggctgagtgctgtgattgagtatagcagagtaggggtggctccgccaggggttcagggaagatctttaggcagatactagggaacgtgtttcaggcagaaggagcaagtacaaaaatgaggcagggaagagcctggcctggcctaggacctgaccagaacattgtgaccaagcttagtgaggcctgacacgtaggcagggtctggaggccttgggtaagagatttggaaattgagttacattttggacatggtatgtgtgacttacgggagagactcaggtgaagggatctataatcacttaggtgagaatttggctctcaggggagttatatggaccactcagggaagtgacccatggattgagaaataaatttggataccattatcatatagaccattagaccataaaaccatgggaacaggtgagaacactaggaa

SEQ ID NO: 2086 - DNA, 6000 bp, Homo sapiens
actcactagtttcaagtgtaccttataagaaacacatggacatacttgggttttttaaccacatagtctcatatcaataaacatctaagtatctgacatgtatttttccattaaaggtaggcacaactctatgaatatcaaattatatcaatcatttgctttttataatcttgactggaaactgaaaaataagaggaatgtaaagttaagtagccgaaaatgctacttactgcacaaaagcacatcatgaaaaggaatgctagaagtagttctcctcaggaatgggtttttgaaaatttaaaatattattttatcagaaaagttaaagccttcagtgggaaaaccatggtaaatgacatattgactcaatctctaaagccctggcaaattatagattttgtgcaattagtgaccaacatatacatttaagagataatactgactgttgaccagaaccttctgatggttctgaagcatctgctctttagagttacttcagctttacatgtctatgaaatttaagattcctcaatgggatgttatagcttattctgcactagatacaagtaatatgtatagatttagaacaaatgactacttttcaccttccaggagcctgtttttatttatacaaaattagattggtttttcacccacatgtatgcataagtgcttctcaaatttacaccgttcatatctgaaatcccacaataaatgcaaataaatggatactagtttatatatttcatattttcattcatcttttttttttttttttttgagacagagtctccgttgcccaggctggagtgcagtgtcgtgatcttggctcaactgcaacctccacctctcaggtttaagtgattctcatgcctcagcctcctaagtagctgggactacaggcacgcaccaccacgctcggctaatttttgtatttttagtagagacaggttttcaccatgttggccaggctggtttcaaactcctggcctcaagtgatccacctgcctcggcctcccaaagtgctgggattacaggcatgagccaccatgcctggcctttcatccatctttaaacaaattcaatgaccatctagagacagatgtgaccaaagtgttacaaatttctatgcattttctatgaattgctctgtgcagttcacacatgggttcattcaccccgcaggctgtgaacttccttatcctgtaggctgcaggtacttaggtttcagcaactacgcgacccaaaagactaaaggaggacttgtttaaattagtccctctcaaaaattgtttccaatcttataacaaacagatttaatatgcttgtgggttaaattttaaagtagttatgaagccatttactctaatataaatgaatgaaatgtaattaagaaccatacttaaacgagtacttaattttaatgaatggtatttttcatttatatacaaaggaatagccagcagcatttaaatatagaaatagtcccatctcttctctattcccttttataaagtgccattttaattgggtagatttactacccagattttcagtaactacaggataggtatctaattgtcaagaaaagcttggaaaattaagtttagcattttaaacatttgtaaaacattgctacaagtcatagagactaccaatgtattaaaataaaaagtgtaccttacataagaatcattaagttggtttaataattacttcacagaaacatgggctcatgaatacttaggccaatttgtgctaattatttaaaccagaaacagtttctgtaggtaattcagctctaagcaccattaaatagggttatgccaaatagaacaatggttaaataatcctcagaataaacaccccagcaaattcaaacttttagaatagtaacaaaagttagtgagaatccgaaagagaggcaacattttattgaaaactatcataggctgctaagtgttctctttaaataaaattttgtgtagttattaatgtaccttaacactggtgtaccttaatagtggtgttagagataggtggaaaccatactacagaagtgaatgttgcctgtttcttttgttcagtgattaaaactgaaattgcttttaaaaaaataatttaactgctacttacaatacacataaaataccaagaagattcccattttattcacattattctctaattagtatttttgcatttcaactttgatctgaccttcagtagtaccttaaaatgcaaatgcaattagtaaaaacggggcagcctgtcgttttcacacttagaaatacaatgtagtttcattacagtttgcatttttttgttactcttgaaagagtaaccccttataaaatcagatacataaaaactgcattattccttactttgcaggcatccaggaatggttaaagcaaaggaactctcattcattaattcattcattctgttcccccaatttagatacatttctagtctccagaaacggactccagggcagggaagtggagggcagagaagaggtacaggtcaaggtatgatgaatctctgaaaaagacatccacttttcccagaaggctagcctgaagagaactccgccccatccattccgatccctcaagtaagaatgcataatttagcttgtccttctggtctcacttccttacaacacctagtattcaatttattaagacaaataaacctttgcattttctaaaagaagcaatttttacccaaatacattggactttggtctcaatgtgaagggcgagtggcctttaacaggtcgttcctcccccactccctcctcccccctgccctccagcggctgctctgggtccctgaaagagggtgtggtgtggacgatctgggttctgaatcggattttgttgagtctgggttttatacgtccactagagctgcccgaggctttgcgccctggatccttggctttgcctccgacccacccctcagccgagtggtgatggtggtgatggtcccctccatcttctagggcgtgtgagagtttgtaggtgatgagatgcgagggaagcacctttgaaagcctccagcgcccgccgccgctacccgcggcgctttccccgtcaccctcgtccagggctcccaccaggttcttgatctcctcggcgatgctccgactcaggtactgggaggcctttttcccactgtagtccctgatgtccacatcggcgtcgtaggcccccaccagcagcttcaccacctccacgtggccgtgcatggctgccaagtgcagggcggtgtaacccccgctcgtcctggcgtcgatgttcaccggcagctggtgtttgttggcgaagttgactagcatggccagaagctcctgcctgccgtgcttggcggcccagtgcaggcaagtgaagccggtaatgaagtcccgcttgaccagcaggccgggctcgcaggtgagcaagccctccaggctgtcccacttgccatcggaggcagagagcatccacgcgtgctccagggggtccagcgtcacggagcctccgccgctgctctcctcctccgcggacgacgaggccaccgatgcgctgtctgagtcgcccccgcctctgccgcgtcctcccccggaggagctgcccgggctgctgcccccgggacacacgctcctcttcagctgcggggagctgcccatcaccaggtcacggaggttctggcgggccggcctctgtgcggtagcccccacaagggagctgcccctgtccgcctcctcgcagccatgtggcgggagctccaggtcctcgctgggccccggggctggagtccgcggtaggggctgcacgtcgcgccgcgagttcttcctgcgagccccggcgctcaggggcggccagtgcgcgggggcggggggctctccctcgcccagctcgcggccctgtccagggagcgactccggggccgccgcgtcggggagccgatcgcgcgcctcgggcccggcagggccgtcgggggcctcgggctcggcggtcacctggattcgcggcgggtccccggagggctcggacggcccttcacagaacctcttcttgaggtgcacgtacttggcgccgtcggcgggatcgacgcgcacagtggccacggcgttcaccagctccttgaagtgcgcgcgggcgcgggcgcgctgctccggttcgccgcctagggcgcccctgaagtgctgcaccagctcggcgtgcagggcccggcccccgcgctccgccaggaagcgcagcaccgcctcggggcccagcgccgcctcggggccccactctgccggcccctccatcctcgaccgcgctgctcccccgccagcgggcggctcagcgcggtcccatagcgacgggctcccagcggccggctcccgacggcggcggagtctggcgggctcagcgggctgccagcctacgcgtctgaggccagaggactcggccaccgcctcactgggccgcgcccgggcggacacgccccccgcacccccgccccgcgcccacgccaccaggccacgcccacttccgctccccgctgtctcggccacacctacctagggcggcctcgcctcaaggcccgcccacttccggcctcgcgagggccgcaatcactgctccgcagttcccgcctgcattcctcgcgccgtcttcctggagtcccagctctccttcagcccgccccaacgctgacgctcagtcctcaggcgtcgagggtagctcctgtgaggggctcgcttggcgcaggcaaaacgctcagcgcgcaccacagggcgtccgccccaaccccgcccccggaggcctccagctcggccccgcccctgtcccttccccgtcgcggaggcagcctagcctcgcgccccgcccgttgcttctgccctccggccttcccgccgccgtcgccgggaccagccgctcggggccgggctgatacagccgcttcaccgtgcccctgcccgcgaccatggcctcctccgaggtggcgcggcacctggtgagtcccgccgacgccggggccccagccccgcgctccccggcccccgcgggacttcccgccctcgacccaccggccccctggtccggcccgggattgtgacccgcgccccctccggccccgcccgcccagtgctccccggcttccgcggcggccgggcgcctggggcgggagaggagcctctgcggagcctgggcgcggccggaccccggttcgcggggcgcggcgccagcgtcgggacggtgggagagttcttgaacgacttcccggtctttgccaaaagttacatccacagcggtgtttgtgggtctcttacggctataacggagttgaaggcgcagtgcggactgattgaatagcggtcatcttttgcagccgtgagcacttccgagcctccctgccgccgggagaaagcccggctcccctggcttttcaaaagctctcccgttttatccgatggtgtggtcgtccaagttttcctccattgggattttaaaccgtttttttcccgccttgactcttttgtactctaaaagaacgcgtttgttcactgttttgaacctttccagttacttttgtagatttatctcgcttgttagtaagccagcggttttccaagtgtggttacaactattttcgttaatagtaccaaggtcgtgtacatcgagttttccaaaggctacatggtatggagtgatctcaccgccgtttggaggcccgatgcctgtgtattcttaaaaacaaattctcccttttaatttttgatagtaaacattggtggttttcatctgtgtaaacaaaagctctttggaggctggagaccaaaaagtttgagaaccactctactaagcaacctcctacatgagaagtttaaattgtagaaacagttcagattgcaggctgagagattagaggatccgtccaaagtgacaccgttggtttgttttatagaacctggacaaagatttttctccctgattcagcccaggtctcttttcattc

SEQ ID NO: 2087 - DNA, 6000 bp, Homo sapiens
ctctgggaaagcttcagaggaagcagcatgggaactgagtcttttcactgccgagatcgcgccactgcactctagcctgggtgacagagcaagactccgcctcaaaaaaaaaaaaaaaaaaagatcaagaaagaattaagaatcacaacttcaagacagaaagtaaaacaaatgagaagcctcttagatacgaaaattatcctcactgaagaaaaactgagaaggaatgagaaaaaaagttcagaagcattgtagctaaaacaggaaatgacaaatgcggacaggaattgcaaagatttggtcaccacttaaaaggtaaggataactgaagaagtggaaaattatggctgtgtttctcgggagatgaaaaggcagtcagtggactgtactcaacactatttcaagatccactatctcagtcaacaataactaattatacagccaggatctcctgaatcataaaatgatgcaattcctaataaggagcatggtggagataatggcagggacaatatgacacagagcagatctcacaatcactagctgtgattccttaagcgagacactaaacttccctgaggtgtttttttttttttagacagagtctcactctgtcgccaggctggagtgcagtggcgcgatctcagcttactgcaacctccacctctcaggttcaagtgatcctcctgcctcagcctcccaagtagttgggactacaggcgcatgccaccaagcccagctaatttcctgtatttttagcagagatggggttttacggtgttggccaggatggtctcaatctcttgacctcatgatccatccatctgggcctcccaaagtgctgggattacaggtgtgagccactgcgcccagccacttccctgaattttaatatcctcttctattaaaaaaaaggtctgggccgggcatggtggctcacgcctgtaatcccaacacttcgggagactgagacgggtggatcacctgaggttgggagttcaagaccagcttgaccaacatggagaaaccctgtgtctactaaaaatacaaaaaattagccgggcgtggtggcacatgcctgtaatcccaactactcaggaggctggggtaggagaatcgcttgaaccagggaggtggaggctgcggtgagctgagatcatgctattgaactccagcctgggtgacaaagcgacattccgtcttcaaaaaaaaagagagaaatgaagagaaatactatgtacatgagttagaagactcaacatagtaaagctatcaattctccctaaatcgatataaacatttaatgtaattcctctcgaatcccagcaaaattatttgtaaatatagataagacgattctaaaacttacacagagaggcacagaactagaatagctaaaaatctgggggagagaagaataaagtgggagaaatcagtctaccttatttcagacttacacagctacaggaatcaagactgcgtgctaacggagaacccagaaacagactgaaacagacccacacaaatatgctcaactgacttttgacaaaagtgcatcaacaactcaataatggaaagggagcctattcaacaaatggtgctggagcaactggacatccataggccaaaaaatggccctcaacttaagtctgacacctaacagaaaaattaactcaaaatgggtcataacataaatgtaaaacataaactataaaacttttaggaaaaaaataagagaaaatctttgggatctaaggttaggcaaagagttcttaaacttgacaccaaaagcacaatccataaaaggaaataatgataaatttcaacaaaactgaaaacttttgctttgcaaaagaccctgttagaagatgaaaagataaactacagactgaaagagaacattttcaaatcacatatctgagaaaggactggaatctagtatacctaaaaaactttaaacccaacagaaaaaaaaaatctaactagaaaataggcaacatgttgggaggctgagacgggaggatcgcttgagcccaggagtttgagaccagcctgggcaacatggtcacacccctgcctctacaaaaaatacaaaaatttagccggctgtggtggtgcacacctatagtcctagctacttggggtggctgaggcaggaggatcgcttgagcccaggagattgaggctgaggttgaagtgagccatcttggcaccactgcactctagcctgggtgacaatacgagaaatccaagttaaaatcaccatgaggtgtcactatatacctataagaatggctaaattaaaaataaggacaccaccaaatgctggtaaggatgtgcagaaactggacctctcatactttcctggtagggatgcaaaataatacagccattctgagaaagtctggcagtttcttacaaaactaagcatgcaactaccatatgacccaacaattgtattcctgggcatctatcccaaagaactgaagacttatgcttacattatgagttactgtacatgaatgtttatagcagctttattgccaatagccaacaactgaaaacaacctagatatccttcaaactgtggcacaatcataccatggaatactaccccagcaaactgcagatatatgcaacaacctggatgaatctccagaactttgctgagttgaaaaaaaaaaaatccaatctcaaaaggttactaactgggtgattccattatataagtcttggaatgacaaaattataagaataaaaacgaatcactgattgtctggggttaagaaggaggcagggcaggaaagaagtgtgtgtggttataaaaaggcattaagggatcctcctggtcctgggaacatcctttatcttcactgtatcaatcaatgacaatatgctggttgtgatatcgtactatgggtttgccagatcttattgtggaaaggtggataaagggtacagggttctcactatactgtattatttcttacaactgcatattaatctacaattaacgcaaaatacagtttaattcgaaaataagtaaagttagcctcaaagcaaattaagtacaattaaaaataaatctaacatcagctaaatgaagtgttctcttctgctcaagcttgtttggatacgtaatctatgaatcaaagaatttataaaacacattttcctcaccaggacccctcaattttccctcactcacacatgcacacaaacacagcaactgagacaagggggtccagacagaaaatttgagatttttaaaaaatacgcgatagaatgaaaagagacctgggctgaatcagggagaaaaatctttgtccaggttctataaaacaaaccaacggtgtcactttggacggatcctctaatctctcagcctgcaatctgaactgtttctacaatttaaacttctcatgtaggaggttgcttagtagagtggttctcaaactttttggtctccagcctccaaagagcttttgtttacacagatgaaaaccaccaatgtttactatcaaaaattaaaagggagaatttgtttttaagaatacacaggcatcgggcctccaaacggcggtgagatcactccataccatgtagcctttggaaaactcgatgtacacgaccttggtactattaacgaaaatagttgtaaccacacttggaaaaccgctggcttactaacaagcgagataaatctacaaaagtaactggaaaggttcaaaacagtgaacaaacgcgttcttttagagtacaaaagagtcaaggcgggaaaaaaacggtttaaaatcccaatggaggaaaacttggacgaccacaccatcggataaaacgggagagcttttgaaaagccaggggagccgggctttctcccggcggcagggaggctcggaagtgctcacggctgcaaaagatgaccgctattcaatcagtccgcactgcgccttcaactccgttatagccgtaagagacccacaaacaccgctgtggatgtaacttttggcaaagaccgggaagtcgttcaagaactctcccaccgtcccgacgctggcgccgcgccccgcgaaccggggtccggccgcgcccaggctccgcagaggctcctctcccgccccaggcgcccggccgccgcggaagccggggagcactgggcgggcggggccggagggggcgcgggtcacaatcccgggccggaccagggggccggtgggtcgagggcgggaagtcccgcgggggccggggagcgcggggctggggccccggcgtcggcgggactcaccaggtgccgcgccacctcggaggaggccatggtcgcgggcaggggcacggtgaagcggctgtatcagcccggccccgagcggctggtcccggcgacggcggcgggaaggccggagggcagaagcaacgggcggggcgcgaggctaggctgcctccgcgacggggaagggacaggggcggggccgagctggaggcctccgggggcggggttggggcggacgccctgtggtgcgcgctgagcgttttgcctgcgccaagcgagcccctcacaggagctaccctcgacgcctgaggactgagcgtcagcgttggggcgggctgaaggagagctgggactccaggaagacggcgcgaggaatgcaggcgggaactgcggagcagtgattgcggccctcgcgaggccggaagtgggcgggccttgaggcgaggccgccctaggtaggtgtggccgagacagcggggagcggaagtgggcgtggcctggtggcgtgggcgcggggcgggggtgcggggggcgtgtccgcccgggcgcggcccagtgaggcggtggccgagtcctctggcctcagacgcgtaggctggcagcccgctgagcccgccagactccgccgccgtcgggagccggccgctgggagcccgtcgctatgggaccgcgctgagccgcccgctggcgggggagcagcgcggtcgaggatggaggggccggcagagtggggccccgaggcggcgctgggccccgaggcggtgctgcgcttcctggcggagcgcgggggccgggccctgcacgccgagctggtgcagcacttcaggggcgccctaggcggcgaaccggagcagcgcgcccgcgcccgcgcgcacttcaaggagctggtgaacgccgtggccactgtgcgcgtcgatcccgccgacggcgccaagtacgtgcacctcaagaagaggttctgtgaagggccgtccgagccctccggggacccgccgcgaatccaggtgaccgccgagcccgaggcccccgacggccctgccgggcccgaggcgcgcgatcggctccccgacgcggcggccccggagtcgctccctggacagggccgcgagctgggcgagggagagccccccgcccccgcgcactggccgcccctgagcgccggggctcgcaggaagaactcgcggcgcgacgtgcagcccctaccgcggactccagccccggggcccagcgaggacctggagctcccgccacatggctgcgaggaggcggacaggggcagctcccttgtgggggctaccgcacagaggccggcccgccagaacctccgtgacctggtgatgggcagctccccgcagctgaagaggagcgtgtgtcccgggggcagcagcccgggcagctcctccgggggaggacgcggcagaggcgggggcgactcagacagcgcatcggtggcctcgtcgtccgcggaggaggagagcagcggcggaggctccgtgacgctggaccccctggagcacgcgtggatgctctctgcctccgatggcaagtgggacagcctggagggcttgctcacctgcgagcccggcctgctggtcaagcgggacttcattaccggcttcacttgcctgcactgggccgccaagcacggcaggcaggagcttctggccatgctagtcaacttcgccaacaaacaccagctgccggtgaacatcgacgccaggacgagcgggggt

SEQ ID NO: 2088 - DNA, 6000 bp, Homo sapiens
tgcggtgattggcattggagtttgacaaggggttagtgtgccttttttaagggcagtgtagaagagtatctctaatacctcacccataaacaagtgtggtgggagaggaacccctagtaacagaaatgaaggagggtagacagtctctatggcttttagaaaacagggtagagctaagtgtaactatcatgaggtccttatgatcacatgcttatttgcttcaaaaagaccattaattactaaagtgatgaagtacaaacttcttagtcgcattcaagatttaacatcaaaacagcaaaccagtctttcgaaaaagaacctctaatgctcatgaatcctcaagagtgatttccttctaaaatcttgatttacacgtggaatgacctccccaaggctctgccagacccatatccatcccccctcccttcaaggcccaattcaagccccaccttccctatgaagctttgtctgaccaacaggtccgcatgacctcttcctcctctgaatacccctagcacaggggtccccaatcccaggccatgggctagtacctgttcatggcctgttaggaactgggccgcacagcagaaggtaattggcgggtgaccgtctgagctcaactttctgtcggataagcggggcattagattctcataggagtgcaaaccctattgtgaactgccgcatgcgagggatctagggtgcgagctccttatgagaatctaatgcctgatgatctgagatggaacattttcatcctgaaaccatcccacccactgcccaccccaaccccttgcccccacccccaccccaccatgaaaaattgtcttccatgaaacctgtccctggtgtcaaataggctggggactgctggcctagcagatacagtctgaactcatttggctcttaatatacatatataccacctttaaacaattctttatttctgtgtcctcatttcccagactaaatcactaaccccttcaggacaggctctgtttgagttagacaaggttataatttgcacctagctcgtgatggcttctccatcaacatttcctgttgattactgattgagccactatcagaagcagatgaaaacttgagttgatggaaccaaaagtgtcctagttcctgtgatggttagcggaatccagcgcttatctaaagacctcagagtttattaccctttgagtaataaaccccacaaattggagactcaggtagattcaaagccatcaacacactggaagaaatttccgcactcagtgagcgtcgggatttccacaagctaaatttttgtttaggtttttggttttttgtttttcttttttctctctttctctttctttctttcttccttttctttctttctttctttctttctttctttctttctttctttctctctctctctctctctctctctctttctgacagaatctcgctctgtcgctcaggctggagtgaagtgttgcgatcggcgcactgcaacctctgcctcccgggttcaagtgattctcctgcctcagcctcctgagtagctgggattataggcgcgtgccaccacgcccggctattttttgtatttttagtagagacggggtttcactatgttggtcaggctggcctcaaactcctgacctcttgacccacccgcctcagcctcccaaagtgctgggattacaggcgtgagccaccgcgcatgtcttttttctttttttgggagggactccctctctgtcgctggagtgcagtggcacgatctcagctcactgtaacctctgcctccctgggttcaagcgattctcctgcctcagcctccagaatagctgggattacaggcgcgcaccaccacacccagctaatttttgtgttttttagtagagacaggacctggctaatttttgtatttttagtagagacggggtttcactatgttggccaggctggcctccaactcctagcctcaggtgatctgtccacctcggcctccccaagtgctggaattacaggcgtgagccaccgtgcccagccttatttttttaggtgtttaactcaagaggccaaggaagcagaaacatccacccaacctccttctagcgtgaacagctctttattctgtatcgtcaagtggctcttgaaacacttttgagatgtggagtaaaaagttattaaagaccagggggcagagaagactaggctaactctttcccagctcactcttaagaaacatcagcgacagaggagcccctggaagacagcaacaaaggctcagctgaggatgctccccagcattcgaaggccacctgggcagaccaggagaatggaagctctgaggacaacaacttttctgaaacccagaatgacaaagactctgcaagtgccggagacgctccagcttctggagcagatatggaagagcccaagtgtgcagacgaccgtcagcatatgccaacaagtcctctcccggcacctgcgcaaaaagcaatagacacaaaccctgaagaggcagaagaaataaaacctagcgagctcaaggaggattaggatgctgaagagcctgacctgatctgttgtggcctttgtatttcatggtggaaatctctaagggcaagtgaaggagccctgagaatatcctccagggaacagacaccctctccatagcagcccctgagcccactgggctgagccctccataggctgctttaatgagggaggggctgaggtgccggtcaggctaccacatgcaggattccgagggccatgcagcgcgttcttgtccgcagtgccacttaagctcatttgaggggatccagccctgccctccatgtccccagaagacaacagggagggagcttcaccagttcaacatgagcagccaccggggttgatcatgaatccccgtttcatgcctcctgggaaaggtgtgagaaggagggaggcaccccgaggcttcttgccacacaagcagcacccgcagcccagcattgcacacctgcgagcactcagtaggtcctggcatcaagaaggggaaaggccaggatccaagacccgctgggatgtgcccagtcccacggaccccccagcctccatggagccctcggtgtctggggtggcctcatggccccgtttctcaagatgaggttggaggcttctgtgtgtagagagcactggcttgggcatcagtggttctgtgtctgtgtcagacaccaacaagaaacccttgatatacatattgtagcaggacgagccgcagacaaaactcctgacactggattaaagaaggaagaagtttattcggccgagagcgttggcagactcgcatcttaaaagccgagctccccaaaaaagaaattcctagcccttttaagggcttacaacttgaaggggggggtccatgtgaaacggttgtgatagatggagcaagcgtggggaacgtgactgggggctacatgcatcggctaacagaacaaaaagttttacagcgctttctcatacaatgtctggaacttacagataacacaagtagttttggtcaggggttaacattattattattattttaaccaccaaggccgggtggtggcgccaaggtcgtctagctatttatcttacttctgtttctttctaactttttgctgtctcacttttctcctgtcttataaactagggaaaaggggaggtggtggagaagaagctgggagggacaacaggagaagtggtggtctcattccatagtataagcacattttttccaataagtcaaccttagcttactgtaactttttcactttataaacttagtattttaacttttcaaaaaacaaacaaacaaaaaacaaaagaaacatcagcctattacatatttcctctttagacatctggactcctctacaaagaggtgtctatttttgattttatggtgtctaagaacttggtctcccagagtgccctgtcccccaaaagatgttcaaagctggcattctataatctacccaaactcttctgcttttgtgttaattacagctggctgcagagagagtccagtcccgtgagccccatcttccgcttgaagctgtttgacaggtcccctgtgtggctcagggcccagcctttcagatcagttcaataaaacccaggggtctactccaaggacactaacccatcactttccagtgcctcgtataattacgcagccgaccctagaacgccctccccgcctccacgtcccctctacatgaaggcgctaagcccaaaactcctcaggtttttccacaggccgtcgtcactccctctttgccacggcgtttgagattctgggctaagactattggtttcagcatctgggatgttttctcacagccgaggacgctgaatagaaaactgccagaaagcgggaggggtccccggcagcaggtcccgttttttctccccacctgcctcccgggtgctgcggcttccgccacgacagtctcgaccctgcacacggatttttttcctccgttccatgaaccaaacataatgattctggtttacatatttaagcgaaggggagaagaaacgcgactctcaggacccaagggctgaggcagggtttttctgtctcaaagacctccagttaagacatttttctcctgcaaagcctttcctacaatgatggcttaatcgtgtaattatgtaaaccagtcacaacctggatagctaaaacaaaaaaaccaattccctacgcccgagccaagcctgctccccctcgccgtgccgcatcccaaacaccccgcgctcgctcagccaacggccaggtttcggttcaaccgaaaaccacgggaagtgggaggagctactggctcaagggagggaggtgggacttgacctccgagcaacggccccggtgattggccaaccttctgccgccgccaccaatgggcaggcgccctgaaacgttcggcgagccgactgcggctgcgcggggtattcgaatcggcggcggcttctagtttgcggttcaggtttggccgctgccggccagcgtcctctggccatggacaccccggaaaatgtccttcagtaagtgtccgtctggtggggtggggaagcccagggggctggggcgcctggggttcgggcccggcccgccccagacctgccttcttttgcccccttcgcccccttcctgggtttggaatgtgtcccacccagcaaggccgtgggctgcttgagagccggggagggctccggcaccttgggttccgctgaggcccggcgcttgtccgcccatctgcgccgcggtggccgtttggagcaatctggataattcgttaggccctcagagctctcgtttattctttgtaaggaatcccctcctgacagttcaacctaacaaaaatcctgaaccttgtgtttagattttgtgatacgttttcaaagtcacgtatttaacaattcgactacagtagggaacgaatttaaagttgctctcctatccataatctcactgctattttttaaaagtctttgaatacagggtactttaagaaaaaaaaattgaaaaaaaatagctttgctcattattgagtgatgtgtgccaacctgctaacatcactcactttttacttaaagttcccacgcctttgttttatgacttagatgatttacccagactgttacttaaaggcatttaaaacaattaagtcataggttcaggaagtaaaactggtccgttttatcagttctttgcgatcagaagaccgagattgttaaatgcagtcaaaacaaaaatccatttgctctaagactttttctgtaaccttcaacctagccagcaaattattttctttcagaagtcccccgccccttttttaaaggtaaagcagatattcctggtcctgttttgacttactaaagattaatgtgctttaatgaactggatgttttactattacagtgcatttaggtcattttactagagaaatgtggttggtgttagaatatgaaatgttt

SEQ ID NO: 2089 - DNA, 6000 bp, Homo sapiens
ggctaacatggtgaaaccccgtctctactaaaaatacaaaaaattagccaggcgtggtggtgggtacctgtagtcccagctacttgggaggctgaggcaggagaatgcgtgaacccgggaagcagtgcttgcagtgagctgagatcgcgccactgcactccagcctgggagacagagtgagactccatctcaaaaaaaaaaaacaaacaaaaaaagcttcaactaaagaacaaataaaacattcagacacaagttgacactttaaaaattctatagatttcaacaaataatgaatgactgtatattaatttatattagtcctgtggtcagaatacattttccagttaaaacatttttaatacatcttctgtacggcacggatagcttctagtgggaattagtgtatagtctgttcttgatgaagacaacactagacagatgttgcctgatatctggataatgctgaatgtgacaaaaccagcgagacgcattaagatatttcttcttttcttgaactgtcaggtcaactataaagcgatgaagtccatagtacaataggatatctgcaaaggtagttatatcctgtaaggtagactttatcttcaagatatgaaataagatccttcaacagggtgtgggctgggcatggtggctcacgcctgtaatcccagcactttgggaggctgaggtgggcgtatcacaaggtcaggagatcgagaccatcctggctaacatggtgaaaccctgtctctaataaaaaaaatacaaaaaaattagccgggcgttgttggcgggcgcctgtagtcccagctattcgggaggctgaggcaggagaatggcatgaacccaggaggcagagcttgcagtgagcagagatagcgccactgcactccagcctgggtgacagagtgagactccatctcaaaaaaaaaaaaaactaaaaaaaaaaaccagtgtgtggctatcatttttactggagtgactctgtattgtaaccattgctgaactattgctttttcttctgcagtactccctagcaaatatcctttgttagcttgcttgactagatgagctgctatagtagtcaatcctgttagacttggaccattgtttgtttgaagaaccagaatctgtcactcatcctgagcactttatttattattccccttactcagtcccagggacttctctagtagtgacaacttggcggctgctgccatcttctggcggtagctcctggaagagaccaacgtttaactttttgagaacctgtcaaactgttttaccaagcggctgcaccattttacattcctatcaattatgtacaaggggtcaaataactccaaatcttcataaacacttgttattgtctgtctttttgattacagctatcctactgggtgtgaagtggttttggcttacatttccctaatgactaatgatgttggtcatcttttatcgtcctttttggccacttgtataatatatttttggcaaaatgtcgttcaaatcctctgcccatttttagactgggttgtctttttatgttgagttgtaagacttcttcacatattctggataacagactcttatcagattatttgcaaatcttttcccccattctgtgagttgtcttttcactttcttgacaatacctttgaagcacaaaatttaaaacttttctccaacttatcaaattttttcctaggttccttgtgctttaggtaccatatttaagacatcattgcctaatccaaggttatgaagatttacagctatgttttcttctaagtgtatagctttactctttttttttttttttgagacgaagtctcgctcttgtaccccaggctggagtgcaatggcgtgatctcgactcattgcaaccgccgcttcccaggttcaagtgattctcctgtctcagcctcctgagtagctgggattacaggcgcctgccaccacgcctggctattttatttatttatttattttttgtatttttagtagagatggggtttcaccatgttggccaggctggtcttgaactcctgacctcaggtgatccgcctgccttggtctcccaaagtgctgggattacaggcgtgagccaccgcgcccggcagctttactctcatatctgggtctttgatgcactttaatttttgtatatggtgtgtagtatgaatcaagattcattttttccatctgaatatacaaatattgcaacactaactgttgaaaagatgcttccctccttcatttgcttttgcaagtttgtaaaacaacaacaaaatcaactggcctcactctgtaactgagggctgcacatattgtcttccttccaaagagtacaatatggaaagtggggaaatgtaacatcatagtagagaaatctgacaaacactatctcagttaggtgatcaaggttgacatcagcagcgataagtgatactgttgataagtacctttgatatgatgtgatgaaaatgacactttatgatcttccttcctgaaatccatatccccaggctaatcatgaagaaacatcagacaaatttcagttaagggatattctacaaactaatgcagtggcttgcacctggagtcccatctgcttggggggttgaagcaggaggactgcttgagcacaggagttcaaggctgcagtgagctgtgtttgtgccaatgcactctagcctaggcaacacagcaagactctcttaaaaaaaactgaataaagtatgaattttaattactaataatgtgttgatatttcattaattttaacaaatgtactatactaatgtaaaatactaataatagggaaactggatgtagaaactgggtatagggtatgtgggaaatttttggactatctgcagtttttctgtaaatctaaactttattattatactttaagttttagggtacatgtgcacaatgtgcaggttagttacatatgtatacatgtgccatgctggtgtgctgcacccattaactcatcatttagcattaggtatatctcctaaagctatccctcccccctccccccaccccacaacagtccccagagtgtgatgttccccttcctgggtccatgtgttctcattgttcaattcccacctatgagtgagaatatgcggtgtttggttttttgttcttgcgatagtttactgagaatgatgatttccaatttcatccatgtccctacaaaggacatgaactcatcattttttatggctgcatagtattccatggtgtatatgtgccacattttcttaatccagtctatcattgttggacatttgggttggttccaagtctttgctattgtgaatagtgccgcaataaacatatgtgtgcatgtgtctttatagcagcatgatttatagtcctttgggtatatacccagtaatgggatggctgggtcaaatggtatttctagatccctgaggaattgccacaccgacttccacaagggttgaactagtttacagtcccaccaacagtgtaaaagtgttcctatttctccacatcctctccagcacctgttgtttcctgactttttaatgattaccattctaactggtgtgagatggtatctcactgtggttttgatttgcatttctctgatggccagtgatggtgagcattttttcatgtgttttttggctgcataaatgtcttcttttgagaagtgtctgttcacgtccttcgcccactttttgatggggttgctaaactttttttttttaaaaaagtttaaaatattggccgggcgcagtggctcacgcctgtaatcctagcactttgggaggccgaggcgggaggatcacgaggtcaggagttcgagaccagcctggccatcgtggtgaaaccctgtctctactaaaaatacaaaagttagctggacgtggtggcgggcgcctgtaatcccaccttcttggaaggctgatgcaggagaattgcttgaactcgggaggcggaggttgcagtgagccgagattgtgccacggcactccagcctgggcgaaagagcgagactctgtctcaagaaaaacacacacacacacacacacacacacacacacacacacaaacaaaagtttaaaatatcaattaggtatatttgtatttaactgtttcatgaatctttgtttctaacctttctcctataacccattctttttttttttttttttttgagacaaggtcttgctctgttgcccaggctggatggagtgcagtggcgcgatcatagctcactgtggcctcaaactccctgctcaagtgatcctccagactcccaagcagctgggactacaggtgcgcaccacgcctccaggctaattaaaaaaatttttcttttgtggagacagggtctcgctatattgcccaggctggtttcaaactcttgggctccagcaatcctgtcgcctcgcctcccaaagtgctgggattacaggcgcgagtggccgctggggttcttaacttgggtctttgaatcgccttaagaagtgtctctgaatctgggaattgcaagcaacgtttctgtgaggaccttcacacagttcatccactcttcgaagagtatggaccgaaaaaggcatagagcattcactgcacgtagagaaaatcagcaacccctgctccccaccctcagcctgaggtgcctacctccacgtggggtcaggaggcggaagcgaaaccagaagaaaaaaccctgagatctataaggcagttcaggtccctagtgacatgagctaaagagaacttggacgccaggactgtagcagacagagtccggcttcggggttcgcatcagtcgcacggaaggtggaaatagcccccaagttgtaacccgccgcggtcttccctcaacagcgcaggcgccaggactgctaggacgccgcgcacctcccgcgatgccccgccccggcgcgaggcaagacgggaaagtcaagatggacgcgtccatttgaacgtctcgcacgccttcctgccattagcactcgagcccgctgctgttgcccgttcttcctccagaataggggagggagagggaatgagaagctgctgcggcccaagagtcactgtgaaggaccccgccgctgccctcgggcctcctcggcccctgcgcctccggggagcagccggggctcgccgcgcctgacgcgtcccgagttatacaggtgcgggcgccgtaccgcagcacttggtggtctgtcgcgcgccgcgtgactctcgcacccgtcccgaggccgagcctcccctggtggccgtaggtctggaaacccggggtactgggaacccgagggagggccttgagcgtgctccggggctgagggggcctgcgggcgctcctggcctgcgggctggggtgctccttccggctcctgcttgccaacctctttcctgagctgtgcgtagcatcccatgtgcagcctcagctttcagactggcctccagcccctctgagctgtttttctgagcctcgggctctcagcctgttttcaccgtcctctagaaaggctggggaagctcttgtggagacttaagctcccgttagtgtgcatttgggtctcttttttttttttttggcagggtagtgtttgtaggaatcattgctgatactgttatttatagcatataaatttaatagtatttttacgtgtagctgtttatgttgcacctaacaagtaaaaacatttctaaaagtttggggtactgaaaaagtattaaatatgtggcattaatcggtacaaaatgataattctttaacaattctgtaattttctctcaaagttataagaaaataacattataaaattgcagaactaaagtttcataaagtcaaaagttcgttgatgttggttattctgttgaataaaatataggaagaccagctgaattttgttttcttttaaggtttttttttttgtggggttttctttttttttttttttttgagaaggagtcttgttctgtctcctaggctgg

SEQ ID NO: 2090 - DNA, 6000 bp, Homo sapiens
ctcctgagtagctgggattacaggcgcctgccactgtgcctggctaatttttttttttgtatttttagtagagatggggatttcaccatgttggccaggctggtctcaaactcctgacctcaggtgatccacccaccttggcctcccaaagtgctgggattacaggcgtgagccactgtgcccagcctttttttttttttttcttttaatcacagttcttaacaaacttccataaatacccaaaaggggaaaagaaatttgagaatatgaaagaggttaataaatagccaaatatgtcaaccattgaaaggacacctatttttattttagattaaaccactgatttgcaacttttattgaaataaatgtcatttgttaaaaacaaggttaattttgtaacttgatctcaacttgtttttttaatagcagttaaatttttacataaaacattgcaaaacttcaactaaaggctgggcgtggtggctcacgcctgtaatctcagcactttgggaggctgagatgggcagatcacgaggtcaggagatcaagaccatcctggctaacatggtgaaaccccgtctctactaaaaatacaaaaaattagccaggcgtggtggtgggtacctgtagtcccagctacttgggaggctgaggcaggagaatgcgtgaacccgggaagcagtgcttgcagtgagctgagatcgcgccactgcactccagcctgggagacagagtgagactccatctcaaaaaaaaaaaacaaacaaaaaaagcttcaactaaagaacaaataaaacattcagacacaagttgacactttaaaaattctatagatttcaacaaataatgaatgactgtatattaatttatattagtcctgtggtcagaatacattttccagttaaaacatttttaatacatcttctgtacggcacggatagcttctagtgggaattagtgtatagtctgttcttgatgaagacaacactagacagatgttgcctgatatctggataatgctgaatgtgacaaaaccagcgagacgcattaagatatttcttcttttcttgaactgtcaggtcaactataaagcgatgaagtccatagtacaataggatatctgcaaaggtagttatatcctgtaaggtagactttatcttcaagatatgaaataagatccttcaacagggtgtgggctgggcatggtggctcacgcctgtaatcccagcactttgggaggctgaggtgggcgtatcacaaggtcaggagatcgagaccatcctggctaacatggtgaaaccctgtctctaataaaaaaaatacaaaaaaattagccgggcgttgttggcgggcgcctgtagtcccagctattcgggaggctgaggcaggagaatggcatgaacccaggaggcagagcttgcagtgagcagagatagcgccactgcactccagcctgggtgacagagtgagactccatctcaaaaaaaaaaaaaactaaaaaaaaaaaccagtgtgtggctatcatttttactggagtgactctgtattgtaaccattgctgaactattgctttttcttctgcagtactccctagcaaatatcctttgttagcttgcttgactagatgagctgctatagtagtcaatcctgttagacttggaccattgtttgtttgaagaaccagaatctgtcactcatcctgagcactttatttattattccccttactcagtcccagggacttctctagtagtgacaacttggcggctgctgccatcttctggcggtagctcctggaagagaccaacgtttaactttttgagaacctgtcaaactgttttaccaagcggctgcaccattttacattcctatcaattatgtacaaggggtcaaataactccaaatcttcataaacacttgttattgtctgtctttttgattacagctatcctactgggtgtgaagtggttttggcttacatttccctaatgactaatgatgttggtcatcttttatcgtcctttttggccacttgtataatatatttttggcaaaatgtcgttcaaatcctctgcccatttttagactgggttgtctttttatgttgagttgtaagacttcttcacatattctggataacagactcttatcagattatttgcaaatcttttcccccattctgtgagttgtcttttcactttcttgacaatacctttgaagcacaaaatttaaaacttttctccaacttatcaaattttttcctaggttccttgtgctttaggtaccatatttaagacatcattgcctaatccaaggttatgaagatttacagctatgttttcttctaagtgtatagctttactctttttttttttttttgagacgaagtctcgctcttgtaccccaggctggagtgcaatggcgtgatctcgactcattgcaaccgccgcttcccaggttcaagtgattctcctgtctcagcctcctgagtagctgggattacaggcgcctgccaccacgcctggctattttatttatttatttattttttgtatttttagtagagatggggtttcaccatgttggccaggctggtcttgaactcctgacctcaggtgatccgcctgccttggtctcccaaagtgctgggattacaggcgtgagccaccgcgcccggcagctttactctcatatctgggtctttgatgcactttaatttttgtatatggtgtgtagtatgaatcaagattcattttttccatctgaatatacaaatattgcaacactaactgttgaaaagatgcttccctccttcatttgcttttgcaagtttgtaaaacaacaacaaaatcaactggcctcactctgtaactgagggctgcacatattgtcttccttccaaagagtacaatatggaaagtggggaaatgtaacatcatagtagagaaatctgacaaacactatctcagttaggtgatcaaggttgacatcagcagcgataagtgatactgttgataagtacctttgatatgatgtgatgaaaatgacactttatgatcttccttcctgaaatccatatccccaggctaatcatgaagaaacatcagacaaatttcagttaagggatattctacaaactaatgcagtggcttgcacctggagtcccatctgcttggggggttgaagcaggaggactgcttgagcacaggagttcaaggctgcagtgagctgtgtttgtgccaatgcactctagcctaggcaacacagcaagactctcttaaaaaaaactgaataaagtatgaattttaattactaataatgtgttgatatttcattaattttaacaaatgtactatactaatgtaaaatactaataatagggaaactggatgtagaaactgggtatagggtatgtgggaaatttttggactatctgcagtttttctgtaaatctaaactttattattatactttaagttttagggtacatgtgcacaatgtgcaggttagttacatatgtatacatgtgccatgctggtgtgctgcacccattaactcatcatttagcattaggtatatctcctaaagctatccctcccccctccccccaccccacaacagtccccagagtgtgatgttccccttcctgggtccatgtgttctcattgttcaattcccacctatgagtgagaatatgcggtgtttggttttttgttcttgcgatagtttactgagaatgatgatttccaatttcatccatgtccctacaaaggacatgaactcatcattttttatggctgcatagtattccatggtgtatatgtgccacattttcttaatccagtctatcattgttggacatttgggttggttccaagtctttgctattgtgaatagtgccgcaataaacatatgtgtgcatgtgtctttatagcagcatgatttatagtcctttgggtatatacccagtaatgggatggctgggtcaaatggtatttctagatccctgaggaattgccacaccgacttccacaagggttgaactagtttacagtcccaccaacagtgtaaaagtgttcctatttctccacatcctctccagcacctgttgtttcctgactttttaatgattaccattctaactggtgtgagatggtatctcactgtggttttgatttgcatttctctgatggccagtgatggtgagcattttttcatgtgttttttggctgcataaatgtcttcttttgagaagtgtctgttcacgtccttcgcccactttttgatggggttgctaaactttttttttttaaaaaagtttaaaatattggccgggcgcagtggctcacgcctgtaatcctagcactttgggaggccgaggcgggaggatcacgaggtcaggagttcgagaccagcctggccatcgtggtgaaaccctgtctctactaaaaatacaaaagttagctggacgtggtggcgggcgcctgtaatcccaccttcttggaaggctgatgcaggagaattgcttgaactcgggaggcggaggttgcagtgagccgagattgtgccacggcactccagcctgggcgaaagagcgagactctgtctcaagaaaaacacacacacacacacacacacacacacacacacacacaaacaaaagtttaaaatatcaattaggtatatttgtatttaactgtttcatgaatctttgtttctaacctttctcctataacccattctttttttttttttttttttgagacaaggtcttgctctgttgcccaggctggatggagtgcagtggcgcgatcatagctcactgtggcctcaaactccctgctcaagtgatcctccagactcccaagcagctgggactacaggtgcgcaccacgcctccaggctaattaaaaaaatttttcttttgtggagacagggtctcgctatattgcccaggctggtttcaaactcttgggctccagcaatcctgtcgcctcgcctcccaaagtgctgggattacaggcgcgagtggccgctggggttcttaacttgggtctttgaatcgccttaagaagtgtctctgaatctgggaattgcaagcaacgtttctgtgaggaccttcacacagttcatccactcttcgaagagtatggaccgaaaaaggcatagagcattcactgcacgtagagaaaatcagcaacccctgctccccaccctcagcctgaggtgcctacctccacgtggggtcaggaggcggaagcgaaaccagaagaaaaaaccctgagatctataaggcagttcaggtccctagtgacatgagctaaagagaacttggacgccaggactgtagcagacagagtccggcttcggggttcgcatcagtcgcacggaaggtggaaatagcccccaagttgtaacccgccgcggtcttccctcaacagcgcaggcgccaggactgctaggacgccgcgcacctcccgcgatgccccgccccggcgcgaggcaagacgggaaagtcaagatggacgcgtccatttgaacgtctcgcacgccttcctgccattagcactcgagcccgctgctgttgcccgttcttcctccagaataggggagggagagggaatgagaagctgctgcggcccaagagtcactgtgaaggaccccgccgctgccctcgggcctcctcggcccctgcgcctccggggagcagccggggctcgccgcgcctgacgcgtcccgagttatacaggtgcgggcgccgtaccgcagcacttggtggtctgtcgcgcgccgcgtgactctcgcacccgtcccgaggccgagcctcccctggtggccgtaggtctggaaacccggggtactgggaacccgagggagggccttgagcgtgctccggggctgagggggcctgcgggcgctcctggcctgcgggctggggtgctccttccggctcctgcttgccaacctctttcctgagctgtgcgtagcatcccatgtgca

SEQ ID NO: 2091 - DNA, 6000 bp, Homo sapiens
tttagaaacaaaaaaaaaaagcacatccatcagagaacagatgagctaaggtgaagaggtaattgtagctaaatagaaatttgctgactgaacgtgaagctgtcccttcctgctatggacttcagattttagcccacttgaattgctccatatcctccaagccatggccatcccttgactctctgggctcccaagcacttgctgccttcatcacacagtttgagttaaggcagaaagactggtttccatgtacactttgtggaagctttctcatttctttatataatctctgtcctttgtctactgctttaaaatctagaaattgtttacaaacacaaaggtgatcctttaaaagctcaaagctgattgtgtcaccaatatataccactcttaatggcttcccattaaactttgagtaaagactttatggagcctacataaggccatgactacctggctcttattttcctcctcatcctcatctcaccaactcactctccactcctatacccctcactccttccccctcctctctctgagctccagactcccaattacctacttccaccctttttgacccccagggacttatctcagcctggaattttccctctttgctctccactgaactgtccactcccagtctaagacatgtgcttatgtcacacgcccttaccgtgcttatctcagtttgtaattatctactcatttagaaaagtgttgatgaaggtcttcactgtcagctttcaggatagcaggaatcatagctgattttacttacttaacggggtttcattctttgtaactttttttttttttgagatggagactcactcttgcccaggctggagtgcaatggcatgatctcggctcactgcaacctccacctcctgggttcaagtgattctcctgcttcagcctcccgagtagctgggattacagatgcctgtcaccacgcccagctaattttttgtattttttgtaaagacggggtttcatcatgttggccaggctggtctcgatctcctgacctcaggcgatccacccacctcagcctcccaaagtgctgtgattacaggcatgagccacggcacccagccactccttttttacttatgggtgagaagccattagagattatttcttcttttctttctctcttcactaaggcaccagggtcactaagtagtaggatactttgaactagaactcaagaaattgagttttaattttacctcacactctcatatgaattctccatgtgacctcgggccatacttcccctgtaccctgtttcctcttttataaaagtaagagtttaaactagatggtctccgacatgcatccttctctaacatattctggaaccttcaataaactaagataaagcagaataattaaaacttaatttaaaagaacacaggaaaggaagcagctacattaagcaaaagagacatcctcatggttgaagaagtgtatgccctggtgtctggatcccatttaggaaacttggtaaccttgcaatcttgggcagattgcttaatttctctagaccatgacttcctcttctgtaagatgtgataagaacatctacctcacaggtttcatgagaggattaaatgagataatgtattataatcccttgaacatggtaggctgttatgttaagtcctttcctccttctctgtagctatcatggaatttaaaaacacattataactagagcatgagttgcgactaaaggctcaattgtctctgcatgtgttggctcatgcatgctttattcctctgaagagcttttataccaagtgaaaggaaataattgcatttccctgaaaattcacaggaaaaagttatgtttttctcttcattcaagtgattctgttagacccaaccacatgcaacaattttaaagttgcttccaaatatatttacaaatatttcctgtcttcaaggaacaatggcaagaccatgactcaggttcacatccggattccaccactaaccatgtacccaattacttcagtcaccttcattcaggtcttacatatcacagaataaaatcagatttcatcagaggaggtgaagacagggagaggagatatttcaatcccttctccgcaacccccgttttttttttttttttaacaaggatcctagagttactgaatgatagcacgtttgagggggaaagaccctaaggatgatctttataagccatcacttggtgttggtggtgataagagactcgagtatctttatgcagtggaaagagaagattggactcggaatcagaagcttgagttcaagcactggtttcatcagtcttgtgatcttgggttggtcacttaacctcttcaagggtcctcagctgtgaaagaggatagtatcagctaattcttgtaggtgcagtgaggaggcagtgagatagtgcaggtaaactataaaacaattgtcacatgaaacgcatcacagtgattctttggacccacaagctccaatcttataaaacatatccagtcacccaccaacatagatcatctcaccttgcatatctgattttgtggatcatggggaaaaactgctgattcctagcaaaacccatggcataggataagtgcacaataatttttttttcctaaatgatttagatgacagtgactcattaagggtttcctgaggcctcctcagagtcgagaggtgggtgcctgaagccacccaaagtccctgtcacaggatggctcccaacgcacacaccacaggcctgcccagtatgttccactatctacccagtagagccctgcccagtacgttccactgtcccttccctagaagaggtgactgttgttcacagtcccagaaaagcgggctccccaaaacaatgcaaggacccacctctctctgaacctcacccaccctagttttcctttaaaaatcaatttacaagaagatcatgtgaaggaaaaggttgggtgatattctaacccaagttagctgtttctcaaccaagttctctttgaaaaattcaacaaccacctttggggaattatttacaacagaggagtgaggatgggaccaggataggtattgcctatgttggtggaaccagggtttttttcctggattaccaaagagatggtatgcattgctcccagaagctaaatatcttcaggctttcaatggtggccttcacctgaaaatgttatccctgttgaagctttcaagccagtattttcataagaactatattttctttggtgaactgaggcattataatgatgactatacaggttcttgagtgactgaagccatcattagcattgtcattatttttgtttagttgcatctccatagcagctcacattcacaatgtgctttgcaattgttccttagcaatagccctcacaagattctcaggaggagagggttaatcaggattaacatttctgtgttgcctaaagaggaaccaaggtaagcagaaatgtagccagttggctggcatcactgttgcttcaggattcatccttagacacccaagcttctaccctagtctggtgctacacttacattgcttacatccaagtgtggttatttctgtggctcctgttataactattatagcaccaggtctatgaccaggagaattagactggcattaaatcagaataagagattttgcacctgcaatagaccttatgacacctaaccaaccccattatttacaattaaacaggaacagagggaatactttatccaactcacacaagctgctttcctcccagatccatgcttttttgcgtttattattttttagagatgggggcttcactatgttgcccacactggactaaaactctgggcctcaagtgattgtcctgcctcagcctcctgaatagctgggactacaggggcatgccatcacacctagttcatttcctctatttaaaatatacatggcttaaactccaactgggaacccaaaacattcatttgctaagagtctggtgttctaccacctgaactaggctggccacaggaattataaaagctgagaaattctttaataatagtaaccaggcaacaccattgaaggctcatatgtaaaaatccatgccttcctttctcccaatctccattcccaaacttagccactggcttctggctgaggccttacgcatacctcccggggcttgcacacaccttcttctacagaagacacaccttgggcatatcctacagaagaccaggcttctctctggtccttggtagagggctactttactgtaacagggccagggtggagagttctctcctgaagctccatcccctctataggaaatgtgttgacaatattcagaagagtaagaggatcaagacttctttgtgctcaaataccactgttctcttctctaccctgccctaaccaggagcttgtcaccccaaactctgaggtgatttatgccttaatcaagcaaacttccctcttcagaaaagatggctcattttccctcaaaagttgccaggagctgccaagtattctgccaattcaccctggagcacaatcaacaaattcagccagaacacaactacagctactattagaactattattattaataaattcctctccaaatctagccccttgacttcggatttcacgatttctcccttcctcctagaaacttgataagtttcccgcgcttccctttttctaagactacatgtttgtcatcttataaagcaaaggggtgaataaatgaaccaaatcaataacttctggaatatctgcaaacaacaataatatcagctatgccatctttcactattttagccagtatcgagttgaatgaacatagaaaaatacaaaactgaattcttccctgtaaattccccgttttgacgacgcacttgtagccacgtagccacgcctacttaagacaattacaaaaggcgaagaagactgactcaggcttaagctgccagccagagagggagtcatttcattggcgtttgagtcagcaaaggtattgtcctcacatctctggctattaaagtattttctgttgttgtttttctctttggctgttttctctcacattgccttctctaaagctacagcctctcctttcttttcttgtccctccctggtttggtatgtgacctagaattacagtcagatttcagaaaatgattctctcattttgctgataaggactgattcgttatactgagggacagcagaactagtttcctatgagggcatgggtgaatacaactgaggcttctcatgggagggaatctctactatccaaaattattaggagaaaattgaaaatttccaactctgtctctctcttacctctgtgtaaggcaaataccttattcttgtggtgtttttgtaacctcttcaaactttcattgattgaatgcctgttctggcaatacattaggttgggcacataaggaataccaacataaataaaacattctaaaagaagtttacgatctaataaaggagacaggtacatagcaaactaattcaaaggagctagaagatggagaaaatgctgaatgtggactaagtcattcaacaaagttttcaggaagcacaaagaggaggggctcccctcacagatatctggattagaggctggctgagctgatggtggctggtgttctctgttgcagaagtcaagatggccaaagttccagacatgtttgaagacctgaagaactgttacaggtaaggaataagatttatctcttgtgatttaatgagggtttcaaggctcaccagaatccagctaggcataacagtggccagcatgggggcaggccggcagaggttgtagagatgtgtactagtcctgaagtcagagcaggttcagagaagacccagaaaaactaagcattcagcatgttaaactgagattacattggcagggagaccgccattttagaaaaattatttttgaggtctgctgagccctacatgaatat

SEQ ID NO: 2092 - DNA, 6000 bp, Homo sapiens
caaccatttagccagtctctaagaagttccaaactttccctcatcttcttgttttcttctgagccctttaaattcttccaatctttgcccattacccagttccaaagttgactccacatttttagatatctttatagctatatgccccattcttcagtaccagttttctgtattaagccattcttttttttttctttttttcttttttttgagacggagtctcactctgtcgcccaggctggagtgcagtggtgcaatctcggctcactgcaagctccgcttcccgggttcatgccattctcctgcctcagcctccagagtagctgggactacaggcgcccaccaccacgcccgactaattttttgtatttttagtagagatggagtttcaccgtgttagccggtggtctcaatctcctgacctcatgttccacccccctcagcctcccacagtgctgggattacaggcgtgagccaccatgcccagcctgtattaagccactcttatgttgctataaagaaatatctgaggctgggtaatttatatggaaatgaagtttattttggctcacagttctgcaggctgtacaagcatggcacccacatctgctcagcttttggcgaagccttaggaaactttcaatcatggcagagagcgaaggggagcagggatgtcacatgtcgaaagcagtaacaagagagcaatgggggagtgccacacacttttaaacaaccatatctcaggagaactcattcactattgagaggacagtaccaagctattcatgagggatctgcccccatgatccaaacacctcccaccaggccctacctccaacactggggattacatttcaacatgagatttggagggaacaaatacccagactacatcaatcacccatctccagagaaaaggaaaagggaatttagaaacaaaaaaaaaaagcacatccatcagagaacagatgagctaaggtgaagaggtaattgtagctaaatagaaatttgctgactgaacgtgaagctgtcccttcctgctatggacttcagattttagcccacttgaattgctccatatcctccaagccatggccatcccttgactctctgggctcccaagcacttgctgccttcatcacacagtttgagttaaggcagaaagactggtttccatgtacactttgtggaagctttctcatttctttatataatctctgtcctttgtctactgctttaaaatctagaaattgtttacaaacacaaaggtgatcctttaaaagctcaaagctgattgtgtcaccaatatataccactcttaatggcttcccattaaactttgagtaaagactttatggagcctacataaggccatgactacctggctcttattttcctcctcatcctcatctcaccaactcactctccactcctatacccctcactccttccccctcctctctctgagctccagactcccaattacctacttccaccctttttgacccccagggacttatctcagcctggaattttccctctttgctctccactgaactgtccactcccagtctaagacatgtgcttatgtcacacgcccttaccgtgcttatctcagtttgtaattatctactcatttagaaaagtgttgatgaaggtcttcactgtcagctttcaggatagcaggaatcatagctgattttacttacttaacggggtttcattctttgtaactttttttttttttgagatggagactcactcttgcccaggctggagtgcaatggcatgatctcggctcactgcaacctccacctcctgggttcaagtgattctcctgcttcagcctcccgagtagctgggattacagatgcctgtcaccacgcccagctaattttttgtattttttgtaaagacggggtttcatcatgttggccaggctggtctcgatctcctgacctcaggcgatccacccacctcagcctcccaaagtgctgtgattacaggcatgagccacggcacccagccactccttttttacttatgggtgagaagccattagagattatttcttcttttctttctctcttcactaaggcaccagggtcactaagtagtaggatactttgaactagaactcaagaaattgagttttaattttacctcacactctcatatgaattctccatgtgacctcgggccatacttcccctgtaccctgtttcctcttttataaaagtaagagtttaaactagatggtctccgacatgcatccttctctaacatattctggaaccttcaataaactaagataaagcagaataattaaaacttaatttaaaagaacacaggaaaggaagcagctacattaagcaaaagagacatcctcatggttgaagaagtgtatgccctggtgtctggatcccatttaggaaacttggtaaccttgcaatcttgggcagattgcttaatttctctagaccatgacttcctcttctgtaagatgtgataagaacatctacctcacaggtttcatgagaggattaaatgagataatgtattataatcccttgaacatggtaggctgttatgttaagtcctttcctccttctctgtagctatcatggaatttaaaaacacattataactagagcatgagttgcgactaaaggctcaattgtctctgcatgtgttggctcatgcatgctttattcctctgaagagcttttataccaagtgaaaggaaataattgcatttccctgaaaattcacaggaaaaagttatgtttttctcttcattcaagtgattctgttagacccaaccacatgcaacaattttaaagttgcttccaaatatatttacaaatatttcctgtcttcaaggaacaatggcaagaccatgactcaggttcacatccggattccaccactaaccatgtacccaattacttcagtcaccttcattcaggtcttacatatcacagaataaaatcagatttcatcagaggaggtgaagacagggagaggagatatttcaatcccttctccgcaacccccgttttttttttttttttaacaaggatcctagagttactgaatgatagcacgtttgagggggaaagaccctaaggatgatctttataagccatcacttggtgttggtggtgataagagactcgagtatctttatgcagtggaaagagaagattggactcggaatcagaagcttgagttcaagcactggtttcatcagtcttgtgatcttgggttggtcacttaacctcttcaagggtcctcagctgtgaaagaggatagtatcagctaattcttgtaggtgcagtgaggaggcagtgagatagtgcaggtaaactataaaacaattgtcacatgaaacgcatcacagtgattctttggacccacaagctccaatcttataaaacatatccagtcacccaccaacatagatcatctcaccttgcatatctgattttgtggatcatggggaaaaactgctgattcctagcaaaacccatggcataggataagtgcacaataatttttttttcctaaatgatttagatgacagtgactcattaagggtttcctgaggcctcctcagagtcgagaggtgggtgcctgaagccacccaaagtccctgtcacaggatggctcccaacgcacacaccacaggcctgcccagtatgttccactatctacccagtagagccctgcccagtacgttccactgtcccttccctagaagaggtgactgttgttcacagtcccagaaaagcgggctccccaaaacaatgcaaggacccacctctctctgaacctcacccaccctagttttcctttaaaaatcaatttacaagaagatcatgtgaaggaaaaggttgggtgatattctaacccaagttagctgtttctcaaccaagttctctttgaaaaattcaacaaccacctttggggaattatttacaacagaggagtgaggatgggaccaggataggtattgcctatgttggtggaaccagggtttttttcctggattaccaaagagatggtatgcattgctcccagaagctaaatatcttcaggctttcaatggtggccttcacctgaaaatgttatccctgttgaagctttcaagccagtattttcataagaactatattttctttggtgaactgaggcattataatgatgactatacaggttcttgagtgactgaagccatcattagcattgtcattatttttgtttagttgcatctccatagcagctcacattcacaatgtgctttgcaattgttccttagcaatagccctcacaagattctcaggaggagagggttaatcaggattaacatttctgtgttgcctaaagaggaaccaaggtaagcagaaatgtagccagttggctggcatcactgttgcttcaggattcatccttagacacccaagcttctaccctagtctggtgctacacttacattgcttacatccaagtgtggttatttctgtggctcctgttataactattatagcaccaggtctatgaccaggagaattagactggcattaaatcagaataagagattttgcacctgcaatagaccttatgacacctaaccaaccccattatttacaattaaacaggaacagagggaatactttatccaactcacacaagctgctttcctcccagatccatgcttttttgcgtttattattttttagagatgggggcttcactatgttgcccacactggactaaaactctgggcctcaagtgattgtcctgcctcagcctcctgaatagctgggactacaggggcatgccatcacacctagttcatttcctctatttaaaatatacatggcttaaactccaactgggaacccaaaacattcatttgctaagagtctggtgttctaccacctgaactaggctggccacaggaattataaaagctgagaaattctttaataatagtaaccaggcaacaccattgaaggctcatatgtaaaaatccatgccttcctttctcccaatctccattcccaaacttagccactggcttctggctgaggccttacgcatacctcccggggcttgcacacaccttcttctacagaagacacaccttgggcatatcctacagaagaccaggcttctctctggtccttggtagagggctactttactgtaacagggccagggtggagagttctctcctgaagctccatcccctctataggaaatgtgttgacaatattcagaagagtaagaggatcaagacttctttgtgctcaaataccactgttctcttctctaccctgccctaaccaggagcttgtcaccccaaactctgaggtgatttatgccttaatcaagcaaacttccctcttcagaaaagatggctcattttccctcaaaagttgccaggagctgccaagtattctgccaattcaccctggagcacaatcaacaaattcagccagaacacaactacagctactattagaactattattattaataaattcctctccaaatctagccccttgacttcggatttcacgatttctcccttcctcctagaaacttgataagtttcccgcgcttccctttttctaagactacatgtttgtcatcttataaagcaaaggggtgaataaatgaaccaaatcaataacttctggaatatctgcaaacaacaataatatcagctatgccatctttcactattttagccagtatcgagttgaatgaacatagaaaaatacaaaactgaattcttccctgtaaattccccgttttgacgacgcacttgtagccacgtagccacgcctacttaagacaattacaaaaggcgaagaagactgactcaggcttaagctgccagccagagagggagtcatttcattggcgtttgagtcagcaaaggtattgtcctcacatctctggctattaaagtattttctgttgttgttt

SEQ ID NO: 2093 - DNA, 6000 bp, Homo sapiens
agagaagcattttatcatagcttttagaagagaagtatttttcagcatcataagcacacaattccaaggacagataccttcaagggattgcttttgacagttatgacaaagtcttaaagaagaataaaaggacaaaggaaatcctccagcaacaaagctgccacttatagatgagaaagtgaatgggaataaggaagaaactcagaaaagggaagagagatcactaaaaaccctgatttggaaagtcccagtactaccctgagaggagaaagaaacaaattcacacagcacgtcaccgccagaagaagaaaggagggaagacaagggaacagagaggatctcaatcctaaaaggacaatgtggaaacatttaggggacagaggtgaatctgccaggccaatgtagtttagaatgtcactcaatcactgagaatgagaaaggagtctgccgatgggcaccatgtggacaggagatgaggcaataaacatatgtaacaattaaaagtgagaaataaagatctggttttggttcagttaacccatatttgagtcgtagttccagcatttactgtttgtgcggtcttaaataatttattgtctcaacctcagtttctgcataggtcaaatggttcaatattatctactttaaaggttattatgaagagttaataagataatgagggaaaaaaaggtacctggcacttagtaggtgctcaataaaggacggctttttttttttaagtattgcttctaaatttgtatgtaagaaaaaatgatataatacaatgatataagacaggggaccgcaggacaagtccagccacacccattcatttatgtattatctgactgcttttctgaaatgatgcaaggttgagtagttgtacctgaaacatttattatctggccctttacagaaaatgtttccagaccctggataagtggtaccagagccccctctgtttgtggtcccctctcttatacccactaggtgtgagaaaagacatagagtaggagagccctgccatccatcttacccacccaggggctttttctgatggatccaaaggaaggacaaggtcttattggtctcccagaactgacataacaactccgacatcagggaaaagccattggagactacatagctcgccagccccagccacctgctcatatatctaagccctccttgttctagaccagggaggagaatggaatgtcccttggactctgcatgtccccaatctgagaacctggatccaagagggagaagaagcccattggagatgatgccataaaggaagtggaagcgatatgataaaaatcatagtgcccattcccaaataatcccagaagcagaagggaaaggagagaaatatccacaaagacaggtgtgggtacacacaacatttttcatactttaagatcccagagggactcatggaaatgatacaagaaaatgactcataagaacaaatattaggaagccagtgccaagaatgagatgggaaattggggaaaatgttgggggcagattgcttagttctgttctaagcaagagggtgaacaaggaaggaacagctcactacaaagaacagacatcactgcatgtacacacaataatataagaactaacccatgattattttgcttgtcttcttgttcaaaatgattgaagaccaatgagatgagatcaaccttgataactggctgcgaagcccatgattagacacaagatggtatcagggcacttgctgctttgaataaatgtcagtctcctgtcttggaagaatgacctgacagggtaaagaggaacttgcagctgagaaaggctttagtgactcaagagctgaataattccccaaaagctggagcatcctggcatttccagctccccatctctgcttgttccacttccttggggctacatcaccatctacatcatcatcactcttccactccctcccttagtgccaactatgtttatagcgagatattttctgctcattggggatcggaaggaagtgctgtggcctgagcggtctccttgggaagacaggatctgatacatacgttgcacaacctatttgacataagaggtttcacttcctgagatggatgggatggtagcagatttgggtccaggttacagggccaggatgagacatggcagaactgtggagactgttacgtcagggggcattgccccatggctccaaaatttccctcgagcgaaagcatcaggggctcatgcaacctggatactagtgctgcttcaaccacactgtgctattggatgagtcacttccaccctcctagccttgatttcttcgtctgctgttcacattcaaatagctattcatgtcttcatctctgtggtcccaccatatcccaccagacaatcattagggctcctcttagctggcagattctgaggtcctggatgctacaattggaagatggagaagtagaagctcaaggtttctgacctgtatcccaagtcccagaagcagaatggactaactcagagctgatgctcgggtcccttgcatatctcccttcctgtcactggctttgatcctccttcgttcagcttgtaatcacatcaacagaccaaagacatctctgtgttctgtcaggagagttcacagagccaccaaccctccagaccctgctggttgccgcataaagactctgaggaagggtttgaggctgctgtgatcatgcaatgaatgcatgattgtaccactgcactccagcctgggggataaaggtagatcctgtctaggagagagagagagagaaagagaaagagagagagaagggagggagagacaaagaaaaagagagagagggagggagaaagaaagagagaaagaaaagagaaaagaaagaaaaagaaagaaagagagagagggagggagggagagagaaagaaagaaagaaagagaaagagagaaagagagaaagagaaagaaaggaagaaagaaagaaagaaagaaagaaagaaagaaagaaagaaagaaaagaaaagaaagaaagagagagagaaagaaaaagaaagaggaaggaaggaaggaaggaagaaagacaggctctgaggaaggtggcagttcctacaacgggagaaccagtggttaatttgcaaagtggatcctgtggaggcaaaacagaggagtcccctaggccacccagacagggcttttagctatctgcaggaccagacaccaaatttcaggagggctcagtgttaggaatggattatggcttatcaaattcacaggaaactaacatgttgaacagcttttagatttcctgtggaaaatataacttactaaagatggagttcttgtgactgactcctgatatcaagatactgggagccaaattaaaaatcagaaggctgcttggagagcaagtccatgaaatgctctttttcccacagtagaacctatttccctcgtgtctcaaatacttgcacagaggctcactcccttggataatgcagagcgagcacgatacctggcacatactaatttgaataaaaatgctgtcaaattcccattcacccattcaagcagcaaactctaccacctgaatgtacatgccaggcactgtgctagacttggctcaaaaagatttcagtttcctggaggaaccaggaggagcaaggtttcaactcagtgctataagaagtgttacaggctggacacggtggctcacgcctgtaatcccaacactttgggaggccgaggcgggcagatcacaaggtcaggagatcgagaccatcctggctaacatggtgaaaccctgtctctactaaaaatacaaaaaattagccgggcgtggcggcaggtgcctgtagtcccagctgctggggaggctgaggcaggagaatggtgtgaacccgggaggcggaacttgcagggggccgagatcgtgccactgcactccagcctgggcgacagagtgagactctgtctcaaaaaaaaaaaaaaagtgttatgatgcagacctgtcaaagaggcaaaggagggtgttcctacactccaggcactgttcataacctggactctcattcattctacaaatggagggctcccctgggcagtaccctggagcaggcactttgctggtgtctcggttaaagagaaactgataactcttggttggtattaccaagagatagagtctcagatggatattcttacagaaacaatattccacttttcagagttcaccaaaaaatcattttaggcagagctcatctggcattgatctggttcatccatgagattggctagggtaacagcacctggtcttgcagggttgtgtgagcttatctccagggttgccccaactccgtcaggagcctgaaccctgcataccgtatgttctctgccccagccaagaaaggtcaattttctcctcagaggctcctgcaattgacagagagctcctgaggcagagaacagcacccaaggtagagacccacaccctcaatacagacagggagggctattggcccttcattgtacccatttatccatctgtaagtgggaagattcctaaacttaagtacaaagaagtgaatgaagaaaagtatgtgcatgtataaatctgtgtgtcttccactttgtcccacatatactaaatttaaacattcttctaacgtgggaaaatccagtattttaatgtggacatcaactgcacaacgattgtcaggaaaacaatgcatatttgcatggtgatacatttgcaaaatgtgtcatagtttgctactccttgcccttccatgaaccagagaattatctcagtttattagtcccctcccctaagaagcttccaccaatactcttttcccctttcctttaacttgattgtgaaatcaggtattcaacagagaaatttctcagcctcctacttctgcttttgaaagccataaaaacagcgagggagaaactggcagataccaaacctcttcgaggcacaaggcacaacaggctgctctgggattctcttcagccaatcttcattgctcaagtatgactttaatcttccttacaactaggtgctaagggagtctctctgtctctctgcctctttgtgtgtatgcatattctctctctctctctctttctttctctgtctctccctctccttccctctctgcctccctctctcagctttttgcaaaaatgccaggtgtaatataatgcttatgactcgggaaatattctgggaatggatactgcttatctaacagctgacaccctaaaggttagtgtcaaagcctctgctccagctctcctagccaatacattgctagttggggtttggtttagcaaatgcttttctctagacccaaaggacttctctttcacacattcattcatttactcagagatcatttctttgcatgactgccatgcactggatgctgagagaaatcacacatgaacgtagccgtcatggggaagtcactcattttctcctttttacacaggtgtctgaagcagccatggcagaagtacctgagctcgccagtgaaatgatggcttattacaggtcagtggagacgctgagaccagtaacatgagcaggtctcctctttcaagagtagagtgttatctgtgcttggagaccagatttttcccctaaattgcctctttcagtggcaaacagggtgccaagtaaatctgatttaaagactactttcccattacaagtccctccagccttgggacctggaggctatccagatgtgttgttgcaagggcttcctgcagaggcaaatggggagaaaagactccaagcccacaatacaaggaatccctttgcaaagtgtggcttggagggagagggagagctcagattttagctgactctgctgggctagaggttaggcctcaagatccaacagggagcacccagggtgcccacctgccaggcctagaatctgccttctggactgttctgcgcatatcactgtgaaacttgc

SEQ ID NO: 2094 - DNA, 6000 bp, Homo sapiens
tttgggtccagaacccacattcctgaccgggagccagcgccttccctcccccagttacaaccttagttcctcaggggtttggagagactggccttcacatctttctgctttcgtagcccagttcatccagccgttaagttttttattgttattatttttatatggagcctcgctctgtcacccaggctggagtgcagtggcacagacaacctctgtctcccaggttcaagctattctcctgcctcagcctcccgagtagctgggattacaggcgtgcgccaccacgcctggttaagtttttgtatttttagtcaacacggggttttgcctggttggccaggctggtctcgaactcctgacctcaggtgatcctcctgccttggcttcccaaagtgctgggattgcaggtgtgagccaccgtgtctggcctaaattttttttcatgtaatagctctggtatgttcatatgaactttgtagactcaggtacacatctcctaatacaaactccctcccttcctcaaccagatggtagctggcaggcagaacctggtgctaagtctgtctcaatttccttgactagaaacaaagagaatcaagtcatggctccctgtgttccagtgttacaggcctatgggaacacgctctccttttgcttaaatgaagttaataaatgaaggctgggcacggctcatacctgtaatcccagcactttgggaggccgaggcgggcggatcatctgaggtcaggagttcaagaccagcctcaccaacatggtgaaaccccatctctactacaaatacaaaattaagtgggtgtggtggcacatgtctgtaatcccagctactcaggaggccgaggcaggagaatcgcttgaacctgggaggtggaggttgcagtgagccaagaacgcaccactgcactccagcctgggtgacagagcgaaactctgtctcaaaaaaaaaggtttttttttaagaaaaaaaataagtgataccaggaagagatatcttctgtacgaagaggtctgatgaagggaaggaacctctgtagtacatttggagagatgccatgttgctagggcagcaacactagctttggggtcagcttgccttctggtctctgttccccacttacgagttttatgaccttgaacaagcattcttttctttttccccccctccagtctttttattgtggtataataaaatttaccattgtaactgtttttttttgagatagagtctcactctgtcacccaggctgaagtgcggtgacgtgatcttggctcactgcaacctccgcctaccaggttcaaacgattgtcctgcttcagcctcctgagtagctgggattataggcgcctgccaccacgcccagctagtttttgtatttttagttgagatggggtttcaccatgttggtcaggctggtctcgaactctcgacctcaagtgatccacccacctcccaaaatgctgggattacaggtgtgagccacctcatccgacccattgtaactatttttaagtgtgtggttcatattgttgtataaccatcactaccatccatcttcgaaacttttttcattttgcaaaactgaacctttgcacccattaaacaataatttcctatttccttctttcccaacccctggcatccacctttctactttctgtctccatgaatttgactaccccaggtgtctcatataagtggaattacatcgtatgtgtcctttgtggctggcttatttcacttagcataatgtcctcagggcttatccatgttgcagcatttgtcagaatttccttccttttcaagactgaatgtccattgtgtgtagattgcatggtttgtttatctgctcatctgttgatagaccctgggttgcttccaccttctggctcttgtgaataatgctgctatgaacactggtgcacctgttcaagtccttaatgtttcagggaacctccctgctgttttccacagagattgcaccattttacgttctgaccaacagtgcacaagggttctaatttccccacatcctcaccaacacttgttattttctgtttttatttttcacttttctaatttatttctcattatttctaatagccgtcctctatgagatgaggatgggtatctcatttgttgaaaataaataacctgatggcgatttcttatctgttaaaaagatgatcctttccctattaaacggtcttggcatgcttgttgaaaattatttgactggtccaggagtgggtggctcacgcctgtaattctagcactttggcagggtcacttgaggccagaagctccaaaccagcctgggcaacagcaagaccatgtctgtgcatgcataaattaattaattaatttttggtcactcaggctggagtgcggtggcacaatcatgactcactggcacccttgacctcctggactcaagccatcctcccatctcagcccctccccaagtagctgggattacaggcacacataatcccagctaatttttaaattttttgtagagatagggtctcgctatgttgccagtctggtcttgaactggtttcaaacgattctcccacctcagcctcctacattgctgagattataggcgtgaccatgcccagccaattttctctatttttctgttctctattttgtttatctctgctctaatctttattgttttctcctgctagctttagatgtagttcttttttctagttccttaagataaaagtttaggttgttgattagagagctttcttttttaatgtaagcatttataactctaaatttccctcttcagcactgtttttgctgcatccccaaaaattgtcttatcattttcatttgtctcaagatgttttctaaggctaggtgcggtggctcacgctagtaatcccagcactttgggaggccgaggcaggaggattgcttgagcccacgagttcaagactagcctggtcaacatggcaaagccccatcatacaaaatacaaaattagctgggcatggtggtgtgcacctctggtcccagctagtcaggaagctaaggtgggaggatcacctgatcctggaaggtcaaggctgcagtgagctgaggttgtgccactgcactccagcctgggcctccgagtgagaccctgtctcaaaaaaaaaaaaaattctttttttaaatatgtcttctagtttaccttatgatctcttctttactcattggttgtttaagaatatgttaactcaatttttataaatttatgattttttttcgttttccttctattattgatttatttcatcccattatggttggagaagatgctttggtatctttttaaatctatttaaacttaatttgtgattgaacatatggtctatgttcaatcatatgttaaatcctatgataaaccatatgttaaatcacaaattaaatttcaatagatttgaaacttaatgtgtcccttgagaagaatgtgtgttctgttgttgagtttcatatacatctgttagatcaagttggtttatcaggttaagtcctctatttgcttgcttatcatctgtctggttcttttatccattattgagggtggagtatcgaagtcttatctccagaagcttttttgatgtcaactctgttttgtctgatattagtatagccagccttgctccctttgattactgtttcatggaatatctttttatatcctttcattttcaatccatttatgtctttggatctaaagtgaatttcttatagacagcatataattggatcacatgtttatccattctgcccatttctgtcttttgattgaagagtttaatccatttacatttaaagtactgtcaggcgtggtgtcacatgcctgtagtcccagctactcaagaggctaaaggtgtgaaggttagaggatttgccctctgaccttggcccagccacttcccccctgtggagcggggttctcaccctgctttttccctggctctgatggagcctttgggctgcagtcgtgcttgagatgaatggccctgcccccgtatcccttcctccatgagctgctgcggcccacctagttgtgacacctggtggtggtcttgtaattgcccacggcttttccctctcctctggactctggcctcctccctccctctgtggccctagcacctggcagatgcattggatgggcagcaggcactcagaacatgtttttataatgaattcctcaaccaagggaactaagggacttgctgtttccttactgtcacctgggattctttttgctgttttctactttctgattgcttttcttcctgctaattcagtttcatcttctcttttcagatgaagctactaaacttatacataaagagggcccagaccaccaacagcaacagcagctcctcctccgatgtctccacgcacagctaatggcagtacctgtctcttgtgtagacctagaagcaatcggtggtgcctctcagagacctttccccacccccttcatcggctgcccagtcagtacaaggaggcccacaaatatttattacaatcagtattttggtcccttccagcttttctgtagaatcttactggtattgaatgtaaaggaagcaaggcctgtattgcagtcttcatacaaaacaaaaggaataagaacagaaaagagccatactgaaacatgtcttgtacagcctgctgagatggcgaaaccctgtgtgtggggtgcagtttttaaaaatcagagcgctctagccactacttggtagaaagtagcattttttttttcagttaataacatatttgggggtggggtggggtgttactttgtgttcttcctccttagcctattttcttgtgcgtatggtctgtgtggggcccctttcacagctgacaccacgaaaggtgatatatctttaagttgtgttctgagacctactaaaaatgggaatcaagtcttggcaagaacagtctgaagatggccttttaacaaacgctgggaattttgcttgtcatatccagactggaggccgactgccctggctttcagcgtagaattgggagtgcaccctgacagtctccttccagctctccctaatcgactccaccgacaaggtccctaccccagagcttccatgcaaaggaattcttcaagtttaaatctggacacaaaaataagataaatgtatggcatcatttagggatgcctgagatggcagttcatgaagcacagaagataaagaagaagtctttcatctttactgctgagatccttgggaacactgttgtcatgggggctctgccaagaccctcatctctgggctacacggtgattcagattgagcaccaacttgtttcctcccctcaaagttctgcctaagccgttcagttctaacatggtctcagttaatctggtaaatggcatctttaccatcttagttctgacttctcagtttaatgtgggattaagagccaagaaaagcctagagagactggatatcacaattttttttaattttataaactgaagtagttccttgaatgtctgttgatgaaatagtcactgtttaaggaaaaaagtaattatgaggtgtagcagattgcagaaaaacaggattagaaacacacttaaaaagaacacacatttagagtctctcttcctcctcagcgaaccactaggccccctttttaaaaacacctttagagcctaattactccaataaaagtaactagaggtttggagtctggttaaataaattctgagtaaaattcttaagccaaatggaaattcttaatgcaatcatgaggacttctattgtctcttactgttgtattagatcctataaattgaactgatttttccataaggaaaatgcttcttttgagattaattctaataacgtatttgctattgcagtgcagagcccactgcaactgctaggactgaaagcagaggctgggtgccagagcacgtgattcttaacatc

SEQ ID NO: 2095 - DNA, 6000 bp, Homo sapiens
acagaagaatcagaagtcttctggggctgtcgagcaaatgctagtgcaattcagtgaaatattaccctagaaggagatgctctctttgaaatataacgaattctcttttgaatacatgcaaattgcaggaattatggaatatccaagcaaatatatccatcgagactttggatataccagtctgtttcagccagtgatttaggcagaagttagatatttgagagatattgattagttgcttgaagataactaaagaaaagtaagtgaaatcaccaggtaaaggataaggacagaatcctaaggagcatcaacactaagggaaggacagaagctagagctgacaggagggagaccaggagagggtggtggcatagaagataagggagactatttcaggaaggacattctagccaaaggggccatgctgcaaagagataacaggtcacatatgaaatgaaagggctccattggattatttgcttattatccacattaaatgttctattttaacctaaaagatataaaatacacatttacttgccaatgttttgatgtaaagttaagacctttccttcgagaatgggctcactggatttccatgtttttcttcttaaataaactttacacgtagttacagtctgcaatatccaaagttagttacttccaggagtacattggatcttgtgagcacagttgagtgcagagttgagaatggaaaccagatcacagtgggtgaagaagttgaggaacaaactggagagaaataaggatcaaagggcatttcagatgggagagatctctcccagcagggccagtggagagaagaaccttgcctacacagtggaggagagcagatgattggatgcgatccttcaggacgtggggacgtgagattagggcccaggtagaatgactggtcttagctagggaggagggcggctttaggggcttgaggcaggaagtagagcgtgttcccactgccggtttctcagggcagtggaaggaggcctgctttgaagcgggggacttgttgtgaggaatgggggaatctgactagggaaacagaactcctatcaagaacagtagaaaagatggatgcgtgaggggttactttttccaattatggtggctcacgcctgcaatcccagcactttgggaggccaaggcaggaggattgcttgagcccaggagttcaagaacagcctgggcaacatagggagactcctgtctctacaaaaaaaaaaaaaatttaatttatctagatgtggtggtgtgcaccctgtagtcccagctactcgagaagctgcagtgagagtattgcttaagcctaggagtttgaggctgcagtaagctacgattgtgccactgcactccagcttgggtgacagagtaagattgtgtcccttaaaaaaatatatatatatgtatatatacacacacacacacacacacttaatatgtgcccaaaaaatgatacttagaaagtgaaaaagaagaaatcaccatctctagagataaccagtgttaacactatagggtgtatttttctattcctttttgtatatttatacatatatgtgtgtaggggagtgtgtggagtattgcttttgtaagagtaatatcacactgtccatctgttgagcatagggcatgagtgcttttccgtcagttcctgtgtgagttgtggcttctcaatgattcctcctgtggatgatgttctgtagatgggcacccagtgtcctgtttcagtatatttagatggtttctgattttgtcaagtgtaaaaatactgtgatgagagttgaaagaagtgaaatttgggagggagaaaataaagagggcaaggcctgggaagcctcagtgtcacctagggacaggtggagtggggggagtgcagtggcagagctgcagggccaggaggagtcaggaagtgccatgaagatgctgcatgtcagagcagtggctgttcctgctggagaatgtggcctcgagcagcaaagctagggtggcagtgaaaatcgaagaatggaccaggcatggtgactcatgctggtaatcccagcactttgggagtctgaggtgggtggatcacctgaggtcgggagttccagaccatcctgaccaacatggtgaaaccccatctctactaaatacaagaaattagccaggtttggtggcacatgcctgtaatcccagctccttgggaggctgaggcaggagaatcgcttgaacctagaaggcggaggttgcagtgagccgagattgcaccatttacactccagcctgggcgacaagagtgaaactctgtctcaaaaaaaaagaaagaaaatcgaagaatggaggagcttcacaattcaccatcttagccaccacttaccatatgtttagttaaaacattgaggtggatataaaactgtgttaaatgtgaaagactcgggagccagtacatctcctcttaagcctaacaaggaaacccaatatagggagacaagccaataggatgaatgtcagatgcagtaggagggtgatgcacacagcaaaaatgaagacattcaacatagggagaaagcccatccttacggtcaattacagaaatacagcagacttatatcaaggttctcttctgctttgctttaatagaaattacaacatttaatactagaaagagcataaggatctagtgtaatgttggtgccatgggaaactgatacaatgttttggaactcagtaaaattatatttagcaaaagtgatttgcatattctttacccagtatggttaatctacactaaagaaagaactcaacagaagaaaaaaaaatgtcatttccataagatagcttatttcagcattatctacagtagcaaaaatattaaaggggaacatctgagtaaatcttttttaaaacacaagtagaggtagtggtgtgattaaacatggtggttacaaaaacttcatccacacgggaagtgcttgcactgtagggaaaggaaaacagaagccagcgtgcacaccgggttcctgctgcgtaaagcctgcgtggagacacacactgagggagtaaggttttgttgttaacagtgattagaattgggagttgagctttattttttaaatgtctgaaatttttaaaacccttctctttttttgttttttttaaacctcctgttcaatggcttaccttttttataaataatttttcattataatggtatttttagaagacttataaaaagaaacaattaaaaccatccatgaattttcttccacccagagaaaacctctgttaagatttgatttatacctttttagtcttaatttgtttctgtctacgcatatattatgtattatttttacatcttaattataaaattttgtttgtgggtgttagaaaccaaatgcatcccagcacctccactagattcaagtccaaaagaattgaaagcagggacttgaacagatgtttgtgcaccagtgtgtcatagcagcattattcacaagagccaaaaggcaaaagcaatccaagtgcccatcagcagatgaacagataaacaaaatgtggtatatacacacagtggaatgtgttcagcagttccacttatctgaggtacctagcataggcagattccaagagacaaagtaagataaaggttaccaggggttgtggggaagggagagggatgaggatgcagggtttttgttgggaatgatgagaaagttttgggtatacatagtggtgatggttacacaacatcatgaatgtatttaatgacactgaatgatcaaaaatggtatgttaggaatgatcaaaatggtatgttacatctacttttccaaaaccggaaaaaagtgtaaatgcattagcacaaagtgagagaaatgtatcttgtcatcagcacaagtaaaaattttgccataggtgtcaccaatgtgttctggctgcctggaatgtttccaccgttgttgggtagtcagatgtttgggatgaggaaaacagtctgtccccgttgccagcagccagcccacacctgctgggctacactgccacctacaaaggggctagaccagtggtgtgccccacagcagaggaccctaaaagcaaaagtgatttgctcttgtcgataccatgtcaagggcccagtcagagggccagcggttgaatttgttgaagacaacattcagaatatactagggaaaaaaaaaaaatttgggaaatactaaagtcctgttctttgacccagcataacaactctgagtcagaaatatctaaaagaagaatgatatgcctaggaggtgctgagttctctgtcataggagattgtgaagcgccgaggcccagcactaggcaggaatacatatagtacaaggaattaatctggggatggatgacacccattagacttaatgatggcggttggaggagcttctgtctgtggatgtgggccagggccgcagtgagaagcccccgttgctggtctggtgcttgaaagcaggggtgtgagtggacagcctttccttctcaaggaaaggcttctgagcctttcatccctcagaaaacatcttggtaaagtggatcatcaaattacaaagtaaaggagatttaaagcgtaaagactagatgcaaataaatgcaggtatattgttccttttatggtagtttacggatttggtatttttacattgcagtactagtagctgtccttttgtcactggccatacatatttcaagtgaaaatctctggccttcttaatatttctgagcattcaaaggaaatgtccattacaagtcccagaagggaactgacagtgtgctgtgctgcaggtgtcccgcgatgggggcgctgcctcccctgccactgagggccgggggggtagtgaagtagaaggaggccggacagctctggataacaagacctcactactcaacacccagcctccgcgcgccttcccggggccgcgggcgcgagactacaacccgtacccctactcagatgccatcaacacctacgacaagaccgccctgaaagaggctgtgttcgatgacgacatggagcagcttcgagacggttggtgtctcttttcttaactgtccccacccagaagtgcttcccttgtgctccctcccgtctggccagcaccaggcccactggtcagatgtaaatggagacgctgggtctgttctttctgcttagtcatttgttcaggcactacttaactgaatccctactgtgcgcttgggcacggggaacatggcagtgaacagaagcacaagtagcggggcagtgaggaaataaacagtcacacgtgatatgaagtagccactgccacagctgagcatgagggaaggccaactctaccatcaggaaggttttgctgtagaacccagggcccaggtaggccaggggtgtaggaacaaacaggatggcgagcgcgggctcagcctttgtgaaggccttggacctgcttcccagctccccgagctgtggagtgagatcctgaagcactgctctgaggcttccctctcctttcacacctgctttgtaaccaggtctccctggagctgtgttgacctccgtgctgcatttgggaggcaggggtttgacatacacactgagcatttgcattaccatgtgtggtgccaagctaagtatggggtcagaaagatttgcccaaaatgtaacgtaagcatataacataggaagtagggagcagaagcagagctagtctggtttctttctggctcctgtgttaagaccagtgtccattactgaataaactagtgagtgatgagtatgtatttgtacaatggtgtttttttcgggaactgaattattttttcacctctcatgttacatgatttggtttatttcgatttgatagtgcttttaaaaaaatattgttttgaagcctgttttatttctcaagtttgaatgagtaattagaacctacattagaattctaaatagttaacattcactaagggcctaccgtgtgtcatgaa

SEQ ID NO: 2096 - DNA, 6000 bp, Homo sapiens
ctgcatttcctctggactgtggcattttctgtctctggtacttctgtgttaatcctgtgggtgttgccattccttttacctgcagcctctcgacgtcattccaggtccactagtgctctctccactgctgaatctgttgggcagtcaggtgaacaagtgctaactgcatgacttggcttcttcatatgttctagtttcacacccatgtcaacatttgttttcatctgtgtcggctagcacttggcatgtttgcacctcatattttttccccaatgtgctttaatttttttaagttattgaatgtttatagttctgttaataggctgtagatgcttcatagcctgtttgacaacatcgtttctccagtgttcatatttacgttaaaacaacagggaagtaattcccttcctgccactctgtccccaggaaaataaccaaaattaggtattatttagggttcctgtggggcaagggggcatggatatcatccaacagattctttcccttccaaagtctttactccaaataaactgtcaaatattaatgctagttattgatgtcaagttcacatttttaaggtaccatttagttaacagcgctgcaaattatagcatacataatttcatatgtatgaaaataagtgtattgttctcaaagttttatggaaaaacaagatcaggattcaggtaatcaagtcaggccagaggtatcctttgcagcctgcaaaccccaaacctgctctctcagctctgtttagcaatactcaacatccactggttagccacagtggcaaaaagtaagcatacagtaatacatcaatttgttagatttaactgccactatttttatatgctaacagtccctaatgactacaattttctcaattgagtaaggcataatctatgaattttcagaccattgatggtaacaattgttaccaattcaccgagtctggtattttctcttttcttcttctaaatgaagccccctttgctttttttgtttgtttgtttttgttttttgtttttgaaacagggtcttactctgttgcccaggcttggagtgtagtagcgtgatcttgggtcactgcaacctctgctacctgggctcaagcgatcctcccacctcagccccccaagtagctgggactacaggtgcgtgccaccatacccagctagtttttgttgttttttgtagagacgggatttcactgtgttgcccaggctggtctcaaaactcttgggctcaagcgatttacccaccttggcctcccagagtgctgggattacaggcaaagccgccgtgcccagcctcctatatattctgattatgtacatttccctgaagattagggaccagactgagagcacagtcataggtattcatctcttggaaaaatcagacttcataatagtatcagagccttgagaatatggaacagactttgctctggcgaaaacataaagcttatagttttgcttagatccagataaacatttccccttaagatttgaaattcaaattgtctgtgatatatatcaaatgatctatagtcactctgtatggcaaagctgtatgcatcttggaagcacagaataattgcattgttcttatagttttaattttgtatctgaaaaaatctgtatattccctggagcaagaattgctggcatgagatttttttttttaaattttattagacttcgttttatttaagtttatgctgggtaattttttaatggcttataattgaattactttcattctgttactcataagtctcctactatctacccttttttaatgaaaaaaaaaacttgaacaaagatcatctgtaaaactatgtgtgcatagtaaatctcacatttacacttgtttcatatttcaactgatatagataaatgtaatttttaatggcctttcttagtttatatggcacattaccttttaaacataatggttaagatgacagttggaaagaccagcaaatgcattaaaaaaggggatagtataacatacagtttttgtttctttttaaaaaattcatgactgtataactattgattagcagtgtttaaatttttctccatttctgtggtggtggaaggtataatgttttgaaattgacatttttaaaaagctaaataacaattcactttttaagttcaccagttttgtaggcactgtcttgttgcatatctaaaattttaaatacattgttttataggaaagatcaattcatgtaaaatagatattagcttcccttttattctagatgcttccagaatatagctaacatagagattttcgttgtccaaacgaagtcttatttgttaacacagagaaaatattttatcttaacatttttcttccaaaggtttttatacattggacttttaaataagaaattttttactggtagataatgtacaacacacttaatgaagatacaacttacactgcctttctcctagtatagttttaatctccagcacttcctaaggaaggttggtcagctgatttaatgggactttaaaaagtgagttttcatttccatgatcacaagtaagcttaaaatacttgtttgaactactaaatttgttttaaattctttggattctttctattatttgtttatctgtataaaaattgccattctaaattatttgaggaacccaggtaaaacttatattatctaaatttttaatgttcttcagtgaaagtgctagatttttttagtgattattaaataattttaataaattgatttttaagtaatttttgttgacacaggcatcgtgacgaacaagtatctaaaattaaatgagcttaacaatagttaaacagaagtgacactaataaaaatttgcacagaaatcaatttaatacatttgtttcaaattttaagcttttaccacacattgcattagaactcttatgaaaccatgaagctttctaattagtttgaccaaacatcaaggccacttgcctctacagggaaagctaaatagattaaaagactcaactcatagcctagctaccttttataataagttcccgcttccctctcatatcagaaacttttcaataataaaataccatgtttgaacaatttcgagtgacagtgctttgtggcactatagcattaaatgtgaacagcttaacctctaccactggtaaacaagtcaagtgtagttaaaattggctagagacttttcagtacttctgtctacttggtgggaagaggcagtagtccttgcaaggaattgaaataatttgaattaaagtgacacatcttttgcttttgttttttaaatagatcggtttgggcttggccagccaggaagaatacctggttctgtgaatgccatgagagttctgagcacaagtacagatcttgaagctgctgttgctgatgctttggtaagaggcacagtatgtatgtacacagtctttttgaaatactcatctgcatttctctctgtcctaacaggaaattgcccccaaatcaggttatgaattcatctttgaaactctttaaaattgtgttaatgttgggtaaatttatattgttattgtttgccccttaaacttttacctctgcacacatataagtgaaaatggactttacagaaaatattagcatcaagtatttcttatctgtgctcttcagtatcaaggagcttttgatgaccctggacttctcagatgtcattgggcttctttttttctttttaaccatgtttttttttctggcatttccttttttccattctgttgcttctgttgctttacagactttgatggcataacctagacatattattataataataggtaatagagtttgaggtttgaaaatcttgcatttattctattatcttgtctgtttgattttatgttgtttttcctaaatctttgaggatgtgaagcagtggtggaatatgtttttgcatcattatagtgtaatatctgaaaaacataaatgatcatggatcctttaatttttttggttataccaaaaagtttcctagtagaatcagcttgtggtcagattgctttttaaagatgcatttcagctagtcacacagtctcttgcatattctggtttatgtgctcagcatttgaaatggatattctttagaactgtctgatcactggccttgctcttgctgttttaagatttattctcttgtaagggaaaaaagtatgtaatatcctgctttcagactctgaagtttttaatccagccatgttttgtcagatcaacattttatagtttatggctatggtgattccagttttcattccttcttgtcttgccctcatttattcctgctcagtcaggttctttgacaagtgtctgtgagcagtttgctgctctcctaatccttttcctgtaggcaagctgcctggccacctgtattcctcaaccttatgtatagaaagacttttttctggcaggtgctagagttcagggtaactgctctaaccatggctttaggagtcaagagctggaacagaattatctgaagctgtttgtccttccaagttgcagcatttagaatctgtatcttatttgttcagagaccctgggaagtggaggtcaaaggggtgggaaatgatggatgtgaaacccttagttgagacttccacttaaggcagggaaatttcttagttctttaaagaactgcataagggactgtgtgtaaagttctaggaggcggaataggacttgagagtttgagctttggcttaacttgactggagcttttctctgagctctagctcccattagattcatgctgcccttgttactttttgtccaaactgttgagtctctccaagtgacctgcttctgaagagaaaacacagaaatggtacagaatctttgcctcgctgaatagacaccacggcgccagacagaatgtctcagaggaatagatagtagaattaatggtgaccttagagatttgcctcaccgatatgggaaaagttttagcaaagaattacagcaagttaccagaaggtcttctgagacgtggaggagggttaggaaatgccattttgaaagcattctttattattattagcttgatatgaaacgcttgctaacctgtatttttggtttgctaagatatgttttgctgtacacttttgttgcaagaacaatccctacatatgcttctgacataattctctatgctttttccccatccttcaatattttcctgcctacagctgttaggagactccaggagcaaggtaccagtcctttaacttttgttttacaactttatttctcctgttgcaagtatatttcttttagaagctagtgaaaaccaaaaaatgtagtatagaaattctggtctgaaatatgattttgttgaatcataacagtgattcaccatcattgttgtctttattcatggtggagtcagccacctttcatgtacatctgttttagtatttattttgaatgtcaagctctgctccttcgcctagtagtgtttcattttattaactcagtttgtgcctattcttacgtcgtcatgatttcatgaatggatttatcaacatttttcttattttaggaatctggattttgtgtgaccatgtaatttattatccaaacaaaaatgcttttgagattaaaagggggatgctatcaataattatgacaataagcttaaggcagaacagtcctgagcaagttggattaacaataatacgccatattattaaagaagtatatttgtatggtttaagccaatcgctatttgttttgtttttatcaattttgtatagttgctgctatatcatatttgtgggtataacagttttgtattcagggtcagagaagtgaataaagtgggtattatagtctactttcaaagaagcctatttgtgtttcaaaaccctaagtctttaataaaagtggccaggagttcaaaaccagcctgggcaacagagggagatgacttagaaatccttttatgt

SEQ ID NO: 2097 - DNA, 6000 bp, Homo sapiens
ccatgttacccaggctggttttgaactcctgagctcaagcgatctgcctgccttggcctcccaaagtactgggattacaggtgtgagccaccctgcctggcccaaaatggaatttatctcttcccatccccaacctgctcctccatctttcccagttcagtaaatgacaacaccattcttcaaaatgctcaggccaaaaatcgtagtcaccttggactcccttcattttctcatatcctatataaattgtcatcaaatcctgtgtgccaccctgaatatatccagatacctcatccctccactgcttgcaccttttctatgccacttatctctcacctggagtattacaatagcttcctaagtggtcccccttgctcctcaataatctagtgtcaaactagaagtcaatgtgattctttaaatatataagtagaatttcactatttttctactcaacgatggcttcccatctccctcagaaaaagccaaagtccttacaatggcctgtaagtccatgcccaatttgaattcctcttacctctctgacttcatttcctacttttaccctcctgtactctgcttctatcactctggactgctttctgttctcagaatgtagtaggcatctttctgccttaatgatttctgcacttgttattccacccagaatgttccctgtccacccaaggcacatttcttgttcctttgcctcctttagatctttgtacagtttgccttctcagtggggctcctctgcctctggtataaacaaaaacctccctccctactctcggctcaccctattcccctctcactgcttcactttttcttgccaacacttatcctacctgtcttagtatatattttacttattaatatttttagtctctgctatgaggacagggatttttccctgctttgctaagtgtttggcacagtatcggcacacaatatttttgagtgtatgaatgctatttataatgcactatattctctgcctctttgtttaactatcactagctgcatgggagtctggatatgcatccctgaggaagatcagactgactgaatagaagaattgtccactcactctgactactgttatctatctctctaagggagatgaaagcatagcagcaattctggaggctcaggttccagtcaaagctttgagaccaattaggcatgtggcattgggaagataatttttcctctctggccctcaatttcctcatctgccaaaaggagatcatttccttaaaagacctcacaatatttttgagaatataaaatcaaagatgaaatgttgagtagggaagggtatgtcttattaatttctctactacatacaaagatatatttacctggcattttatatttgttaaaggtaataaacaaacctaaaagcaaaccccagggttcttttacgaaccttgaaaaatgtacttctgttgtgttgtgcccttatacataccactaatgtgacagcaaagactcttgatgtcagcctattctttctcctgagaaaagtcactcttacatgtcatttttttctttcagtatcctcatccaaaccaatgaatactcagtgcttactggagcctggctccaatggcagttttctttcctaatctcttgtgcgtacatgtggttggtgagccttttctcagcccatctgcaactcagaaccttgattttcttgcctgtaaattggggtgcacaacaactggctcacatttatattaatggattcgcggacccatcaataatttacataaagcagtagtacaatgcctggcacatctagaggcctccataaatgctttatagaaatggagtatgtattcagcttccactgccagagttgctttctgaaacagatctttctagctgggcgtggtggctcctgcctgtaatcccagcactttgggaggctggatcacgaggtcaagagatcgagaccatcctggccaacatggtgaaaccccgcctctactaaaaatacaacgattagctgggcgtggtggcatgtgcctgtagtcccagctactcaggaggctgaggaaagagaatcgcttcaaccagggaggcagaggttgcagtgagccgagatcgcaccactgcacgccagcctgggcaacagagtgagactctgtctcggaaaaaaaccaaacaaacccaaaacagttctttcatcatgttactatgcctagtcacggaccttaaacaatataaagtatgaatttctatacttggtttcaaaatctcccacattctattaatactaatttttgagacggagtctcgctgtcgcccagcttgagtgcggcggcgcaatttccgttcaccacaacctccacttcctgggttcaagcatttctcctgcctcagtctcctgagtggctgggattacaggtgtgtgccaccgtacccggctaatttttgtatttttagtagagacagggttttaccatattggccaggctggtctcgaacttttgacctcaagtgatccacccacctcggcctcccaaagtgttgggattataggcgtgagccactgcgtctgtccccacaagctattaaaattagggtttttctttttttgtttaagactagccaagtgcagtggttgagaagtggagcacaaggagaacaaggagtttggtctgtaactggcagtgaacaatcaagataacttactatctctgtattaccctaaaaggatcttgaagagttatctgtacactcatgtttgaagcagtattattcacaataaccaaaaggtggaaataacacaagtggtatatacacacaatggaatattatttagtcttaaaagggaaggaaattctgacacatgctacaagatggataaaccacaaggagattatgctatgtgaaatatgccagtcacaaaaatacaaatactgtatgataccacttacacggggtacacagtcaaattcacagagacagaactagaatggaggttaccaaggctagctggaaaatggcgaatgagaaattgtttaatgggttcggggtttgttttgcaagatgaaaagaattctggagactggccgcacgaggtaaatatacttaatactaacgaattattcactcaaaaatggttaagataataaattttgttgtgtagataaaaaaatttaaaaatcgattccatctttctcatcaaatcttactttttactctttgtttctttttttcccatttcagttagattgctctcttcattgtacttccagtatgcctcttgagcctttgcaccatggtgtttcttctctggaatggtctttcattatcacccatccattttcaaaaggttgcatgtgctttcgttccaaagacattagtttatagatccaaccaggagtcgcatcctccatgtcatccctactctttcaaatcacatacctctaccttttctgcactacacagaagggcctacacacggctttcatactttagcttagcctctccgaccatacctcctaagaccctgaggatcagggggcattatctcatagttctcccgcacttctctcccatcccaacacatacactagcaaggagctccgcacacaagctcctccagtaaaaacaacgcactgggcagtgcatctcaacacatcaaattaccggcgtgcataggagcctgatgcggcaaatctgtgggtccttcgggatccttgaaggcagccctataatttgcatttttctacgctccaaaacactttccgggccagatgcggtggctcactcctgctgtcccagcactttcgaagacccaagacggcggatcacttgaggtcaggagtttgagacaaggctgggaaacatggtgaaacccatctctacaaaaaaatacaaaaagtagttgggggggggtggtgcacgcctgtaattccagctactcgggaggctaaggcaggaggatcacctgagcctgggaagtcgaggctgcagtgagccgtgatcgcgccactgcactccatccggcctgggcgacggcggtgagaccctgtctcaaaaaaataaaagccaccactttcccacttattatcccagggaaacgcacgcgacggaggagcgaaggagcgtttatttgtggaggcgctcaagtaagaaaccctgctcgctggccgactcaagggtctccaaagccttctctgggctgtctcccctccccaaaaggcaaagaaccgttaacaagtttacttccggcacaagcgtccgcgcctgctcggaaaagggagcgtggacacacagctctgttacgggaagtcgcagggcacaatttccttcattgcagtcgccctctgggcggacgccctaacccagaagtgaaagaccgtttccttcgagtatcagacccccgaccaaaggaagttccacttggacgacttttacccagggtttcccgattcctctttagctcttcctatcacgctccctgcttgctggtgcattgttgctgtggccacttagttccgaccttccttgtctaactcgagttttgtcgcaactttccaaggggcctaaccacaaccttttccgtaaaaaaaaacaaaaacaaaacctttaccctacgggtccccatcagggtcaactaacgttctccgtgaggggcaaagctcccggggactttacgccagcgaagcctaacacggccaggccagcgcctgcgcggggcgttaccatagagaggcagccgcctctctggtctcggtttacgctctctatggtgtacccgggttggtggcggtaagaagaaaaagggtgaccgcactgcgcaggcgccctcggcgtctctctcgctctctcggtcttttttttttttttctttttttttttttttaatccccgcaccaagcgcttaacctcattggggtggaggagaaggcggcggctctctggtccgcagcggcaacagtaacgaaaaacagggctgtaagtacccggtcagggggcggagggtcagacccgagccctctcgcggccctggcccctcccgcgcagtggcgggcgccgggtctgggtgggggcgatgtccagcgctgtcatcggctcttgggtgcactttggggggatggggcggccctgaggtgggagcctggcgaggagcgggatgcgagggttgtttatccaaccagtaggtcgctgagcccaggctgctttgcagagggaggggatcggccctggggtcagtcgggctttgtgtgcccctctctgtttcccttttccagaccccacccgggcccccttcctaacccgagtctcccctgccgggtgggagaagccagcgagcccggggcgcgtttgaaaggaagggagggggcgagggagagaaacccacaacaactagtcattggcgagtgatgggtgtgaagaaagatccagagagaaggggtgccgggaggcgggcggcccgggctcccgtcctgggctcccaaccgggccagacaaaagctgcgcgagcggcgccgagcggagcggccggcttgatgggatgcacaaggtccccttggttcccggggccttcgaagagcttctttctgaagctgggaaagcgaacaagtgctgagttaagcctgtgcagacttctcaacttgcctttgttgttctttggtattggcagagacgctctgacgaagatgagtgtgtgatcttgcacgttagcctggctaggtacaatggagctaatcgaattttgctttccgttttccgagctgctgggatgagtatggggctttccagagtttaaattattacataatatttttaaaatagttgtttgcttctaaaattaaaaaaaattaatgtggagtctgaaagcacgctgtggtgagtttgcagctgagtttgcagctgggtgagtttctgtgtagtggggtgcgttcattaaatactgaccattcgtagaacctgtgagctctttaaacatgatactttcatttgtagatgtggcaatgagag

SEQ ID NO: 2098 - DNA, 6000 bp, Homo sapiens
gatgtctcttcaactgtaccctcttggtacctgatgctcaattcaagagagagtttaataagtaaattaatcaataattctagaagtgtgatatctgtcatgggaaatatgaagtgctattatgtgaagaagaaacagacttaattcaggttccttcaggaagtataactaaggtcaatacgtgaaagggagggagcagactgtagtagtaatctaaaaacatttctggcaaccaagacctgtccagggacagatgcctgcagtgtgacactgatgatcagaatgtagcaaacataaggaaggatgctggactactgggcctctaacaactcctccaaagctcaaattatattagtctacattaggatacatttgtttattctttcatacattctacagtttccattagttatacaagtcacttagtcacttagtaagcaacagaggacacacaatgtgttctacaaactccctgtgccatcaaggatctagagaagagtaaatgcacaagagtgaatctaagtaagcaggaaggtgatatatacaacaggaagcagcaaggagtgaggaaacttccaggcaggaaacaagacagaagttaacaaaggtgttatggaagaaatgtcaccatttgagcacacctgagctagatctttaggatctatgaggggaggtgggatgaggactgtcataagaatttggggaggaaaatcattgtgtggcagtaatggtctgggcataaagccggcagaaaagccctggggaggtgaagaacaagctagaaacaagcagtaaatgccagcattttagaggtcatttagtcaaacacatatacccgtactttgttgatgatgccccgctggcaatgggtaaaaaagttagttcattttttaagattacatcttacaaaccaaaaactgtatcagcgatgatttctacttcgcttagtttttgtttttaagactaacagatccttcccttgttttgtttttgtttttagacaaggtatcactctgtcatccaagctataatgcagtggcacgatttcggctcactgtagcctcagcctcccagactcaggagatcctcccacctcatccccccaagtagttgggactacaggtgcacaccactatccccagctaatttttgaattttctgtagagacacagggtttcaccatgttgcccaggttggtctcaaactccatgcaacccgcccaccttggcctcccaaaatgctagcattacagatgtaagccactgcacccagcctcttctcttgttttctaggaaatctgtaaaatgttctgtttttaaacatttaagttttacttctgtctactatttccactatttgacagctagatttagttaccaaaaatgacagtttcagtaactcagttgaatctaacatttgtaatcacttaaatgtttatatttaccaacagtactacaaaataaaaatctaaaaattattaagtagaagattattaagaatagatgggtctcaaacagtaaatttaagtctcaggcccaagaagccatctcattcaacttataaatcaagacactaagctacttaagaaaataaacaagacggaagcaaaaaatctaaatctaggccaggcgtggtggctcacgcctgtaatcccagcactttgggaggctgaggcaggcggatcatgaggtcaggatatcaaggccatcctggctaacacggtgaaaccccgtctctactaagaaaacgcaaaaaaattagccgggcatggtggcgggcacctgtagtcccagctactcgggaggctgagggaggagaatggcatgaacctgggaggcggagcttgcagtgagcccagatcgcgccactgcattccagcctgggtaacatagcgagactccatctcaaaaaaaaaaaaaaaaaaaaatctaaatctaaaaccagtaaacatgggccgagcgcgattgctcacgcctgtaatcccagcacttcggaaggccaaggcaggctgatcacaggaggtcaggagttcaagaccagcctggccaacatagtgaaaccctgtctctactaaaaatacaaaaattagctgggcatggttgtgggtgcctgtaatcccagctactcaggcggctgaggcaggagaatcacttgaacccaggaggtggaggttgcagtgagctgagattgcaccattgcacttcagcctgggcgacaagagtgaaactctgtttcaaaaataaaaataaaaataaataataaataaaaccagtaaacaaaatataacacacttaaatgacaaacttcatgttcttctggccaatcatttctcaacatccctgtcaaactattttaagggtctgaaatcttgctctataaaaagcaagttcccatcatctgaactacacttaaagagattctatcccactagttacttaagcataatacaccaggcttcagagttttacttgctatcaattaaaaaaaaagtttacctcttttacataaataaagtggaatctgtgggttaattcaaaagcctgacatactaggagatctgggttttccgttctaacacaaatttatggtgaaaacttagcaaaagccttttctgtatttgccaattcagttgtaacacagagatacaatatttgacacctccaccaccaacaaagtctcctctaaggagtcctgactttggttaaccttacctgggagaattaaaagctatggctgaaaactccttcataaaaactaaaactttagaagtctaaaatggtgttacaaggtagcccataataaacaatgaattatagaaactgagatttcagtaacaactgctaaaaaggtgtattacacaatttaacaagataaccagatcatcaaaatttaaatttcttaacaaatgtaaaaaataaataatattcaatactctgaggcactgtgctactttttatctatatggtcgcaacatcaatgttgctattctcccaatcccttgatgagcaaacggagccaatatccaggatccctcatatcgagaggtcagttaccgtcgtaaataatcgtagtaataaaaacaatttctaatgccagaattgaaaacggactgtggcacccaaatagggtccaaggtacatggcggcatgaaactatttctcgcttctgactcttctgcatcacggtctcccaaaggactagagaatctgaagctctcattgccacatctacaaatgaaagtatcatgtttaaagagctcacaggttctacgaatggtcagtatttaatgaacgcaccccactacacagaaactcacccagctgcaaactcagctgcaaactcaccacagcgtgctttcagactccacattaattttttttaattttagaagcaaacaactattttaaaaatattatgtaataatttaaactctggaaagccccatactcatcccagcagctcggaaaacggaaagcaaaattcgattagctccattgtacctagccaggctaacgtgcaagatcacacactcatcttcgtcagagcgtctctgccaataccaaagaacaacaaaggcaagttgagaagtctgcacaggcttaactcagcacttgttcgctttcccagcttcagaaagaagctcttcgaaggccccgggaaccaaggggaccttgtgcatcccatcaagccggccgctccgctcggcgccgctcgcgcagcttttgtctggcccggttgggagcccaggacgggagcccgggccgcccgcctcccggcaccccttctctctggatctttcttcacacccatcactcgccaatgactagttgttgtgggtttctctccctcgccccctcccttcctttcaaacgcgccccgggctcgctggcttctcccacccggcaggggagactcgggttaggaagggggcccgggtggggtctggaaaagggaaacagagaggggcacacaaagcccgactgaccccagggccgatcccctccctctgcaaagcagcctgggctcagcgacctactggttggataaacaaccctcgcatcccgctcctcgccaggctcccacctcagggccgccccatccccccaaagtgcacccaagagccgatgacagcgctggacatcgcccccacccagacccggcgcccgccactgcgcgggaggggccagggccgcgagagggctcgggtctgaccctccgccccctgaccgggtacttacagccctgtttttcgttactgttgccgctgcggaccagagagccgccgccttctcctccaccccaatgaggttaagcgcttggtgcggggattaaaaaaaaaaaaaaagaaaaaaaaaaaaaagaccgagagagcgagagagacgccgagggcgcctgcgcagtgcggtcaccctttttcttcttaccgccaccaacccgggtacaccatagagagcgtaaaccgagaccagagaggcggctgcctctctatggtaacgccccgcgcaggcgctggcctggccgtgttaggcttcgctggcgtaaagtccccgggagctttgcccctcacggagaacgttagttgaccctgatggggacccgtagggtaaaggttttgtttttgtttttttttacggaaaaggttgtggttaggccccttggaaagttgcgacaaaactcgagttagacaaggaaggtcggaactaagtggccacagcaacaatgcaccagcaagcagggagcgtgataggaagagctaaagaggaatcgggaaaccctgggtaaaagtcgtccaagtggaacttcctttggtcgggggtctgatactcgaaggaaacggtctttcacttctgggttagggcgtccgcccagagggcgactgcaatgaaggaaattgtgccctgcgacttcccgtaacagagctgtgtgtccacgctcccttttccgagcaggcgcggacgcttgtgccggaagtaaacttgttaacggttctttgccttttggggaggggagacagcccagagaaggctttggagacccttgagtcggccagcgagcagggtttcttacttgagcgcctccacaaataaacgctccttcgctcctccgtcgcgtgcgtttccctgggataataagtgggaaagtggtggcttttatttttttgagacagggtctcaccgccgtcgcccaggccggatggagtgcagtggcgcgatcacggctcactgcagcctcgacttcccaggctcaggtgatcctcctgccttagcctcccgagtagctggaattacaggcgtgcaccacccccccccaactactttttgtatttttttgtagagatgggtttcaccatgtttcccagccttgtctcaaactcctgacctcaagtgatccgccgtcttgggtcttcgaaagtgctgggacagcaggagtgagccaccgcatctggcccggaaagtgttttggagcgtagaaaaatgcaaattatagggctgccttcaaggatcccgaaggacccacagatttgccgcatcaggctcctatgcacgccggtaatttgatgtgttgagatgcactgcccagtgcgttgtttttactggaggagcttgtgtgcggagctccttgctagtgtatgtgttgggatgggagagaagtgcgggagaactatgagataatgccccctgatcctcagggtcttaggaggtatggtcggagaggctaagctaaagtatgaaagccgtgtgtaggcccttctgtgtagtgcagaaaaggtagaggtatgtgatttgaaagagtagggatgacatggaggatgcgactcctggttggatctataaactaatgtctttggaacgaaagcacatgcaaccttttgaaaatggatgggtgataatgaaagaccattccagagaagaaacaccatggtgcaaaggctcaagaggcatactggaagtacaatgaagagagcaatctaactgaaatgggaaaaaaagaaacaaagag

SEQ ID NO: 2099 - DNA, 6000 bp, Homo sapiens
catgtgtgtgtgtgagggggactgtgtgtgacaggtgtaagtgtgtgcatacccacacacatatcacagcagaacgcagagaacaccgatggactctgtaaaacagggcgactgtctgcttcttggggtattgcctgggatgatgagggtatcgggtggtggtgattgccccctccttccctgaacataaaatagttgtggctgagagaggggccatggtgacctgaggctgggagtggggaggttaggacggtggcgttgtggtggtggttgggggggtgggtagcggggtgggggttgtggaataaaggccaaaaggtgaattcaaggtcgggcagggagggacagctgcctggcctgtaggcacaggtgggaacactgggatggatcagcagggggtaagtggggccgtcctggccagaaccatggctcccctcaggaaggaggtggagggaagagagaggggcagtagaggcccaggagtctcccttccagcagagaggcctcttgtgcactctgtgctcgcctgggggccttttctggcactctgggcacacctggagctcctggggactgggaccacaggcagggtgactctccactgccccgagcctcctgcccctcaccaggccctgttagcatcacctcgggcacctggccacagcaggggccagtcagggcaccccgggatagcacgcccaggccctgtgcaaggcctctggcacttaggagaggcttttgcccctttgtcctctgagcagaagggttggcaaagagggaaggggacaggccagttctgcacctggcctttctccagaatgaaggcctccacctcccgtccgtccccacagaaagaaaagtaaactgttttcgcggctgcgcagaaagaagaacaggtaccggcagtgagtgctgcggaggggcgcagaggcccgcgccctggctggccctgtgcatgcgccttgcgccctgctcccaggtgccactaacccgtaatctggctctgtgtgcagtgctgcccggcagggctgtcgtgtgcgtgttgggtgggaaggcggaggcggcgcggggcgggctggcctctgagcatctggctgcatttagcacgttcctctgggcgccccacacttgtctagccctggtggtgcccgggccaccagcgcacttagcaatggaggacgtggctgggaaggaggcctggggagggccagggaggtgacactgcagcactgtggggttttttgttttttaaacaattctatgtgtataccatatacttatacatatattctttaaggagaatacattcccataaaacacaaattccagaaggaaagatggtgtcagcgacatctcttacgctgttccactgtttgccctcaggtgactcggtcactggttcctgctggatgcttctagatctgcactgtccagcacaggagccagttaccccatggggctattgagcacttgaaactggccagtgtgaccgggcagcggaacttttcatttgaattacacgtaaatttcattgctttgagtttgcattgccgcctgtggctagtggcaaccgtactgggcagcacttttctaggcgtctctgtgcaggttctggtagagaattttctccctgcaccttcgcccctgtgcctggggtgcacagcatcacaccacctccgccttgggttctggcactgaacgccatggctcaggacctgtcccctccatcgccagctgcccactcctctgtgatgaggacgcctctcttagtttgtccaggccctgcttgtggcctccagcagccgagaggacaggagagccaaggtctagagacatgtaccagggtgctgtgatggacaggcagggagggcagcaggctggggagcagaccccagaacagaggggctgctgcgtgtggtgtgggagactcactgtgcctctaggatgtctggctttctcctgctgtggatcttgggctgtcagcatgggccctggtggaccccatggagcctgtggggtggttggtctggtctctgcgacagatggttccaagggacctgcctgcactcctggggaccatagacctccagcctggagtcccaccttgtgctgttcctgtttctgaggcaggcttcccacttccagccccccaagcccaggtcccttggctccccccaccctcctgctctctctcacatacacacacacacacacacacacagtttcacacctccatatgcacacacctcttcacacagacgtcaatacatttgcccctccgtctcctgtgccttggccccccaacactgggctccctttcttgtcctcccccacagtgacaacgcgcctgcaaaagggaacaagagcccttcgcctccagatggctcccctgccgccacccccgagatcagagtcaaccacgagccagagccggccggcggggccacgcccggggccaccctccccaagtccccatctcaggtaggagtgatgtcttggtagcaggtcccctgccctccctccttctcctccggctttgctgttgtcctccatcctcccactcctctgtcccctttctggcctgggcagctatggacccgatgctttgcccagtgggggttgggcctggacctgggtctcctttcccccatccagcctggcatgcttccgggaggcatctgtgacttgctcgctcctccccagcccccacccccactgcagcgccctccccttccctctccctggtcttttgtctgcttgactctttctccatcttcttttcctccctagcagaggctctgggccctcagcccacagagcatccagatctccagagtgggctgcctgtccctcttcctggcctctctctcttaaaggggcctgagggaggagcccaagccaggtggccatgcaggacctttaaagggacagagagaggaagggctcagaggagggtgtggggtggctaagggggcaggtcctgggcttctggactgtccttgtctccaccccgcctgcccccagcgggccctccaggtgtctgcagggccctaggtgctggctggccaggtgggggtgttctcatagccggggatcctgcagctccccgttttctgctgccgccctgctctgctgctgactaggatagcagggctaaggacatggtgggagcctgtcccaaacagcacttcccccggcctggacatggtgccagtgccttctgtgtattcgttcactgagtccccacaacacccctgtgaagcaggcgctgtcatcacctgatgcatgaggaagcccagcgtcatgggtgtgtgacctgcctgaggtcccccacctggtgggcaggggtgtggcctctgccccatcctggtgccacgctggcttcctctgggatacactcgtctgagctgggctccctgtgggcagccctgtgccctgggaggtggagagaggggcctgcgggaagggagaggtgggcagggggaggctggggcccggctgtctctcaacgactgtttgcttccccagtcttctcaccaggccagtgggagccagcccctcccacagttggccagtgggcagcctggggcctcttctcttcttcgctctccttcctcctctcccctcacttctctatctcttctctctccacacagcgtttctggaccgcctgcctcagtgtccctctcgggggtggcctggggtcttggtgtctatgttggggggctgggagggcagtgactcttcatttgctgcgtcctgctcagtggcctgggtgggactgtggcctgaggtgtgactaaccgtggctttgtctctgtctgtctcccccaaaccccgtgctctgctgtgccttcccgcgcggcccctcacccgccgccgacccacagctccggaaaggcccaccagtccctccgcctcccaaacacaccccgtccaaggaagtcaagcaggagcagatcctcagcctgtttgaggacacgtttgtccctgagatcagcgtgaccaccccctcccaggtcagccgcggccgccgcggcccagctctcctctcttcctgccctctcagggcgtgcatggccttcatcctctatgcttctgtctcaagagccaggaatctggccagagagagtgtcagtttccctctctcaccctttgttccctccatccatcatcctccatcatcctccatcacccatctctgagcatgtactaaggccagatgcagggccacagaggggaaggtgccgcctctcccggcgcagcagttacatcagcagcgccctcgcgacgcagtgggtgctatggcagaggggatcggggagtgtggaggacgtgtggctgtcagggaaggcttccagggccagggagagttggaaggtcctggaatggctgaagcacctggacttcagctcccacagctgctgtcagcccctcgagggcgggggcagcggccaggctgcagggcagaactgccgtgtgcacactccctaagaggcgtggaatgcccagatacagcagggagccacccaggggggcttgggtctctcccgacgggcccttggctcagcaaggagccacgcagagggtcttgggtctctcccagtgggctcttggctcagccgtggaggtgcctctggggagcctggcccacagccccaggtcttacgtccttcatggtggaggtcgggctggagtacctgtgctggaagcgcatcttgccagtgctggagtgggctgacgtgttgtcagatttgcccagaggtggccggccttccccgcactccccgagagctgactgcctcctcaagtccagccctcaaggcctcagccttcctcctgtgggtaggccaggacccttcccacacagagcctcgcctgtagggaaggctgtccagtccaggctgtggtggcctccagcaaacaccttcacacagctcagacgcctagtggggataggttggagggtgtgagtgtggggagtggccgctgggaactgcgaacagtggtcgctgctaggaagggttggggatggtgggcctcaagcccctatgcaaagactaggactagaactaaggaactgaggctgcaggtgtctgggtgggtgacgccctagttcaggggcctggcaggcgcgggagcccctctctgtgggatagtggcagagggcgatgtaggaagagcagtgtgggggcagggctgaggacctccagggctgcttgctgctggcctccccggctcgagcatgcctccgccctggtgatgcccagtgtgtgtgcaggcgagggagacgggatggcatggacactggcaaatactgagcagagaacggtgccagccacttcctataccccattgtttggttttcaatcaccctctgggaggacatcatgcccccatttaacaggtgaggaaaggaacccagggcctgtgccgcgggcccacgccagagcaaggtgtgccaggccaggaggtggtgcagagaccacccgcacccaggctctgagcgcgcctatccctccataccatacctgcctccctggccaccgcgtgtgccatctccaggcaactggtcttcccggtctggtctggggtcggggagccatgacctttgggtggggcatggggcaggggtgggcttgcctttgtccatgacacgggtgcccacgggcttcccggctgtggggtggtgagtagcctgtgtccctgcatggagggacagtcccgggcctgcatggcgaggtgccacctgccggggcagcacagcgaagggatggtcagctctctggcggatgaccctcccctcagcacatgacggatattgctgcctgggttggctgacttttctgagacaggagggaggggtgttgctggggcagggtgggggccactggggagagatgctggccgcccgctggtgggaggcacctcgaggctgtgcaccggcgtcctcagggctccttcagagacggccggttatggggcagagcagtgacctcc

SEQ ID NO: 2100 - DNA, 6000 bp, Homo sapiens
ttcctgtccctttgggtctcagggctatgggaggaagcctcacggcacgtgtgtgtgtgtgtgtgtgtgtgtgtgtgtgtgttgctgcggagtggctggctatatgattgtggaaggtgtagaagggtgagtagggcctacacatgtgtgtgcctgcaggtcccctgtgtttacaccatgggtgcttggaagggtatgtgtgcatgtcacctgttgtctgggtctacatgtgtgggtgtgtgcgtgtggttgtgtgcattcgcaaagcctgctgtctctgccaggcctgggttggtgctcggagctggcagtgtctctggtatccaccgaggcgagtggtccccggtaacgtgcacatggaagcctgggttgaccattgggttggacgagatccccttggtgggcaggatgggggtgtcatgctcatgctagcctcaggggtccccagtgcagatgcctcaagctccctgagtctgatgttggtggctgtggagatgagaagccaggggccaggccaaggaaaagacttggctgacacgtcaccagctggtggacacggacacatgggctcatgtgcaaggaagtggtttcacacagtggggctggacggccaggagggggtgagctctctgccacgaggagggttccagcaacaagggctcaagggttcctgtggagctggggtctcctgcccgccctgcgggtccctccaggatccactggacctggagtctcagcaggggtgccaggccccgcttagtgccctcctctgtctgccccagtcacgcattgccaagcgggggcgcaagctggtggactacgacagtgcccggcaccactacgagtcccttcaaactgccaaaaagaaggatgaagccaaaattgccaaggtaagggctggaggcgggtcggggcagcgtctgcagggggctgagagagggcgggtgtctaggaccccgagggtggaggcttcctcctgcctggccccaggtggctgaactgggggtggggacgatacagggcccaggccggtgagtgagaggcccttgtgggtgcctgggtgaggtccaccctaggcccattcctgccccccgtgccaccctggcccctcagccctgatccaggccacctgccagcctgagaatgggcctcctgggtttccctggaacggcgccgccctgcctggcgagccgggtggaattcgtcacgcgatcccaggcgacctgtccctggctggagcgagccagtaggtgcagagctggccccactcatcctttggtgaggggctggggtggccccgtcctccgggcagggccgtgcttgctgggccccctgtgctgctaaccacgctcaccttttgcctctgcagttggagttcaccccctttccttaccccccgggctccccctaattctctcggcctcaagggcccatatctgcttggggtggcccccgcgcgtggggcgtgtggacctgcatttaatctgtgtgtctctgtttctctctccccacctccctggtctctccaccttcctttgccttgacctccccaccccagcctgtctcgctgcttgagaaagccgccccccagtggtgccaaggcaaactgcaggctcatctcgtagctcaaactaacctgctccgaaatcaggtgacactggcttctaaccttgcacgtgctggcgccttccggtctgtcgtcctgtcctctcgccctgcggtggaatgcagggctggcatctgagcccagctggggcagggtttttcaaaggcctctgctgggagagctctgcttcagaggagacctgaagtcaaatgtaggggtcaaagaaccggctgaggggctctgtgtgacctgggtgggggcatagctatgcccgctccgtggctgcatctgtggtcattcctggagactcctctgaaatcctagtggtccaggaatgcctttgagccattgtcctctgtgagggctcctctggggagggaggcgacatcatcaggcccctgtactgccatgcctgtccttcaagccacatgacaactctgagatcatcttgaatttactgagcagagaaagctgcccagagaggcacatcacagcctcctcccagggccccagagccggttaggggcagggttggggctctcctgactgaagcccctgcgtcattttcctcggacttgtggtccccgtggtgactctggaggagttactgggaggaccctccagtctggatgggatgctgagacgtggaggggaagcatgggtccttggcctttggggattcatggagggcaagtgaccagcaccacagtgttcctggggggcttcccggaggaggcttttttacaaaactcctgggccatctcaccatcctggccatagaggctatggtcttctcagccccctgccctccaaatgggttacagtgtggccagggaccactggatgcagtgccctgtgagaggtgggtcatgtggttttctcgccaatgaaactgaggcacatttcaggtcagtgtagtcacagcctggatgtggccctcacacttctccatattcccgagaggctggcgataggggcccggccccggaggttgggtttctctctgggcagctgccccattttttcggagcctcctcttgatttcatcatcttcattgagtgcctgtgacgtggagagctctgggtgggcttggcatggcttgctgtccaatttctttttctattttttttttttttttgaacgggtttctctccgttcccctggctggagtgcagtggtgtgatcatgactcactgcagccttgacttccccaactcaagcaatccttctgcctcagcctcccgagtagctgggaccacaggcacgcattgccgtgcctggctaatctttacgttttttgtagagactgtgcctcattatgttgcccaggctggtcttgaactcctggggctgagcgatccacctgcctcggcctcccaaagtgctgggattacaggcctgagccactgctcctggcctggctgtccagtttctcacctgatctgctgcctgatttattttaggccaaggctgactttggagacactgagtgttgacagcctcatcctgaggtcagggtgcccatggggaaccaggggctgggggtgatgcctagggggacttcagtaggcctgagacttcatctgcctctggaggtagaggaggaaccaggggctggagtgggtatgccctgccagtcagttcagcacttgggctagaagggaatgggactactgacggagggcccgggtttctgaataattttccctgaaacaggtgaaacatttttttgtggatgggagaacctcttaggaggctatggggcctgcccactgcttttgggctcctgggacaggtgtggttgggattatgctgggagggcctgcctccacgcccaccctgggggagcagcgagagggtgaggcaggtgatcacacctttgggtgctgggctgtgggtgtttcacattttggccaaactagctgtcccatttgggtcccatctttatttgagcacatcctccttgtccccagcccactcatacctggctggaggctggagagcctttggagtggcctgtgggcagctggctggctgtgagatggcacagctgggactccggggctgccctgcttgggaacttgactttggggagatagtgcatcctctctaggctgcaccagggggctggccggctccatgcagaccctgggctagttctgagctgctctccacacctgcctcagcgtcctgaatgctgtcctcgggaccccgggcccatgtgactctgctcttccccactgttagcttcagtggagctggggtgggggcactctctcctcatggcagacagccctcaccttactccctgccccttccacatgcttcctaaagagccagaatatgaggaatgtcacccaaagggaatacaagacacgggtcctgacttccaggaactcaagcggaactgtccccgctcttgctctcggcagcgttgctgagcggtgagagcacggctgggtgcagatgttcccacagacaagctgcggtgctgtcttcactgctgtccccaccgttgccatctggggagttgtgggggtggtggctgcatcctcatggagagggggtcctagtgggtacaggagccgggtggtccaggcaggttcttacggaatgtgggactttagacccactgttggcagttgagggcagggggtatgtgtgatggtgctcagctcacaacagtacccctaggactcactcattttatgagttccatagaaccatggttggcagcccccctgccaggtaatgggacacccaggggagtagggcagggatggcccagccatagcctggagacggaggaggggcagtattcccctcctggtgtggggtgcccagggtccctggatccaagagaggtgtgcatgttggaatagacattcttccccaccccccgctccccattctgcctttaaatttttattagattctgaaaagccaggcaaggagcccacgcccactctagcgagtagctggaggtaacctttcagaagccatggtggcccctcctccagtcccaacccaagtcactgggcctaggggctgacctgggctagtcctggtgtctgaggctggatgggacagctggctgggcttggggcaatcgtgtgctttgtggttaagtggccttccggccatctggctgcctttgccagaaggcggcccagcctgggccccagccccggcctgagaacgtgaggctgctggcgggaagtttccctaggcggggcctgacactttcctgggctgtgactcagaccccgaatccctgagtcactctcgccggcagtgtcctcccgcagtgagccagcacagccccttccctgggcgggctgggcaccgggcagggtctgtgactcacctgctgcccgcagtcccttccccagcactctgtggccgtgtgatggggcctgagcaccactgcctggtgggtgtgagtgcctggaggatgcagggcctgccctggggaaggtgtgggctaggagtgggaccaggcacagcccagctgcctggctgcctcctccctggccctgcaccctcctctagggtccccctgacattcctagaggtgcctgagtggctgcctctggtctccctctggtggggacaggtcccaggagagggctttgtgggaaggaccatccctgggaggtgaagtgaaggctggtggctgaggctgccaggagctggccctcagaaatggggagggagcactcaggggcgggggcaattgggggcagcgacagatgctgccctgagagccagaaggcagtggcagggctggcacctagcctgaggaggttcattgtggaagtgggcagggtccccacttggctgggtctggggtctgcctctgtgcatgtcccgtgtccagctcgccaagccccaggcttgcccctcttgttgtgccctactccacgctcactgccctcccggccacgtgggcctctctttggcaacggctgctcagccctccctttcccagatgtcctcagggtcctggagggctgcagggggaggtcgccagcatgggtgtccacatccagttcagcctctgtcttgcccggagccctggtcccagcgcactggccaagaggggtgggcaggaggtgggaggactggccatggggctgggctggctgggacgcccaacagaggggaatgacccgtgctgccccccaggccgaggaggagctcatcaaagcccagaaggtgtttgaggagatgaatgtggatctgcaggaggagctgccgtccctgtggaacaggtgaggcccagcacggtgcccagcctgcgtggggcagtgtccagtctgcgtgctgcggtgcccagtctgcgtgctgtggtgcccagcctgcgtgctgcggtgtccagtctgcgtgctgc

SEQ ID NO: 2101 - DNA, 6000 bp, Homo sapiens
ctctaacagtagacacgtaccattgtacacttgcccagacccatagaacgtacaagccaagagtgagttctcacataaactatgaactatgggggataatgatgcaacaacggaggtgcctcagttgtaacaaatgtcccactgtgctggggatgttgatagtgaggggggttgtgcatgtgtggggcaaaggttatgggaaatctctgtaccttctgcttacttttgctctgaacctaaaagtgttctaaaagcctggccaacacggtgaaaccccatctctactaaaaatacaaaaattagctgggtgtggtgttgggcgcctgtaatcccagctactcgggaggctgaggcaggagaatcacttgaacccgagaggcagaggttgcagtgagctgagatcgagccattgcactccagcctggggtacaagagcgagacttcgtctcaaaaaaaaaaaaataaaaataaagtctatttaaaacaaacaagcaaacaaacacagaaacatggcttctccagccctcaccgtttggatgcacggcacactccctctgcctgtgtgctttatctttctattctgccacactgaggtttcccaactattgccccaggggacattgtcctcatttcaatttgtatttttaatagcacttctttctgatgacaaaaagagtacatgtacaaagtttggaaaataaaaagaaaaagaagtaggagaaaaaaaccccaccccgaattgctccacctggagatatcaatcacgttttggatcgcggctggcacgatactgtttacattaaactgtattatcctgttaacatcacatttccctatcatgagaaacttcaagaacatattcttttggtaaacatttcatacatggccatactatagtttagttaatcattcggcattcaggtggtgatatttagatgtgttcagttttgcattattataaataatgtgatgaacatctgtgtggtgaaagctttgccaaatttttgaattaaatcatagacttggaattatagggtggaagaatatggatattttggttattcttattctattacaagattgctttctagaaattctgttatctgtttacactctcagaagtagaatgtgagtttctgtctctatggttttattaagtaacataatttaaaaaataatttgttgatttgatgaaaatgaaaacagaaatggtatttcattgatttaatgaacctttctttttgtctggtaagtctgactttcgaaaacctatttattaattatttgaatatccaattttataaattgtctactatatattggggttttaatgtttttcttatgaatttgtaagagttctattttattgccaaaaaaattttccctagtttcttacagtttaatttttatgtcaaacttattttcaaaatgggaataactcttttcctggtaattaaaataacgggctgtcatggtaaaaaaaaataacatactatagaaaattatacagaaaaaagtaaaaatctacattctaccccttgaacttgtactaacatttttagatcatttcctcccaaacttttatcctatgtttttatggtattttctgaagtttaagaattctaatttttatgtacctcaaagcaagcattttaaaatttcaatatattctccagtgcttttgtgtttagaaatatctttttaatctagcgatctgataaaaaatcacctctaaaaaaacagagctgtgattctttttttttttgagatggagttttgctctcgttgcctaggctggagtgcaatggtgcgatctcggctcaccgcaacctctgcctcctaggttcaagtgattctcctgcctcagtcttccgagtagctgggcttacaggcatgcaccacaacgcccggctaattttgtatttttagtagagacagggtttctccatgttggttaggctggtctcgaactcccaacctcaagtgatccgcctgccttggcctcccaaagtgctgggattataggcaaggcattatgtcatattatagaatattaaggaaattaagggggaaagaagtcagccttaatgcctggaccctaacacatctgcttcctttatgcattgttctttcaagacattgatcatgagcttttaatttattttaatttatttttatatggttgcaagtacaatttcctatcttttcctttccttcataattatgccctaagcattattttcttgttgctacgtagtctcggtaatggttgttttaaatgattcccaatggcccctcctgtggctgtgctgtcacagctgaccccatccctctaatgaacacttccgttgcttccaatttttctgtcaagcgatatttagaaacaccagagtccagtgaagcagaatctcccactgttccctgggggctgactgtaatgcaatttgactttgctcatttcctcctttcctcagaggagtgttggaagaaatcacttttagagaatggttagaaaaacgaccaacagaaaatgaggaggaaggagatcatgagctgaaagcatgttgagcttttaggaggaagctgctttagaagcccagactgtgtaggttttgcttttgtgactcacaaatcgggcatgagtttataataattttgacagatgcttttcactcatgcagcgcttggtgcttttgagggcattggtgcaggaaggcttgatgcagaatctctgcttatcatttgctgtctgtgtgacctacatcagcggcgcctcagtctgtcttcctgcagaataagaatacagtcagccctctgcatctgtgggttgggcatccatggatccaaccaactgtggactgaaaatatttggaaaaatacaataaaaagtaagactacaacaataaaataatataaataaaaaacaaggccgggcacggtggctcacacctataatcccagcactttgggaggccaaggcgggaggatcacgaggtcaggagatggagaccatcttggccaacatggtgaaactccgtctctactaaaaatacaaaaattagctgggcatggtggcacgtgcctgtagtcccagctgctcggggggctgaggcaggagaatcacttgaacccgggaggcagaggttgcagtgagcccagattgcgccactgcaccccagactggcgacagagtgagactctgtctaaaaataaataaataaataaataaaaaatacagcgttaacaactatttacatagtatttaaattgtattagctattacaagaatctagagataatttaaagtattttggaggatttgtgtacgctatatgcagatactgtgtcaattcatatgagggacttgagcatccctggattttggtatccacggatgtgctggaaccagtcccctgggggataccgagggacatcatgataataggcccggaagaggacagacgaacacactgggccatggggcagcactgagcggtggtggaagaaccccgagtagccggagaaagagcaggagggccttccagggaagagggaatggcctgtgtgaacccaggctgaacctctcattcctgggactcgatttctccatttgtacaaactgcttggtttgtggtctgcaagagcccttcctgttcctccaggaagcctctcagggacctctgtccctggccagctctgctcctctgaccgctgcgggtcctgcaggccatagccctggctcctgtgtgtgcaccagacacgtctaggcctcttcagcgggacctatctctctgctcaactcaatcaacagttctttagaaatttccaggggcagcaaagtgctgtagcccctgacatgttttagggctgaatgggggtgggtatcagcagactcaatacgtatttattaacttaaaagaagtgtcattggtctattggcaaagctggttagcaataaccttatcttctccaggaataatgatcactaatcattccttcctgctgggggtaggagacaacccggcgtatggtggtggagcacctgggagacagaggcagagatctcgttcctcgatcccggcgcgttggttgtaaagtaggaacagtaatagcacctacctctagggccacggagaccgaatgaaataatgcctgtcaagtcacttagtacacagtaagcactcagtaatgctaggttgttgttattataataaatttttagcgaacgggaagaccaagcaccggttggtactgggctaggcgccgtaggcaaagatgtggagatgtcccggaggcgcctagggtatccgggcgaaaacccgagggccgaaggctgggaggaggcggagcgtcgggcaccgggcaccgggcaccgggcgggaggtgagcccctggaaaaggagggggctccgggcgcgttctcccagcagccgcggctcctctgttcagggccgcgcccccttcgccgcactttctctttgatttcgaaagcactcctctcctccacctagtctcctttcctgggttgcaggagattactgcttgcggggaagaccaagacgccaggccggcggattagtccccgccccggggcggtgcagctggagcgtcaggggagtcccgctcgccgcagccccagcgccgcgcgcgcccctccctcctcgcggacctggcggtgccggcgcccggagtggccctttaaaaggcagcttattgtccggagggggcgggcggggggcgccgaccgcggcctgaggcccggcccctcccctctccctccctctgtccccgcgtcgctcgctggctagctcgctggctcgctcgcccgtccggcgcacgctccgcctccgtcagttggctccgctgtcgggtgcgcggcgtggagcggcagccggtctggacgcgcggccggggctgggggctgggagcgcggcgcgcaagatctccccgcgcgagagcggcccctgccaccgggcgaggcctgcgccgcgatggcagagatgggcagtaaaggggtgacggcgggaaagatcgccagcaacgtgcagaagaagctcacccgcgcgcaggagaaggtgagcgagccggagccccagcagccgcggagtcccagccgccgcggagccccggccacctgtccccctatcctccgaccccggggcctggtccttcgccaggatctggtgctgtcacctctagaggagcgctttcgaggggcttcgaggtccccaggctgcgttccccggcgctctgggtgccctcttaggtttgcgtcctctgtctccccacacccggccggggcaggacagggccccgctttgcaccttcgtggctcggctgcacagcagtggccggccctgctccaggctcttctcaggcgcgcgctccaggctaccccgctttggaggccaagggccgggaggctgggaggccaggtggtgaccctcagctctccaggcccatgcaggcaacctaggctgggccggcgctcggggcgagagggagtatgtccctctgcccctggggacactattcccccggactcccaaggctgcttctcgaaccggcacccacagttccttccttcccactgcttctccactttcgttctccgtgggccgaaggagggattgggtttcctttcccgagaggtgcctgcggcctggaagctcccgcccagcccggccccaccgggagcccagggctacgcaccccgcaaggaggtgccctcgccccagcaggggcttagcgtttccggcggccggggagcgggtggcggcactggctttgggagcccacggccgggtggggagctggcctggaggaggcgcgtggaaggcgccacaggaaacccgacccctcctcgcggagagctggaatgggggatggagccggggcctcccagggtgcccagagcgtgcaggaaatgcagagattgaggggcgggggtctgcacccggtcagttgtctatcccaagccacctctggtttattgaattg

SEQ ID NO: 2102 - DNA, 6000 bp, Homo sapiens
gcagaaactttttaacttgatgtgatcctatttgtccattttcgctttggttgcctgtgcttgttgggtattgctcagaaatttttggccagaccaatgtcctggagattttccccaatgttttcttgtagtagtttcatagtttaaggtcttaaagtctttaatccatttttatttttttataggacaagagataaaggcctaatttcattcttttgcatactgacatccagttttcccagcatcatttattgaagagactgtcttttccctagtgtatgttcttggcacatttgttacaaatgagttcactgtaggtgtgtggatttgtttctgggttctctattctgttctgttggtctatgtatctgtttttatgtgagtaccatgctgttttggtgctgaaagctctgtagtataattttaagtcaggtaatgtgattcttccaggattgttctttttgcttaggatagttttggctattctgggtcttctgctactccatataaattataggattgttttttctatttctgtgtagaatgtcattgatgttttgaaagggattgcactgaatttgtagattgctttgggtaatacggacattttaacaatattgattcttccaactcatgaacatggaatgttttccattttttgtgtcatcttcaatttctttcatcagtgttttatagttttcattatagagatattttgcttctttggttaattcctaggtacctaattttatgtgtagatattgtaaatgggattacttttcaatttctttttcacattgttcactgttggcatataggaatgttactgatttttgtgtgttgattttgtatcctgcaactttactgaatttgttgatcagttctaatagttttcctttggagtcttcaggtttttccaaatataagatcatatcatctacaaacaaggataatttgacttcttcctttccaatttggatgccctttatacctttctctcgtctgctttagctaggacttccagtactaggttgaataacagtggtgacaatgggcatccttgttgagttccagatcttagaggaaaagctttgtttttttcctattcagtatgatactagttgtgggactgtcatatatggcttttattatgttgaggtaagctccttctatcccgtttttttacggcttttatcatgaagggatgtcaaattctatcaaatactttttcggcatcaattgaaatggtatggtttccagtcttcattctgttgatatgatgtatcaagctgatttatttgcaaccatccttgcatcctagggataaatcccctttgatcatgatgaatgctctctctaatgtattgttgaattcagtttgccgatattttattgaggatttttgcatcaacattcatcagagatattggcctgtagttttcttttttcaatgtgtctttggttttagaatcagggtaatactggccttgtagaatgagtttcgaagtactctctcttcctctatttcagaatggtttgtgtagtattggtgttagttctccttcaaatgtttagtaaatttagcagttcggccatcttaagagttctttatcagacgtatgttttgcaaatatttcttccttgtatttcattctcttaacagtgtctttcacagaacggaggttttaatttttttaattttaagttttgagatggagtttcactctttgttgcccaggctggagtgcagtggcacgatctcggctcactgcaacctccgcctcccgggttcaagcaattctcctatctcagtctcctgagtagctgggattataggcgcctgccaccatgtccagctaatttttttttttttttttttttttgagacggagtctccctctgtcgcccaggctggagtgcagtgacacgatcttggctcactgcaacctccacctcctgggttcaagcgattctcctacctcagccaccccaagtagctgggactacaggcatgcgccaccatgcccagctaactttttttgtatttttagtagagacaaggtttcaccatgttggccaggctggtctccaaatcttgacctcaggtgatctgcccgcctcagccttccaaagtgctgggattacaggcatgagtcactgcgcctggccagaggtttttaattttaatgaagtccaacttaccagttttttctttcatggattgtacttttggtgttgcatctaaaacctcattgccaaacacaaggtcaactatattttttcctatgttatcttccagaagttttacagttttgcattttacatttaggtctgcagcccactttgagttaaattttgtggaaggtataaggtctgcatgtagattttttttttttaatgtggctttccggttgttctagcgccatttgttaaaaagactattattgctccattgacttgcctttgttcctttgtcaaaggtcagttgaccatttatgggtgggctctctattctgttccattgatctatgtgtctattctttctcaaataccacaccgtcttgattactgtagcttgatgttaggtaatgtcagtgcaacttctttggtattgtgttggttattctgggttttttgcctttacatagaagttttagaatcaatttgtcaatatgtgcaaaatcacttgctgaaattttggttgggattgcactgaatttgtagatcaacctgggaagaattgacatctaaattgattcttctaatctatgaactcagaatagctttctgttatttaatctttttttgttttccattagagttttattatagttttctgcatatagatcctgtacatatttcagatccatatctttttttttttttttggagatagaatcttgctctatcacccaggctggagtgcagtggagtgatctcggctcactgcaacctctgcctcctgggtccaagcaattctcgtgtcccagcctcccaagaagctgggattacaggcatgcactaccgcacccagctaatttttgtatttttagtagagacaaggtttccccatgttggccaggctggtattgaactcctggcctcaagcaatctcccaccttggcctcccaaagtgctgggagtataggtgtgaaccactgcgccctgcctagatccatatctaagtacaggttgagtatccctaaatctgagaatcagaaacactccaaaacccaaaacttcaagcccccacatgacattcaaaggaaatgttcattggcgcatttcagatttagaatttttggattaggatgctcaatggctaagtttataattcaaatatttcaaaacctaaaaaaacctgaaatccaaaacacatctggtctcaagcatttcagatacgtgatactcaacctgtattactttgggagacggtactattgtaaatggcatttttaaattataaattccaattgttcattgctggtgtataggaaaactgacttttgtattcaaccttatatcctaaaattttacagaagaagttttatgtcttccttcccaatatgtatatacttttaatttacttttcttgttagctagaacacccagtaccacgttgaaaagactggtgagaggggacatgcttgccttgtgtcagactttaggtggaaagaatgtagtttctcacaacagaaacaatctattgttagctgcagaatttttgtagatgctctttatcaagttgaggaagttctcctttattcccagtttgctgagtttttatcatgaatggatgttgaggatgggcacttcttttatttgtgtgtgtgtgtgacaggatctcactctgtcacccaggctggggtgcaacctcacctctcaggttgaagcgatactcccaaggagctaggactacagacgccaccacatccagctaattttttaaaaaacttttgtagaggtggggtctcattatgttgcccaggctggtctagaacactttggcctcccaaagtgctgggattacagccgggaaacactgcacctggccaagggtttgcacttttaaaatgttgctttaaatcaatctattccagaaattgtaagcaacataaaacgtaaagcaagggaagtgagtatgaaatagcaactgttacaaaaactgcctactataatcaatattcttgtgcaatgcagtatgctgagcgtgggagccccataacaatcacttgcctccatggtctttggcaaatagatattactttattttttattttcgagacaaggtcttgcactatcgcccaagctggggtgcagcagcgagatctagctcaccgcagcctccacctcctgggctcaagccatcctcccacttcagcctcgggagtagctgggactacaggcgcgccaccaaacctggctaatttttgtatttttggtagagacggggtatcgccatgttgcccttgccctcgaactcctgacctcaagtgatcggcccactggacctccccaagtgctgagattacaggcgtgagccaccgtgcccggcctccaaatagttaagactttaaacttagaaaccctattcacaacacaaactccgagtgaagctcagtggcattttcttacaggaagaaatacaggagttaatcaacaggtatgtgggatgttcccacatcaaatcctaaagataaaattttaactcagttcctcctgcactatctgattctccccaaccttgtctcgcagaaaccacagcgcagcctgaaaacacgccccgtctagattcaacacctcatttagaaattcaatttctcgttgctagttggatagcgtttgccaagtaatttgaaaaaataaaaataaaccaagtggtctgggatttaaacaagataatgtagggtgaaaaaagcactcaggtgcggacagccatggagcgtgacttcctgtgcactctttccccgccagctcaacgccagagccgcgcgctaggcggagactgttggtggcggaggccggagtcgcacgcctacgagactgcgcggacccgcccaaaaggaaaatggaagtagtggcgtgaggctgcgacagtgaaggttatttttctctttttaaagggccgctagacctcccgtctaaaggaagcgcccgacgggcctccgaagtacacgcccaggcccccacagcgcagccgcccgaccgcctctcttcacaccggccagagtccaccctctcccactttcccctcccctcccctccccgccccttccctccccaccccttcgccccgccaaccctagacccggcatgcgctgcgccgaccttttccttccgagccgacctctccaccttcggcgcctcccaatgacaagcggcgcggagcattgtggtcccgtgcgcaagagcgaggccgagggcagaaaaagaaagcaaaagactagggcgagtcggtagagcgggccccgcgcatgcgcaagggcggaggcggtggtgaaaaagggtggtgcgtggtctacggcgagcggagtggggcggggtcgcgcgccttggcggggagtccgcgagccaggaggggcggggggtgaatgaaggagcgggcggaggaggaagtgtcatggcgtcgggccgtggagcttcttctcgctggttctttactcgggaacagctggagaacacgccgagccgccgctgcggagtggaggcggataaagagctctcgtgccgccagcaggcggccaacctcatccaggagatgggacagcgtctcaatgtgtatccttttctgttcgccgccgctcacgccctgtttcccttgcccggtcgccgggcctggtgccccgcgaacatggcgccgccggcctcggccttcgctgggcctcggcgccgcggtcagggaagtaatgttccggctcgggcagtcgcgaggggtcagcagaggaagggaggaggagataggaccccaggaatgcgggccaggagcctgcgttgtgtaat

SEQ ID NO: 2103 - DNA, 6000 bp, Homo sapiens
tttctttcatcagtgttttatagttttcattatagagatattttgcttctttggttaattcctaggtacctaattttatgtgtagatattgtaaatgggattacttttcaatttctttttcacattgttcactgttggcatataggaatgttactgatttttgtgtgttgattttgtatcctgcaactttactgaatttgttgatcagttctaatagttttcctttggagtcttcaggtttttccaaatataagatcatatcatctacaaacaaggataatttgacttcttcctttccaatttggatgccctttatacctttctctcgtctgctttagctaggacttccagtactaggttgaataacagtggtgacaatgggcatccttgttgagttccagatcttagaggaaaagctttgtttttttcctattcagtatgatactagttgtgggactgtcatatatggcttttattatgttgaggtaagctccttctatcccgtttttttacggcttttatcatgaagggatgtcaaattctatcaaatactttttcggcatcaattgaaatggtatggtttccagtcttcattctgttgatatgatgtatcaagctgatttatttgcaaccatccttgcatcctagggataaatcccctttgatcatgatgaatgctctctctaatgtattgttgaattcagtttgccgatattttattgaggatttttgcatcaacattcatcagagatattggcctgtagttttcttttttcaatgtgtctttggttttagaatcagggtaatactggccttgtagaatgagtttcgaagtactctctcttcctctatttcagaatggtttgtgtagtattggtgttagttctccttcaaatgtttagtaaatttagcagttcggccatcttaagagttctttatcagacgtatgttttgcaaatatttcttccttgtatttcattctcttaacagtgtctttcacagaacggaggttttaatttttttaattttaagttttgagatggagtttcactctttgttgcccaggctggagtgcagtggcacgatctcggctcactgcaacctccgcctcccgggttcaagcaattctcctatctcagtctcctgagtagctgggattataggcgcctgccaccatgtccagctaatttttttttttttttttttttttgagacggagtctccctctgtcgcccaggctggagtgcagtgacacgatcttggctcactgcaacctccacctcctgggttcaagcgattctcctacctcagccaccccaagtagctgggactacaggcatgcgccaccatgcccagctaactttttttgtatttttagtagagacaaggtttcaccatgttggccaggctggtctccaaatcttgacctcaggtgatctgcccgcctcagccttccaaagtgctgggattacaggcatgagtcactgcgcctggccagaggtttttaattttaatgaagtccaacttaccagttttttctttcatggattgtacttttggtgttgcatctaaaacctcattgccaaacacaaggtcaactatattttttcctatgttatcttccagaagttttacagttttgcattttacatttaggtctgcagcccactttgagttaaattttgtggaaggtataaggtctgcatgtagattttttttttttaatgtggctttccggttgttctagcgccatttgttaaaaagactattattgctccattgacttgcctttgttcctttgtcaaaggtcagttgaccatttatgggtgggctctctattctgttccattgatctatgtgtctattctttctcaaataccacaccgtcttgattactgtagcttgatgttaggtaatgtcagtgcaacttctttggtattgtgttggttattctgggttttttgcctttacatagaagttttagaatcaatttgtcaatatgtgcaaaatcacttgctgaaattttggttgggattgcactgaatttgtagatcaacctgggaagaattgacatctaaattgattcttctaatctatgaactcagaatagctttctgttatttaatctttttttgttttccattagagttttattatagttttctgcatatagatcctgtacatatttcagatccatatctttttttttttttttggagatagaatcttgctctatcacccaggctggagtgcagtggagtgatctcggctcactgcaacctctgcctcctgggtccaagcaattctcgtgtcccagcctcccaagaagctgggattacaggcatgcactaccgcacccagctaatttttgtatttttagtagagacaaggtttccccatgttggccaggctggtattgaactcctggcctcaagcaatctcccaccttggcctcccaaagtgctgggagtataggtgtgaaccactgcgccctgcctagatccatatctaagtacaggttgagtatccctaaatctgagaatcagaaacactccaaaacccaaaacttcaagcccccacatgacattcaaaggaaatgttcattggcgcatttcagatttagaatttttggattaggatgctcaatggctaagtttataattcaaatatttcaaaacctaaaaaaacctgaaatccaaaacacatctggtctcaagcatttcagatacgtgatactcaacctgtattactttgggagacggtactattgtaaatggcatttttaaattataaattccaattgttcattgctggtgtataggaaaactgacttttgtattcaaccttatatcctaaaattttacagaagaagttttatgtcttccttcccaatatgtatatacttttaatttacttttcttgttagctagaacacccagtaccacgttgaaaagactggtgagaggggacatgcttgccttgtgtcagactttaggtggaaagaatgtagtttctcacaacagaaacaatctattgttagctgcagaatttttgtagatgctctttatcaagttgaggaagttctcctttattcccagtttgctgagtttttatcatgaatggatgttgaggatgggcacttcttttatttgtgtgtgtgtgtgacaggatctcactctgtcacccaggctggggtgcaacctcacctctcaggttgaagcgatactcccaaggagctaggactacagacgccaccacatccagctaattttttaaaaaacttttgtagaggtggggtctcattatgttgcccaggctggtctagaacactttggcctcccaaagtgctgggattacagccgggaaacactgcacctggccaagggtttgcacttttaaaatgttgctttaaatcaatctattccagaaattgtaagcaacataaaacgtaaagcaagggaagtgagtatgaaatagcaactgttacaaaaactgcctactataatcaatattcttgtgcaatgcagtatgctgagcgtgggagccccataacaatcacttgcctccatggtctttggcaaatagatattactttattttttattttcgagacaaggtcttgcactatcgcccaagctggggtgcagcagcgagatctagctcaccgcagcctccacctcctgggctcaagccatcctcccacttcagcctcgggagtagctgggactacaggcgcgccaccaaacctggctaatttttgtatttttggtagagacggggtatcgccatgttgcccttgccctcgaactcctgacctcaagtgatcggcccactggacctccccaagtgctgagattacaggcgtgagccaccgtgcccggcctccaaatagttaagactttaaacttagaaaccctattcacaacacaaactccgagtgaagctcagtggcattttcttacaggaagaaatacaggagttaatcaacaggtatgtgggatgttcccacatcaaatcctaaagataaaattttaactcagttcctcctgcactatctgattctccccaaccttgtctcgcagaaaccacagcgcagcctgaaaacacgccccgtctagattcaacacctcatttagaaattcaatttctcgttgctagttggatagcgtttgccaagtaatttgaaaaaataaaaataaaccaagtggtctgggatttaaacaagataatgtagggtgaaaaaagcactcaggtgcggacagccatggagcgtgacttcctgtgcactctttccccgccagctcaacgccagagccgcgcgctaggcggagactgttggtggcggaggccggagtcgcacgcctacgagactgcgcggacccgcccaaaaggaaaatggaagtagtggcgtgaggctgcgacagtgaaggttatttttctctttttaaagggccgctagacctcccgtctaaaggaagcgcccgacgggcctccgaagtacacgcccaggcccccacagcgcagccgcccgaccgcctctcttcacaccggccagagtccaccctctcccactttcccctcccctcccctccccgccccttccctccccaccccttcgccccgccaaccctagacccggcatgcgctgcgccgaccttttccttccgagccgacctctccaccttcggcgcctcccaatgacaagcggcgcggagcattgtggtcccgtgcgcaagagcgaggccgagggcagaaaaagaaagcaaaagactagggcgagtcggtagagcgggccccgcgcatgcgcaagggcggaggcggtggtgaaaaagggtggtgcgtggtctacggcgagcggagtggggcggggtcgcgcgccttggcggggagtccgcgagccaggaggggcggggggtgaatgaaggagcgggcggaggaggaagtgtcatggcgtcgggccgtggagcttcttctcgctggttctttactcgggaacagctggagaacacgccgagccgccgctgcggagtggaggcggataaagagctctcgtgccgccagcaggcggccaacctcatccaggagatgggacagcgtctcaatgtgtatccttttctgttcgccgccgctcacgccctgtttcccttgcccggtcgccgggcctggtgccccgcgaacatggcgccgccggcctcggccttcgctgggcctcggcgccgcggtcagggaagtaatgttccggctcgggcagtcgcgaggggtcagcagaggaagggaggaggagataggaccccaggaatgcgggccaggagcctgcgttgtgtaatctgtttggggcagcgcgtggtggtggcggcgggggttgggagtgtggctcaggcgaaagaggaattttagggattattgcagaaaaggggcggctccctggacttgtccctgaccccgaagggtttgagaggtaggagggttagcgatgctgaaaggcctaagtgtttgccgcagcctttcccggctctcgtcgccggcttgatggcggctctcttctaccttgggagcgtactggagttctttatgttcttggcgtggttttgtatgggtgtgtgcgcgcgcgtttcaactgtttcattttgagtttagttagtcgtagccattgataaatagttccagggccctcagcgctgttagagtgaaaagatcagcagttcttattcccatttatttggcgtcaagcctattctcttcctgccgccccaccccccgcgggcatttatttctttatttccagtttggggtttggatttgaatgggaggtattggaaaagaacctgggaattttccatcaaaattgttctgggaatgagatcttgcttttgtcagatatttcctaaatattacgttccagctctcagcttacaataaacactgcgattgtttatatgcacaggttttatatgcaccattctttcaccaaattcaacaaaaatgtaagtactagttgtc

SEQ ID NO: 2104 - DNA, 6000 bp, Homo sapiens
gtttcaccatgttggccaggctggtctcaaactcctcacctcagatgatctgcccaccttgtcctcccaaagtgctgggattacaggcttgagccactgtgcctggccttgttttgtgttgttttgttttttgagacagatactcactctgccccccaagctggagcgcagtggtgcaacctgggctcactgcaacctctgcctcccaggttcaagcgattctcctgcctcagcctcctgaggagctgggaccataggcgcatgccaccacgcccagctaagttttgtatttttagtagagatggggttttgcagtccacctgtcttagcctcccaaagggctgggattacaggtttgagcctctgtgccccacctgatgtttctttaagataggggtctgcaaagagtaacactattttagagtttgtgaactataaggtctctgttgcaactatacaactataccattgcagccagaaagcagccataggcaatttgtaactgattgggtgtgactgtgttccagtaaaacttttgttgacaaaaataggtggccagccatatttggccaattatccatagtttgcctgttcttatttgtgaaatatgcttctttgtttcatccttttctattttgttttccacctggaaaaaattatcccagaatatatatctcatgctgtattattgctgcatgattataatgtttttcttaaattgttagaggctttttcagagtttatccagaggaaaggaagtcttcaatgagttgaaatgacatctaaaactcagtgagggcttatctgttctatagcttgaaaaatcaggttatctaggtcattgttttagtttaatagtcactagattaagattaggtaggcaaaatttttttttcggggggggggtgggggacagagtctcagtcgcccaggctatagagtgcggtggcgcaatctcggctcgctgcaccctccgcctcccgggttcaagcagttctctgcctcagcctcctgagtagctgggattacaggtgcctgccaccacgcctggctaatttttgtatttttagtagagatagggttttcaccatgttggccaggctggtcttgaactcctgacctcatgatccacccaccttggcctcaaagtgttaggattacaggcgtgaaccaccacacccagccagtaggcataatcgtaataaaaatagtttatatacctggtgctgaagtaaaaagatcacagaaaagtaatctgccttttatcctgtctttaggtcagaggttaggttgtggtttatgtggggttttttgacacaggaggagctacctcatttccattctgaaaagtaaagtttgttaatttggagagcaattgaataggaatcttggagaactgatatgttaagactttcaccatgttttgcagcagcttttttttctgtgtcagtcacaaaaaggcaattcaaaattaaagacatgaaggtgtggccgggtgcagtcactcacatatcttgagcacaggagtttgagcccagcctgagcaacatggcaaaaccacgtttctactaaaaatacacacaaaccgggcatggtggcgcactcctatagacccaactactgtggaggctaaggtgggaggatcacctgagcctgagacgtcaaggttgtagtgagctgtgataatgctactgctctccagcctgggcaacagaggaaaccctgtctggggggaaaaaaaaagacatgaagatttatctgaattgtagagtgaagtgatactactattcttattacttactgaaataattcacttaatgattgtgttccagaaaagaacattggcttagacagtagctttgagagagaagggcctctattttaggcacatactgtgatttttgtgcatatagctaattaattatgttaatggattatttaacagattcttttgttgttctgctataaaatttaatacagtaggatacttaagaaaaacaaagcttacattttgtgtacgagattttggaccagaacttgaagtgtatttaatgttttacaaccaagttgttaacagaaattgagtcaaaacagttttgttaatgttggacccaaaagtagaaaaatagtctttttttttttctttttttttcaaatgaggaagtaaaggtctgggcattagggtttttttcatccaaactggatgaaaaagctcatgagactttagcagggactagtcatgacattgtcaaggaaattacatcttgaaagattaatggttaaattatagcttgtctgaagtgtcgatcttaacattggcttagaatagtttacaaaaaagcttgctattacaaaatgaacctgtagtctctattaatagaggttcccccagtattgaggtggaattggcattattaatattatataatattctgatgtatttgactgatgaatatttgagagtggctagtaactattaatgacattattagttcatcaaaaccacactactttggaaaagtgggtcatttgattgtaatcagaattttaagaaagttggtagaaatttacaatgaagatagtttgctaatatattaatagtgttgatagctaggaagtatatttggaggaattttcccctttaaaaaaaaagtctgggtgtggtggctcacacctgtaattccagcactttgggaggccaagataggaggatcacttgaggccaggagtttgagaccagcctggtcaacatagcgagaccctgtctctgttatttaacaaaaaaaagaaagaaagaaatgcaaaatattgcatagttccctgtataccctttagcttctcctggtactaacatcttacataacaatatatgattatcaaaactaggaagttaacattggtacaatactgttaactaaaccacagatgttattcagtattccatatttttccctattctaggatcccatgttccatttagttgacatgtcccttcaagtcttctccagtctgtgacagttctccaatctttccttgtctttcataacactgacacttaggagaataatggtcattttatacagtgttccttagttggggtttgtctgatgatttctcattattatgtcgaagttatccattttgagcaagaataccatagaagtaaattgggtcttgcttggtgcatcatatcaaggggtacagtatgttgatacgtcttataactggtcatgacaaccgtgatcacttggttacagtggtatccttaaagtggtttctgcactttaaagtcactattttttttctctttgtaattaatacatttcatggggaagatacgttgggattatacaaataacgtttttcctcaaacttttgtccactaattttaaagaatcttttgatagatcttgtctgtgacaaaaattattgtggtgtttgcctaatgaagattttttttttattgggggggtgattatttttaatgctactagattttctagagattctaattaagcaagtaaaatcaagagggaaagtaatcgttacaaaaggattcagctttgaaaatgccggttgagagttgtgtgtacttctgtgtatgctgaggatttaataggagggtaaaagtgaagtagatgaactcctagcattcctttttaatactgcccacttaagagaaatttaaatcctaaaggcaccttctaagtttcaaatttaaattttatttttagagctaacacatgagtttctacaaatattggagaaaacgcctaataggttgaagaagattcgaaactggagggtaagagaattgacagggtttaacagaatttcagtcttttatgtaacatttacatagctaaccagtttgaatttttgtggttaaataatctttgcagtattcctgaataattcaacgtatctcaagttacatatactcacatattcaactactgagtccagtggactttgctaaagtacattatacttttaaaaaattttttgcagtgattatgacaaaagtatcctcttcattttacaaatggggaaactgaagcctagacaagttaaattactttctgaagtgctgggctaggatttaacttgtatctgattctaaaatgggtgttttcaattttttatagccttttatgcctctaaggcatttatttactgacaacataaaatcttgaaccccaggtcattttatttccatatgtttaatatataatgtttttaatatataacttttataagacaagaaatttgcattaaattattttgctatatcactgcttcttctgtgttttattttaataggctaatcaggcagctaggaaaccaaaagtagatggacaggtatcagagacaccacttcttggttcatctttggtccagaattccattttagtagatagtgtcactggtgtgcctacaaacccaagttttcagaaaccatctacatcagcattccctgcgccagtacctctaaattcaggaaatatttctgttcaagacagccatacatctgataatttgtcaatgctagcaacaggaatgccaagtacttcatacggtttatcatcacaccaggaatggcctcaacatcaagactcagcaaggacagaacagctatattcacagaaacaggagacatctttgtctggtagccagtacaacatcaacttccagcagggaccttctatatcactgcattcaggattacatcacagacctgacaaaatttcagatcattcttctgttaagcaagaatatactcataaagcagggagcagtaaacaccatgggccaatttccactactccaggaataattcctcagaaaatgtctttagataaatatagagaaaagcgtaaactagaaactcttgatctcgatgtaagggatcattatatagctgcccaggtagaacagcagcacaaacaagggcagtcacaggcagccagcagcagttctgttacttctcccattaaaatgaaaatacctatcgcaaatactgaaaaatacatggcagacaaaaaggaaaagagtgggtcactgaaattacggattccaataccacccactgataaaagcgccagtaaagaagaactgaaaatgaaaataaaagtttcttcttcagaaagacacagctcttctgatgaaggcagtgggaagagcaaacattcaagcccacatattagcagagaccataaggagaagcacaaggagcatccttcaagccgccaccacaccagcagccacaagcattcccactcgcatagtggcagcagcagcggtggcagtaaacacagtgccgacggaataccacccactgttctgaggagtcctgttggcctgagcagtgatggcatttcctctagctccagctcttcaaggaagaggctgcatgtcaatgatgcatctcacaaccaccactccaaaatgagcaaaagttccaaaagttcaggtagttcatctagttcttcctcctctgttaagcagtatatatcctctcacaactctgtttttaaccatcccttaccccctcctccccctgtcacataccaggtgggctacggacatctcagcaccctcgtgaaactggacaagaagccagtggagaccaacggtcctgatgccaatcacgagtacagtacaagcagccagcatatggactacaaagacacattcgacatgctggactcactgttaagtgcccaaggaatgaacatgtaataatttgtttaggtcaatttttcctttacttttttaatttaaaaattgttagaatggaaaaattccttctgatctagcagtggtaacccctgctgttgctgccactgcttcaatatttgtaagtgctgctttattcttcattctgaaaagaagagattatagtaaacaagtctttatctccacatatgatagtgttataaatactgtaaaagcatggaaggtgcaaaactcagtatttctacaattgcagctaagaac

SEQ ID NO: 2105 - DNA, 6000 bp, Homo sapiens
ccagcctgggtgacagagtgagatgctgtctcaaaaaattaaataaataaataaaaaagaagtaaaatataccaaatattttataagatgagggttgactgcattgaaagaaaatatttcataatatgagaaatatcttattgaatattgcacaccacccacaacaaatcatgtaactttttaatctgctggttttatttagtgtaagttgaagtgtcagtgattctggaaaatattacagttatatttaaaataataagcatcactaacctgcactgctacagctgtttgaaggatgtttccttcccagctaaaaacatgtctcaggaaaaagaacccttatgttttagaaaatcattctgaaatatctacaaatgaaaagatacaatgttttgcttcaaaatcataaggtaatggtaagaaaccgtatactttacctctgtgatcatccttccctaacccataatcactgtctaatcatgagaaaaacgttagacaaatcccaactgagagacattggcattaaaactatggaaagtctgagaagctgttacaaaccagaagagtctaagaagacatgaccactaagtgtaatgtggcatcaggatgagatctgggaagagaaaaagaacagtagggaaaaactggtgaaatctgaataaattgtgcaatattagttaatactaacatactaaagttggttcctgagttgtaataaatgtattataagagtgtaagatattcacagtaaaggaaaataggcaaggtgtatttgaaaattctgtactatcttttgcaacttttggtaaatccaaagctattctaaaataattttttaaaaagaatcatggatggctgggcatggtgtctcacacctgtaatcccagtactttgggaggattgcccaaacccaggagttcaagactgacctgggtgacatgaggaaatcttgtctcttcaaaaaatataaaaattagccaggcatggtggtgcacatcgtgggaggctgacgtgggaggatcacttgagcccaggaggtcatggctgcagtgagccatgattgtgtcactgcactccagcctgggtgacacagcaagaccctgtctcaaaaaaaaaaaaaaaaaaggccccagtgtggtggctcacacctgtgatcccagcactttgggaggccaaggcaagaggatcgcttgagcccaggagttcgaggccagcctgggcaacacagccaaacctcgtctctacaaaaaatacaaaaattagccaggcgtggtggcatgtacctacttggaaggctgaggcaggaggatcgcttgatcccaagaagtcgaggctgcaatgagccgtgattgtgtcactgcactcccgcctgagtgacacagcaagaccctgtctttaaaaaaaaaaaaaaaaaaattttagacttccaggtattcagcataaatcacattgtacagtttaggtacaatgagccatcattatcaagggatagtgttatatcgatgtagagaattatttaccagtcaagttcccaatgccagccaaaggccaatcttgtgaacaggactttctaaggatagcaagcaggcctgggcaccagtgcacacacatagcatacaactttctggggtgtgacagagatatttcataattcataccctcctcctgttgtggaagttatccctacaaacctcacttacagacatcatctactattctgattcagagatacatgtctgaaggaggaagggaacacctgtgagatatggagagctgagaagaggaagccttgagtttctcaatgagcatagctgaaaatcagcccggagctctgcactatcatttttgtttttttccttctgtacatgggactttagttctgagaaatctatcctgaggatagaagaggaagagaagggagaagaagaaaaatgagaaagaaaagagtgaggccttttgagaggatggaatagaatcaggttagctcaatcgggttgtgaatatccaggaagcactgttgagttcaagcttcctaaaatatgtacaagtggtgatgtccggtaggcaggcagactctagagctggtaaagggctgtaggacacagagcctcaagtgttcattttcttttcttttctactttttttgagacagagtcttgctctgtcgccaaggttggagtgcagtggtgcgatctcggctcactgcaacctctgcctcctgggttcaagcaattctctgcctcagcctcctgagtagctgggactacaggcaccgaccaccacgcccggctaatttctgtatttttagtagagatggggtttcaccatattggccaggctggtctggagctcctgacctcaagtgatccacccaccttggcctcccaaagttctaggattacaggcatgagccaccgcgcccggctgagtgttcattttcgggttttttttttttttttttttttttttttgagaaggagtctcactctgtcgcccaggctggagtgcagtggcacgatctcggctcactacaagctccgcctcccaagttcaggccattctcctgcctcagctttccgagtagctgggactacaggcgccccccaccatgcctggctaatttttttgtatttttagtagagatggggtttcgccgtgttaaccaggatggtcttgatctcctgacctcgtgatccgctcatctcggcctcccaaggtgctgggattacaggcgtgagccaccgtgcccggccgagtgttcattttcaaatgaggtaatacatacgattacagatacactgcaacacgccagcattgagcttttttgttaaactctgtaaatatcttgtgaatagtgtatttgtacgtatgttaaaataattacttgagcttctgtccactctgtttggcattttaaaatcttttcaggccgggcgcggtagctcacgcctgtaatcctagcactttgggaggccgaggtgggcgaattgcctgagctcaggagtttgagaccagcctgggcaacatggtgaaaccccgtctatactaacatacaaaaacaaaaaaacaaaaacaaaaaaaatcagccgggcgtggcggtgtgcgcctgtagtcccagctactcaggaggctgaggcagaagaattgcttgaacctgggaggcagaggctgcagtgatccgagatcctgccactgcactccagcctaatgacagagcgagactctgtctccaaaaaaaaaagaaagaaagaaagaaagaaaagaaagaaaaaaaagaaaaagaaaaaatttttcaataagttggatttggtggtggcaggaaatcccagctactcgggaggcggatgcaggcagattgctggagaccaggtgttcaaggtcagcctgcacaacatagtaagacctcgtctcaaaaaaagaaaagaaagaaaaaatatttttaatatgcaacaagcctcaaaaaatggaagtggtccccgtttctcttaatgtcttggaggccaaaaaaaggtactggttggtgaaatacacatatagatatcatcagtacccagatgttaattaacgccaagggagtgtaaagggtcgcccaagagagcgactttacgggaaaagaaggctctggaaccagaacatttaaaagactcactgaaggagaggcgcctacaaaggatgctaatcaggaatggccaaagagatggcagaaaaaccaagtgaaatggttagggaaagatgggggaaaaaaacataaggataactcaagccaatagtgcattttaagaagggtattaaggccgggcgctgtggctcacggccgtaatcccagcgctttgggaggtcgaggcagacggatcacctgaggtcaggagtttgagagcagcctggccaacatggcgaaaaccctgtctctactaaaaatacaaaaattggctgggcatggtagcgggcgcctacaatcccagctattcaggaggctgaggcaggagaatcccctggacccgggagctggaggttgcagtgacccgagatcgcgccactgctctcgagcctgagcgactgggtgagacttcatctgaaaaaaaaaagaaaagaaaaagaaaaaaagattaatcaaagtgtcaaatatttctttctttttctttttctttcttttttttttttttttttttgagacggagtcacactgtgttgcccaggctggagtgcagtgacacgatctcggcccactgcaacctcctcctcccaggttcaagcgattctcctgcctcggccacccgagtagctgggattacaggcgtgcaccaccacgcccgactaatttttgtatttttaggggagatggggtttctgcatgttggccagggtggtctcgaactcctgacctcaggtgatccacacgcctcggcctcccaaagtgctaggattacaggttgtgagccaccgcgcccggccaatgtcaaatatttcgctgattttcctcggtcagcaccaccacaataattgtgccaccttacccatgcaaggtttagacatctctttgactcttttacagggttttatactgtggtttccattatttcctctaactagacagcagaagcggcttactcatttttctcttccatagagtcttactccgatcgttcaattaatatcagtggaatgatttaaagaacatttgaaaaaccactcggacaaaaccctcagattcgaacttgttccagcagccaaaaatacccgcgggccacggctacactgcgcaggcgcaaaggcagatgggctttctccagaagggctttgcatttggcgcgaaatccctttccgtgggctggggctcttggagaggcgccgttcattggtcaggtttggcgcgaaatctccagctcctgtgtcacgattggttccggccgtgcaggtcggaagagggggcggggcggaagcggcggcggcgcgcgcaaagctgcagcgtctggaaaaaagcgacttgtggcggtcgagcgtggcgcaggcgaatcctcggcactaagcaaatatggacctcgcggcggcagcggagccgggcgccggcagccagcacctggaggtccgcgacgaggtggccgagaagtgccagaaactgttcctggacttcttggaggagtaagtcggcgagcgccccgggcctcgcccgcctccggagcctgcggcgtctgggccaggcggtgccgtgtgggcggcgggtgttccggaacctgggggtcgcgcgtccgggaagcgcctccccgcccgccccccaactttaggctccgagcccggcggccgcgaggagcctgggacaggctgggtttttctggagtaaaacccatctcgagccctaagacgctcgtgcccagtgctcagcgctttgcttctgtcacttgatgctcaccaccccgcgagcctggtatttgcacagccctcggtgaccggcgcggaaacctgggctcgctgagtatagtaactgggccgctgggtgcggccaggtcgagtgggaggccgaagtgccattgaatctcgtcggtgccctgctgggccacgcagccgggagcatggtgctgggggttcgcagggcacgggccaccctcgcctcttgtgctgatgaaagtttctgcgtcaactgtggtttgaaagctgctggggggcggagccctgccctgcagagagtagctcaccatatcccttcttctgggtcccttgctcccctttccctctggccttcctttcctttctctactcttctttttttctgtgcctctgggctcctagcttcataaccccaacctcctccctggcttgcctcacccaccggttatttttcctggagcagatacaccacggcctccaggatgaagggtcagcagtttggaatggcttttgaagttcttttttagtaaaatatacataacaaagttgaccattttagccatttttaagtgtagagtccagtggcactaagtgcattcacctcgttgtgcagccgtc

SEQ ID NO: 2106 - DNA, 6000 bp, Homo sapiens
gacacagataaagtattccttaaggatgagagactccaggggaaattcccatggttgggaagggcaatggacctgttccacttaattaagttccacttacttgttttagaattcagttgtaggatgttttgcttcatttcataaattctttatgagtgatctattgctgcataacagacgaaactattcccaaaactttggtaaaacatcaaccatttatcagtgcttgtgagtctagggtatgctggggagttcagttcacctgggtcaggcccccactttatcttgcctgggttctctcataaatctgaggtctaaacttgaacaactactgtgattcaactgtggtctgtgtggtctctcatgctcctgcaagctagccggacttctcatggaggctgggcagggttttgagagcggagtgtgtaaggcctcttgaggcctagactctaaatgtcacaatgtcacatctgctgcaaggtggggaaataacagagcagggaataatctggccattattgaaaatcattgatcaggagagccttcttagtttcagtttcatataatgaaaactacgtaactgatatctttttgccctggtttgcaggctgtactgtattctttatctagttattgtagatatttctgctataagttgctttaaaatgctttgtgcaacaaggcagataaactaagtaaatagaactggatgatttgggtataaaagaaacagtgagtgaagaataggaatgatactgtcttttctccaagcaaaatacagttcctccaaatgggaagtgtggagtagttcttaagtctttctactgtaacatcatgtgaacttatgagttactccggtgacttcacatcagttactcatcatataatagtattttctggattcctcactgtccttgactctcctttgtctgtacaccagttcaggggtggcaaataggaaatttcaccttacctgttgcttctgattgattgctggtgacagtgtaccctgtcatttgttgctcttttaaatccaatacaagtagttgcatttattgttttaaatgttgtccagttgatgggaggctgagggaggagaatcgtttgaacctaggagggggaggttgcagtgagccaagatcgcgccactgcactccagcctgggcgacagagtgacacttggtctcaaaaaaaaaaaaagttatccagttgaggccaggcacagtggttgacacctgtaatcccagcactttgggaggtcaaggcagacagatcacctgaggccgggagtgtgagaccagtctggccaacatggcaaaaccctgactctactaaaaatacaaaaaatttgacgggtttggtgatgtaggcctataatcccagctacttgggaggctaaagaatgagaatcgcttgaactcaggaggcggtggttgcagtgagccgagattgcaccaatgcactccagcctgggcgacagagcgagactctgtcatcaatacatacatacatacatatatacatacatacatagtatccagttggtttcagaccagcagcagtccgttagaatatttagattatttagaattttgatttagcgtgggaacctgaggcatgctgtctcctagcagagggaaggagcacacaagaacaagttgattacaaagaacacgcagtttcaggacagatggtatatacatcacaactgttcatattcctttatccagaacaagtcacatagccaaggtcagagttacagcacacagagaggtatactccacccttagtgaaccatggcaagcagtgggaagggacagaagagatttgaaaatagtacaatctacagacatagtgttagctgttttttctagttttgtgtcttttgcaaatctgacattgttgatatatagatatagctttccaagctgactgttataaggcaaccgtcacacatttgtatctgtcaaattctggatttctaggtttttgtttggctttggtttgattgctttttgaagcagtcaatatgttatacagtaagaaaatataaatagtttatccttcaggaatattgaatcttggaggcataaggattggacacttcaaaaaccataatattagagagtgtatagttattgtccaaataaatagagacacatatattatttggtcattcagagaccccagattaattgctacaggttgaggtggttctagaaagagaatatagtatttgggctgggctttaacaggtgaataagaatttggtaagtgaagagagtgaggagcaagacttgccattcagtatgtacaaaggggcagaaatcaggaaattaaaagcatggggggagtgctggagctagacgaggttagttgggaaatgcgacaatgatagaaaaggctggaaagaaggaaagaaacattttgtggaggatccagactagcagacaacatttgtgtttatcatatgtgcaaggagagttgttaaggcttttgagcagggaatgactatatcaatgcagtattttaaggaattgaatttggcaaatatagtgaaggagaaagagacaagaaaaaggtagtatacctagagattagcatagcattccaattctcaagtgatgaaggcttatggtaggtattgctgtggatgctaaaataaaggggggtagggaaggaagcatccacagatcttgatgatccaaattgggatttggagtgccaaataatcctatttgcagatgttaggattattccattccttcatcaatattgaagctaatatctgtgcaagttttatagtaccagaaaaaaaatttttaacatgtaatctacccttcctagagtcaacttttgatatagtttggctgtgtccccacccaaatctcatcttgaatgataactcccacaattcccacctgtcatgggaggaaactggtgggaggtgattaaattatgggggcgagactttcctgcgctgtttttgtgatagtgaatgagtctcgaggatccgatcattttaaaaatgggagtttccctgcacaagctctttgcctgccgccatcaatgaaagatgtgacttgttcctccttgcctcccgccatgattgtgaggcctccccagccatgtggaactgtaagtccattaaacctctttattttgtaaattgcccagtctcaggtctttattagcagcgttaaaaatggattaatacagcttttttcagagaacagtaaaacattgtcttggttcttgggtgagtaagagcagaagggacacttttggtgccgtggcatctcttggcagagaagtctaatttcactgctaacttgctttgtgagggtgcatttgtgacaagaagaacaaatagatgtgcaaagaaaaaaaactcatacacacacatataggcatatccatgggaaattattcagatccttctcctaccccaaagtgcctaattattcaaggcttgactcaaatcccgtctacttgaaggaactaattgattttatgagcatatagtccaaaaagatttagtttgtctggcttcagcaatgcctacctggagaagtgacatttaagctgagatttttaaactaagatctaaaagatgagttagccagcgaagagttgggtgaagcagatgttggctcaaggggttttccaaactcagggtgagaagtccctgagtttggagagtgtggtttatttgaagaactaaatgctgaagtaagcaaagcagagtggcacattatggggttggacaaagagatcgggcaaccagggctttatagtatgtattaagaaactgaattttataagagcaaagaaaagccatggaaggattttcaggttggcaaatgacatgatctgcttttcaattaaaaaaaaaaacactcaaactcttgtatggagaatggattaaaaggtagataagggctgaagtgaggcagccattcgggaatctactgcagaaggaggcagcagaagagatggagcagagtaaatgagacttgggaaatatttaggaggaagaatcaattaagatttgaggatcaggtgttgcgaggtgagggagaaggcaatgtcaactatgaatcctaggtatctgtcatgtgccatttctagaaaaagagcaggtttgaggagaaagatgtttggttctgaacatagtttgtagagctcactgcacatacaagtggagaggcaagtgggagttgtaggtgtgaagcccagaggagaggtgtggacgggataagcatttaagactcctccatctagaaggaaactgaagctgtgggtgaggtcatcacagcacagcgtttaggagaagcccaggtaaagaagctgacgaatgtctggaccctgacaaccttaacatataatggtttgatagtggaggtggaggcaatgtagaaagaatgccagaggcaggaaaaagcaagaaggatgtgttatcatcatgaccaaggaagaaacgtgtttcaagaacaaaggcgtcaactctgccccatgcttccgagctgtcaagtaaagtgagaaaaacagaaaagcgttccctgggtttagcaacacggaggtcagttgctaaagggagcttctagaatgacgacgtcgccaaatctgtcctctgcctggattctcggcgatgaaactactacagagacctccaagtttgggcttctgcaaacacagcacgtccttctgatcgttctctaagatatgtaaacagaacgccagttcccagcgtggcaacacgggactgggctgcagctcacccagccggcggcccccgccggaagccggcggaaataccccagcgcgtgggcggagcagcggcccgcagagggaggcggtggcgcccacggaacagccgcgtctaattggctgagcgcggagccgcccggtgattggtgggggcggaagggggccgggcgccagcgctgccttttctcctgccgggtagtttcgctttcctgcgcagagtctgcggaggggctcggctgcaccggggggatcgcgcctggcagaccccagaccgagcagaggcgacccagcgcgctcgggagaggctgcaccgccgcgcccccgcctagcccttccggatcctgcgcgcagagtgagtggccgtgaggttccgggtgccgggggtgggacgcgcagggacagagtcctcgggccgtgcagttggacgccgggcgaggacgggccgtctgtgctgacccgcgaatagtgatcccagaggaagaacgcgtcctgagtattccaagtgcgagcagtgccacctgttctcggagatggcactgctcagcacgattgtccttgccagtcgtgctctggcagtgaagaggacttgtgaaatataattttcctctagaaggcactgcaccttcccatttaccgtcactttctcccgtttccacccctttccatcagtcacgttttcttcttttcgcagaaagtttcatttgctgtatgccatcctcgagagctgtctaggttaacgttcgcactctgtgtatataacctcgacagtcttggcacctaacgtgctgtgcgtagctgctcctttggttgaatccccaggcccttgttggggcacaaggtggcaggtcagtaaatgttcatggaatcagatgaatgagtacatgacttcggaatcttaattatgtttctatgttcaaagatggaagggcttaatgtcttcctagagtttaaaagtgatgtttagtttttgcagaccccccaccccaaaataatatagtcttaaaaaaatttctggccggtactgaagagttctgtggtaggtatgcagaggtgtggttgattgtgctttgaatgttgtttgtatagataaggagttattttcatagaacagaaacaggacttgagcctccagcacagtccattgtgcaaccattgcttaatgaggatgctggactcacacttgtgagatcataatatggtttgctttttactttctaattccgtctgaaa

SEQ ID NO: 2107 - DNA, 6000 bp, Homo sapiens
cccttttcagctccatatttcttatttctgtgagcctactggacatttctgactagatctcctaaatagcagagttattttccacagctgctattcctttgcattttcaatgaagagtggaaaagggaaggctatatgatgaggaagggtatgggggtctctgggaccccatccagcagccagggaatgtccatatggaaataactctggagacgtgggcttcaggaccatgccagcagcgtggtacatgtaactgtgagtccactggtaaagccagtgagtacagcagctatcttttcaggccccttcctcaagcctccactttgtatggtttggattttatgagtggagatattgagtaaaggagtactttaagcttttcggacttcctgcagaggcacagggtggaggctgagaagtagactacaccccagtctctcagtgtcatccaacatctggactggagtagtgtagagaaaaaagtcgccatgagaaccacggctagaggttatctagctggacaagtggtagaccaagttccctgattattttatccctttccagacaagcctcccttctacacacacatacaccttggtcagacataaggaagcttggtgctcctgttacatattccctgcccttgcctaaaccacagaaatgttcttgaatcacctcaaggctcaaagaccccttccatctatccccaacatcgatcctggattttctagagttaatcggatctttatcactcccttttcttaaacttcttgagagtttaagcactgctccctcccctacacccaatgctttccttcattgtccacacaaagtaaagcttcttagcgtgcacccaagatccttctgttacttgactttgtctaacctctcagcctttgctccccctatctgaccacatgcgtcctaggccccagcagctctgaactgcttcctgggacaggctatgtgctgtcagcctaatgaatcccacccaacttggccttcgaggttccaccgctaagtgacttcccctgaagatttgtcttccctcttcttttaagagctgctctttgtttcctaaatattctttctttctttctttctttctttctttctttctttctttctttctttctctttctttctttctttccttccttccttccttctttctatctttctttccttctttcttgagacaagagtcttgctaagttacccaggctggtcttcaactcctaggctcaagcgatcctcctgccctggcctcccaaaatgctgggattacaggtgtgagtcaccgcagctgtcctgtttcctaaatgctttgatggcatcttttgcaaacctcaacatctacatatcacaatatacaggaatggactgtttgcttgtctactgtctcccaaaaggaaagaacatttgcctcatccatctttaccctcagcaaaatgccaggtgcaaaggggctcctgataaacgtatattgaagaaaaagaggaggctgacaagcaggaaacatgaggaaattagcatgatggataccatgcctcaaaaccaaagtgacaaatgacaaagtaattctctcactatcttgagaggctcaggccaggctgcctgggttcaaataccagctgcaccacttaactaaaccttgtagaagttacttaaatttttggtgctttcttggttccacccagaaaggtggggacaatttcctcaactttaaaaaggaaatgatggtacctaccacataggatcattttgagaactaaaaaggcatttaaagggcttgacacagtgtctaggacaagataagcccttaataaatattatctgctgctgttataatgattagctatccatcacccagcacagcttatttaactggtttctattaaataaaataaaagtaattattgtagtaaagttgcataaaatactgaaatgaacctttgtcattcttttggccgcctagctcaaaatgcacttcctgagtttgggtaattcctcaccttatgagtctgtctaggttacctctcactaagaagccaccatcatcataatcatcatcatcatcaacacaacaacaaaagccagacacaggctgttcaggactcccttgcagcaggacttgtagcatatgattcaggtttgacgagtcagacacacccaaaccaggtctagcaacaggagctagtaatgccaagcagcagtgatgggaaaactgcagcacaactatgcccactttcccatatgcagtggtggtcccagtggtcccagcagcagtggtggtcccagtggcggcatctagtgccactgttggctgtacaagatcagctgcatcctcaaagggctatttttggtagcatgaccatggctaggtgctcgtctgctgccaagctccccttattttccaagcctgtatctctatcctacccagaaatgctttaacccacccaatattcttttctgcttctatcagcctgggttaattttccttggtgcaattcatcctgccagactggtacagatgatcaggtcagatggtttcataagatgtaagtacactccttctactttgttttattgctttattgatttgcagtgttctttacttggctcctgctcagggactgttcttggatgatttttgttttagtaatgccgatatgttaaagagggtttttctggtttttgttttatggcaattacactttctctctttcctttccttcccatcccttttttggtgtgagtgattgtgtcttaggacaatcaaattttaattgactggaatctatgcttaggtagagaaaatcaggcaactaacaagtataagaataaaggaaaacagatggagaggaacaaaatcagtgcccagtgcaggagagtatcacaacaggtctgtgagctcatttaatgtaactagtttcttttacagataaaatacttgaaacaaggaacacacagctaatggctcagccacaactataataactgcatctccagacttctcatccagggctcctgcctctatccattataccaagaggcaaaaggcaaataactaaaaagcaagctgagatcacgttaaatttaacccgactaattatacttttaggtttatggttgtatatgatactaatttacattttcaagaggttttacaatttacaaagcagttaaatcctttcaactgctctgagataaggtagcactttttttttttttttttttttttttttttttgagacggagtcttgctctgtcgcccaggctggagtgcggtggcgcgatctcggctcactgcaagctccgcctcccgggttcacgccattctcctgcctcagcctccggagtagctgggactacaggcgcccgccaccacgcccggctaattttttgtatttttagcagagacggggtttcactgtgttagccaggatggtctcgctctcctgacctcgtgatccgcccgcctcggccttccaaagtgctggcattacaggcgtgagccaccgcgcccggctagcacttttttttttaaagaggtcttggtattcatgtcttgataaatgttttagcatctcttctacctctgattttcctgtctcccttttctatttgttttggttttgaagctgtaactacaaaatgtgtccattgggaagagagcaatattaatgtatttgaacaaaagggcccattgattgaaaccatcataaaaatatatgggatgctgtttaactccattttacaaataaggaaacagaagcccagagagattaagtagtttggccaagattaaataaccattaaatggcacagtcactacaaggttcatttaaaaaaacatataacatacattgagcatttaatgtgtcaggctgggtaaacaagatatagtgctagttaactcctaggtaagcataaatttctataaccagtatattactttgtaaaccactgtcttctggaattttagcagctggacaatcagtaaatacttttctacttacacaagattcatgtaaccagatctgtttggagactgatcgtgatttatattagactaaaagatcttaactcaaaagcatgttttgcatcatttgtctagattctttaaagtaaaaatggaaagctgtaattctcaaatgtcttcgaatgaacaaaaaattgacaagaatatgaagctgactgcattactgtatcatcaattattggaaccttgatttaacaagctattttcattttcagtccaatggcatacaaagaggaaattttattctttgtagtttctccaaattctttgtaaaaattatgaaagtaatttgcgaaaaataagcgaattgacatggaatataaggtgaataatacatttttaaaatgtagttgtgtataatggaaaacgtcattcttgtatattcagctaaaacagaccattagtgcaagacctaaatattaatgagatccggggtttgcaacgaaatgtcattgctgcttttcccccagaaagttaaaagaaaaacggggagagcttttaagtgaaaactaaatgtgctggcgtcacacttggaaatgcaaggatgcagaagaaatggtaagatgtgggtgggtagtatcccagtaaacaacataaaccttctaacagacttgaggtggctgtcaagcctttcagacatgtgattgataatgaatgtcagaggagagtttccttttccatcaacgcttcaggagacagcggaccgccaccaacacagggcggaagagcacccctgtcacgcagactgtgccgcccccggctcgcctgggcacgccccttcctgccctagcagcggcgtcccgccctttccgcctttcacttcctagtaaccgccctcccttgctccatcttcgcaggacccgattggctgatggggcaaccgccaacggctgtggcgtttaaacccaagccgcagccgctgctgctcgccgagctcccggagctgggtgggggtgccccacgctgaaagagaggtaagttagtggcctgcggcagttgacgtgaccgccctctccctgtcgggatcggtgtcgttcttgagtcggttctctaggcgctgtccgcctcggtctccggctcgtcttccgccctctgtcctccgggatccgggacggcggcccctctccggctacgaggggttcgttgacggagtcctgttttggctttgagtcgctgcctcttgtttctgagatttgagcgtccggcagggcgagcggggagagccaccagttaggtcagctacttaagggaagatatttctgtctctgggactgctctactcccttgaacagtttctagggcattgtgagcgctcagtacgtgtctgcggaatgaatgttagggactgcgtgccaaagttctcgaaggagccctctcgtttggagaggctggctgaaggcgaaggggtgatggaagactagggagaacttggaacttagaacttgagctgcttgatgtacaggtaggatttcagtagagaatagggacaatgattttttagatgaggtatccaattcaggagaattggatgtggaactgagtatttcgtatttagagatagtcgagatgctggccggacaagtgtcacagagtgctggtattgagtgctgatagtttaccaggtcccgtactagacactgtacatacattggctcatttagtccctacaaggagatgcccttattttttatggttttataaatctggaaattgagacgaagaggtgttgagatcacatagctatgaaacgttggaactggagctccaacacagttgtaatcactatcataatgtctcagtgtctatatggtaaatcaccctggaacagtaccccaaatgcctggttctggctcctaaagtttcccttggtgaggtcattgatgtagggggttgcagggcagtgtcaaggaacactcccagatttctggcatgaggatttgaataggcgattgaca

SEQ ID NO: 2108 - DNA, 6000 bp, Homo sapiens
ggagaatcgcttgaattcaggaggcggaggttgcagtgagtggagatcgcgccactgcactccagcctgggcgacagagcaagactccgtctcaaaaacaaaacaaaacaaaaaaaactaccaccacattctgcgggaacaagggccagaaccgcctcattatgggaacatcttaacatcctgcagggcagcaagtcagcaagccatatggcccaggcccctcccgcccttacctaaaagtaccccactggtgggcactggcattaggctggttccccacttctgtaggtcttaggctggacataaagcccgcagttgctgtagagctgccactctgtatctttaacgctggccttcccttcaaaacttatcaaggagcttatttttagaatgtgtgctcagttacggccataaaagtatcatagacagggaggtatgctggctgcccacgttgggcctgatgcaggcaccatgaggatcaaggtgcagaacattgatttctgttggctcacactgatcccattagtaatttgaagccatctgacgctagtggtatattttatttatttatttattttttagagacgggtcccgctatgctgcccaggctggtctcgaaatcctgggctcagcgatctgctcgcctcggcctcccaaagtgctagggttacaggcgtgacccaccgcgccgtgaagtattagttttaaagcaattgttttagtggtcgctaacagggtacatgctactgtgtatactgattccctcacttttccttgttcacaagttgttccttgttctagagttcaaaaactatcagtgagtggggacaacacgccgacggcttcctttcatccgccacagcgggctctggttccctccctggcgcctgcgcccacgatggtcgcgcgcgcgacacgcccgccctttccgcctgctcgccccgtgcatgacccgccccgcggcggagacgcgctcgctgcgtcatcagtgttttcgagacgagtctcgacgcagcagctgtcagctccattttgttgttggtgcgcgacgcagtcagctgcgtgattcccgtgattgcgttacaagctttgtctccttcgacttggagtctttgtccaggacggtaagacgcaggagggagcggactaggtgacagggccgttcctgtgagcctcgcgggcgcctggcgatgcccccttttcctgcttgtttgctgcccgccgtccccggcgcgacgactgcctgctcccttcactcccaggctgcacagtggcggcgcgcccctctttcctgcgcggccgagcctgtcgccgccggatccggcctgcgggggtagttacggtgtttgctaggccggccgccctcttggagcttctgccctccgctgaggaagcggcgccgcctgacgcgggacggtcgggcgggcgccatgttgtgaaccgcctcggcggagctgtaagatggcggctgggcggaggccggcttcggccctgtggccggaaaggcgaggctccccgttgaggggggatttgctggggttccagaatgtgcgtgagccaagcagctgtggggaaacgttgtctggagtaagtggagaaagagacggaacccgtaggggttacagttaatgtctaatgatgaaagtgtcggcgtaaacatcgcgagtggctttgtcctcagtggtgttaacaaaaaccagatttaggaacccaaggaaagagaaatgctggggtgtatttgaaggagcgttgtgacagaagtcaggtgaccgagaattttatgcgatggcgtttcagccactcctcttgggttagcagttggagcttttttcttttcttggagtctcgctctgtcgcccaggctagagtgtagtggcgcgatctcgagtcactgcagcctccgcctcccgggttcaagcgattctcctgcttcagcctccgggatagctgggattacaggcgcccgccacgacgccgggctaatgtttgtatttttagtagagacagagtttcaccatattaagctggcctcaaactgttgacctcaggtgatccatccgcttcggcctcccaaagtgctgggattacaggtgtgagccactgcgcccagcctcctttttttcttttttgagacaaggtctcgcccctgtcgccccggccggagtgcaagtggcgcaatgacggctcactgcagcttcgacatctgggctcaggtgatcttcccacctcagcctcctgagtagttgggactacaggcgcgcgccaccactcctggttaattttttattttttatagaggcggggtctctctatattaccctggctggtctcgaattcctgggctcaagcagccctcctgcttcggcctcccaaagtgctggggttacaggcataagccacggcccccgacccaattggagggctttaaaaattatactcaggctggtccaatggtagtgggttatcagaacttaatagttattagtgtcacgaaaattagtatacaacccctaccgctaaatttgactggcgttaaaaaaaaaagaattgtagcggaagacacagaggggtcccgccggtaagaaagaacggcagttgatgaagtaatttctgtataatgtctttttcaagttgttaggttagagattttcgattttgctcgaagcatttctgaaaagaaggtggctcctaccattcccaaaaagattgtgttaacattgcgtttaggataaattatgttgtatgtgcttgggagtggtactggaaagatggtgttttgttgtttttatattctgatgccaccgttgccttcgtgtgtgattaaagtccttggtagtttcatttgtccgtttacggaaatgctctgtaatgatgattctgtcagcaactcagatataactctgattacgtttgcagtaatcagtaatgcggtgttggtgaggaacatttatgattgcatttgagttggagactagtttctggtacacgtttaaacggggagaatgacgtgtgtttcacgtgtctgtgaagagaccactaaaggcaggctttgtgtgagcaacatggctgtttatttcacctgggtgcaggcgggctgagtcagaaaaaggagtcggcaaagggtggtgggattatcattagttcttataggttttgggataggcggtggagttaagagcaatgttttgggagcagggggcggatctcacaaagtacattctcaagggcggggagaattacaaagaaccttcttaagggtgggggagattataaagaaccttcctaagggtgggggagattacaaagtatattgatcagttaggttggggcagaaataaatcacaatggtggaatgtcatcagttaaggctatttttactttttttgtggatcttcagttgcttcaggccatctggatgtatacgtgcaggtcactggggatatgatggcttagcttgggctcagaggcctgacagcgtggacttctatagtgctatatttgtactactgggagggcaggggtaaaatgtaccaaaattagtaaattgtgattcctccctctacttttttcacttttttttttttttgcattcttccaataaatctgggcatgatatggctaatgcagagtgcctgtgaatgaagttcaaactgcagaatatgggacaacacagtaattggatttatcagtgatttcagattgggtgataatgattcttgaattttggtcttaaaacgaggtcacgaggggacctttgtaattacgaattttaaacagctcagtgtggggtacaatttaactaggaaaaacttgccttttatgtagatgagacactcaaagagaacttactgtcctgattgggatgacaaggattgggattatggaaaatggaggagcagcagcagtcataaaagaaggaagagatcacatagcagtgcccaggagaacaagcgctgcaaatacaatcactctaaaatgtgtgataggtaaggaggatacttaaaatgtctgaatataacaatacattactagacaaaactagtatcacttaaaataagtacctgattactaccattcgtttgtttccaatgagagattttgatggtttgtaatgtttgtaaaattaagctgcttgtgggggagtctaggtgctgtcttgaagagaatgtgaggatatttggtcttagcataaaacattgaaaataatttttatttctctagccattatttggaaagcaggtctataaatgagaaagattatcatagtcgacgctacattgatgagtacagaaatgactacactcaaggatgtgaacctggacatcgccaaagagaccatgaaagccggtatcagaaccatagtagcaagtcttctggtagaagtggaagaagtagttataaaagcaaacacaggattcaccacagtacttcacatcgtcgttcacatggggtatgaacgtttttaaaacattttggaaattttatatcccatgtggaacagggaaacttgaatttttgtgtttgattatttgagaaagttttaagatgaaatcatctcagttttaacctgcaggattttttctgtgtttgtgcattggataggaaattccggaaataaagtacacatttagttctataatttaattattggttggctcctaattgacattccagtgaaatgatgggagttaattgatttaatttagattagttgaaaattattacaaaatattctaaaagggttttttgtggtacttcaagaaacctgattagttttgatctattgaaatcacaaaagtagaacagggcattttatttttgtataatttaggattaggtatgcttctttgttctaacaagtcatgttttctaacccttctttcactaagcaaaccagaacagatttgaactgttatgggttatatattagtatggagatcagctcagatgacattaaaaatgccgtagtgttattcttgtatgccaaatctttttttccccaaaattagcactttaattttatttactgttataatatttgttttcttagattaggtaggaaatcttaatttggccaccgcctactttgacaagtaaatattacatcatacgattttgcaacattaaattagaacactagaaactaaaaaattatgtttcagtgaatgctacaactaagcattttttttttttaagaaaaacaattgtattatgttttgttgccttgccactttgagtatcttatctgaaaatctgttccttgccatgtttttctcctgttaacataaactatgtgccctgtgaatttctggggactgaatttgaaattgctcctgccaaccgtttgtggcctggcgtgtatctgaatgcctgaatatctccccgctgaatgaatttcgtattctgccctgaattcactcgggtatattgattggctggatgatcttggtgccgcccacttgacgtttccagaagagtcaccgaaggaaaagaaccaggagtgtagaggatgatgaggagggtcacctgatctgtcagagtggagacgtactaagtgcaagatgtatagaatatttttcaacacttattaacttttcagataacataatctatatatagattaagctttcagggatttggaaatctttttttctttctcttttttgtttttgttttatttttccatttcttttggtgggggggattgtatttttgctttctttagaaatgtaatgtttgttatatagaacttccagaacagtaatcaaattaatgaaattagacctaataattatgttttttgatggtgttgaccaataaaatatctagtgataaggaaatttgtagcatcaactagaataatctacattgatagcatttattgtgataagtacattgtttccacttcttgatatgactgagatttatttctctcttttagatgaaattgttgatactttaggtgaaggagcttttggaaaagttgtggagtgcatcgat

SEQ ID NO: 2109 - DNA, 6000 bp, Homo sapiens
ggtttgggcttctactgatcctgtcacccagacagtgaacatagtgcccaaaaggaagcttttcagcccttgcccctgccccttcctccttttttggagtccccagtgtccactgttcccatctttttgtccatgtgaatccaagatttagctcccatttattgtaactgaatgcaggctgggctgcacgccacttgcaaagtcaacaacaaggaggagatgcaggaaaaggaaagtgactttattccagagctagcagtggggaaatggccaaagctagtaccttaaagaaatcattttgaactttaggctggggagaggtgcttaaaaagggaacttagaatgggaggcatgcgggagtggtgcagggtttcagatctctgtggcttgctgtagtggctatcttgagttgtggtccacctggagtgggggctggcatcatctcaacaatggctgggttgttgactaaccaccttaaggtaatctctggaattttgcagctgggtctccaagcctggtatatgtcatgattagcccttgatgggccaggcacagtggctcacacctataatcgcagcactttggggaggccaaggtgggaggatcacctgagcccaggagttttagatcggcctgggcaacgtagtgagaccttgaatctactaaaaattgaaaaaaaaaaaaaaaaaaaaaaaaagccggatgtggtagccccagctacttaaaaggctgaggtgggaggattgcttgagctagggaagtagagactgcagtgatccatggtcgtgccactggactccagcctgggcaagagagttaagaccctatagataagagtgtatagtgtaagtttaacaagtgtacagttagataaatgtgcatagtataagggagtgtgaggcgggaaagggagggaaacggttttaacaagactacattctgaaattaagaaagaaagggccaggcacggtggctcacgcctgtaatcccagcactttgggaggctgaggcaggcggatcatgaggtcaagagatcgagaccatcctggccaacatggtgaaaccccgtctctactaaaaatacaaaaattagctggccgtggtggcacgcgcctgtagtcccagctacttgagaggctgaggcaggagaattgcttgaacctgggaggcagaggtcgcagtgagccgagattgcaccactgcactccagcgtggaaacagagacttctgtctcaaaaaaaaaaggaaaaaaaaaactttaaaatgcatttcaaggctaggatacttggttatattacaagtgagaacataaggcatatctctgaaaatattgaagagtggagctttacagaatatccatttgaaaaatgcaatgaactagttaaaggcaccagtttgtggagttctggtctgtgtttgaatcacagctgtgtcccttacagtgtaactttaagcaagttaacatcttcaagctttagtattctcatccataaataatacctcagaagacaattgtgagggttaaatgtgtgtaaagcttctggcatgtagtaagtaagtagaagctgctgtcctaacattcatgtccaccacagggctctcacctcatcaagccattcattgggttctaccactgatttcatcaagaccatattctgcccactgcctagatcacagtggttggatttgggtgttcctaaaacttataccagccgagcgtagtggctcatgcctgtaattccagccctttgggaggccaaggcgggcagatcacctgaggttgggagttcgagaccagcctgaccaacatacagaaaacctgtctctattaaaaatacaaaattagctgggcgtggtggcacatgcctataatcccagctactcgggaggctgaggcaggagaattgtttgaaccccgggaggcggcggttgcggtgagctgagatcgtgccgttggactccagcctgggtgacaagagcaaaactccgtctcaaaatgtttgtcttggcatcagttcttggtttgtctcatttcttccaatggctggtctaattaatgttttgattctttcttgactagtttggagttagcttacagctatcctcttgtcaccatttatatcttccactaaactgaggtgctttttactagcagcgaatctgtatccgtacaggtctgcagcaacctcaattcttgcctcctcagaagaaagaattcgactgaggggcagaaggagagggtgaggcacgttttagagcaagagtgaaagtttattaaaaagctttagaggaggaatgaaagaaagggaagtacgcttggaagaggaccaagcgggcgacttgaaagataaatgtgtggcttgagcttttgacttggcgttttatacactggcatacttccaaggtcttgcattacttctccccacttgcccaactcctgagatcttattgggaagctgctgctcaccagtttcaggtgttttctattaggagactgccgttccctggtgccagctgtgaccaattactacttcagcaagagagttaataaccgcctgaccatctcacctgatggttgcccgacactcctagtgtgtgtttgggggagccatctcctgctttgttcatacctgactagctacccaccgtaacagtgccagttatactagtgacttttttttttttttgagacagagtctcactctgtcgcctgggctggaatgcagtggcgcaatctcggctgactgcaacctctgcctccagggttcaagcaattctttttttttttttttttttttgagatagagtctcactctattgcccaggctggtacgcaatgtcgcgatcttgactcactgcaacctccatctcccgggttcaagcaattctgcctcagcctcccaagtagctgggattacaggtgagcaccaccacgccttgctagtttttgtatttttagtagagacagtttcagcatgttggccagggtggtctcaaactcctgacctcatgatccacccaccttggcctcccaaagtgttgggattacaggcgtaagccaccgcacccggcatactaatgactttacattttgtttcacttttaaaattttaatcatttaagtttctagacttagtattaaggcctttctttggccagaccttgttttgccactttttttttttttttttttgagacggagtattgctctgttgcccaggctggagtgcaatggtggatctcggctcactgcaacctctacctcctaggttcaagcaattctcctgcctcagcctcccgagtagctgggattacaggtgcctgtcaccacgcccggctaattttttgtatttttaatagagacggggtttcaccatcttggccaggctggtcttgaactcctgatctcgtgatccacccgccttggccttccatagtgctgggattacaggcgtgagccactgcgtctgacctcctccaagttttattctaaactctgccacttttaattagtggtgcaaatatgttttttttgattttaggagtgttagtccaaactgcaccattttgtaaatcctgcccccccaccgccctgccccgtttccccagccctgcctggtctcccccaccctctattttgcagaccttggtcaaagtgaaacattccacaggggttcgggctgtgagaaacatcctgcctaaccacctgaccacaaaacggacaaaggcgcaactaaagaaacacccctatcatattctgccgggagaaagtgcaaagaacaccacattcccggggggtcgtggtggctcacgcctgtaatcccatcactttgggaggccgaggcgggtggatcatctgaggtcaggagtttctactaaaaatacaaaaagtagcgaggggtggtggcgcacgcctgcagtcccagctactggggaagctgagacaggagaatcgcttgaattcaggaggcggaggttgcagtgagtggagatcgcgccactgcactccagcctgggcgacagagcaagactccgtctcaaaaacaaaacaaaacaaaaaaaactaccaccacattctgcgggaacaagggccagaaccgcctcattatgggaacatcttaacatcctgcagggcagcaagtcagcaagccatatggcccaggcccctcccgcccttacctaaaagtaccccactggtgggcactggcattaggctggttccccacttctgtaggtcttaggctggacataaagcccgcagttgctgtagagctgccactctgtatctttaacgctggccttcccttcaaaacttatcaaggagcttatttttagaatgtgtgctcagttacggccataaaagtatcatagacagggaggtatgctggctgcccacgttgggcctgatgcaggcaccatgaggatcaaggtgcagaacattgatttctgttggctcacactgatcccattagtaatttgaagccatctgacgctagtggtatattttatttatttatttattttttagagacgggtcccgctatgctgcccaggctggtctcgaaatcctgggctcagcgatctgctcgcctcggcctcccaaagtgctagggttacaggcgtgacccaccgcgccgtgaagtattagttttaaagcaattgttttagtggtcgctaacagggtacatgctactgtgtatactgattccctcacttttccttgttcacaagttgttccttgttctagagttcaaaaactatcagtgagtggggacaacacgccgacggcttcctttcatccgccacagcgggctctggttccctccctggcgcctgcgcccacgatggtcgcgcgcgcgacacgcccgccctttccgcctgctcgccccgtgcatgacccgccccgcggcggagacgcgctcgctgcgtcatcagtgttttcgagacgagtctcgacgcagcagctgtcagctccattttgttgttggtgcgcgacgcagtcagctgcgtgattcccgtgattgcgttacaagctttgtctccttcgacttggagtctttgtccaggacggtaagacgcaggagggagcggactaggtgacagggccgttcctgtgagcctcgcgggcgcctggcgatgcccccttttcctgcttgtttgctgcccgccgtccccggcgcgacgactgcctgctcccttcactcccaggctgcacagtggcggcgcgcccctctttcctgcgcggccgagcctgtcgccgccggatccggcctgcgggggtagttacggtgtttgctaggccggccgccctcttggagcttctgccctccgctgaggaagcggcgccgcctgacgcgggacggtcgggcgggcgccatgttgtgaaccgcctcggcggagctgtaagatggcggctgggcggaggccggcttcggccctgtggccggaaaggcgaggctccccgttgaggggggatttgctggggttccagaatgtgcgtgagccaagcagctgtggggaaacgttgtctggagtaagtggagaaagagacggaacccgtaggggttacagttaatgtctaatgatgaaagtgtcggcgtaaacatcgcgagtggctttgtcctcagtggtgttaacaaaaaccagatttaggaacccaaggaaagagaaatgctggggtgtatttgaaggagcgttgtgacagaagtcaggtgaccgagaattttatgcgatggcgtttcagccactcctcttgggttagcagttggagcttttttcttttcttggagtctcgctctgtcgcccaggctagagtgtagtggcgcgatctcgagtcactgcagcctccgcctcccgggttcaagcgattctcctgcttcagcctccgggatagctgggattacaggcgcccgccacgacgccgggctaatgtttgtatttttagtagagacagagtttcaccatattaagctggcctcaaactgttgacctcaggtgatc

SEQ ID NO: 2110 - DNA, 6000 bp, Homo sapiens
cttatttctcattcattccaaccccagaacacactatacatcctcattactagacaagcctttcccttattcacttcatcctcagtgaatacacacacacacacacacacacacacacacacacacagtcagccctccgcatccatgcattccgcatctgcggattcaaccaaaccccagatcaaaaatatttagaaaaaaaactacgtgtactgaacacacacacacaattttcttgtcactattccctaaacagtatagtataacaactgtttaaatagcttttacattgtattaggtattataaataatctagagatgacttaaagtatacaggaggatgtgtgtagattacatgcaaacactgcagcattttatatcaggaacttgagcatctgcagattttggtatccgagggaagtcctggaatcaatcccctatggatactaagggacaactgtctatataaaatgaatgttcactttaagcaattatttgagcaccttctataggaagaattctttaagggtaggagtaggagtattcctaatggcactaaaaggtcaataaatactctaacaaattccatgcttttatttgtttgtttttttttaatgagaaaaggccagaaatgtcaaaattcattttgaaaaacaatgtgtaataaattcactttctgtaaatcagtgaaagacacttaaaaggtttgaatccctagacagcaaggttttaagccctgcacttcataataataatcccattaacaaataacatgtattgtgcttattctgttgcttaataacagattggtgtgtagatatctaagacacagtatctgccatcaaaagagtttaaaatccaatgagttcagccatacgaaaagattagagtagattagtgattctcaaccttggctgggcattagaatcacctggagtgctttttaaaatacctatgcccaggacccactcctaacccaatgaatgagaatcttgggggaagggacacaggtatttgtaatgtttaaaatgtttaatgtgaaaattagaggttactgaagttcagccagggttgagagtccctgcaggatacagctcaattacccattcacctgtgacacataattttgatgataaatttaactaattactcaacgatccccaccataagcacataagaagacaatcacttctccactaacaacttcactaaattggatttggaggctgggacactgataaagtgtcaggattcggagataagcaatcccacagttctcacctctcagtccaccacgtttccaatggagttcatcaaatggtggcaggaacctcaaaggcccagacttcagagcataattaaagccttcccaaaagctccccctgtatcttcaggatcgcatcaacctctggccttatctgatgttgattcagggggttcccaacattccacaaataggttttctttgttctcaacaggtagtggttacttctcagacgctgtccacgaaatatagaatggcattcttggacttcacttactttccaaactttagaaacctcaacttcatcctcaatcttgaaacctgtctttctcccatctacattactcagtgcctcagaaaataatggacttactttacattcatgttcccaccaaatttggttctttatagcactcgccacctggatgtctaagatcttgcccattttcccatttgtagttagactgaggaatatttttcatagttgatttgcaaatcctacaatatttgcctcagaaactagattttctacatgtagacctcataaaatatataattaagagaaacttgtggatatcccatcactattccagaagcaaaattgctatttttaggttgatgtgatatagcagttagtagatggaaatgtctttttaaatcaagcattaaaaaacaaacaatatggataaattccaattcataacaacatacatagtactaggctatgcagttaatggctgagagcaaacatctaaagacacagttcctggtttctaaacccaaatctacgacttacttgtcatgtctctgtgtctctttttcccctgatttgtaaaatggggataataatagtacctatctcctaaggttgttgggagaaataagtcataagcatgaagttcctaaaacagggcctgcacagaataagcacaatacatgttacatgttagtgtgattattattacgaagtgcagaaattcactgatttacagaaagtgaatttactacacattgtttttcaaattgaattttgacatttctggccttttctcatttaaaaaaaatgaataaaagcatggaatttgttagggtatttattgaccttttagtgccattatgaatacgatttaatattcgttaaatcttgttatgattacaatattatttaaaataaaactatgggagaagaatacttggggaggggaaaaatcatcacctactacttcttaaaatgaaattttaaaagtgaaaataagaggaaggatttatatgctgcaggtgacctttaaatgtcacattcactaatatataaatgtaaacagaaaaatataagtctggtaataatagtaaactgatcaatgcaactacattgttctgtgatattataagttacgtttccattccagaatgtcaatattttaacaccttttaagatcaaattatagtgaattaaatatcagctggttagttctcttcatgttatttacaagcttgtagtttatctcttacttggatagccccctgtactaaacttctaaatatacaagatttgagggcataaattatttaatagttaaaaagtaacttcaatttggtaagacaatccctcaatgagatctatttcaataatctgtctggagtaatgttgttactattaatcttagctcactttcaaaagttagtgaaatatgatttaatagacaattggttacttgtttaaacatcagttaactgaattacatgatttaaacagcaaacactattttaacaatggcaaacacatatgcacgtgcacacacacacataacattgcagttgattttcacacagctttataaaccactttaattttttccctcctccacctcaattccatcagtaaagagttcatctttaggggttatatttaatatattaatagacctttcattgtactctcctccagttcttgagtatccaaagcaatatgcacatgtatctgtccagagctgaattttttttctgtataataattcttcatggaggcaaagaaggtgcaagtattttcttaaacccctaagctatacacttgtaagaaacaattacttttatgctttggataaccgataagaagttaaaagaaattaaaacttacgtttttccatcactagattgaccaacccactattttagtcacatggcacgagaccaaatattaagagaaccattggccgctaaaacaagaatttgtgacttgccctgtttgaggagcatttgggacatacaaaatgttccatgtgaagattcaaaaaattaaaaggttattcaatgccttcctttaaaagtttcactgaggaagtcccagaggcccaatgttacccaaatacttggcataagttctagtgccagatattttctcaacatgtattgcacacttaaaaaaaattgtcacttaatttatacttgttcctgacttcagctacagagctaggaacgtctttctcattttaatagtcactcaggacctgacaacagcccacacacatagtaaatggtcatagaatctgtgacattaaactgaaaacactcaaaatgtagacaggttggctaagcaaacagcatgctcccacctgtgttcctgcccaagtcactgagacagggcagctcacaaggctgaaactccaaaggccccatcagttgtaacttccgagtatgtgtcacttgcacaatcaactttctaactccaaggagcctaagtgaggcgggccttaatgggtcaaaaatcacacttaggtgagcagcaccttttaagacgttccctcaaacaagttctaaaccagtggttctcaaacttcagtgggcattccaatcacctggggatctcgttaaagagcagatcctgagtcggtgggtttggagaactgcccatattgggcagttctaagaagctcccaagagattccaatgctgcaggtccactcacgaccctcggagctcaaggcccacaaacacccaaagacacccacatcactgatattagcaatagacaacagctgcagctacaggcagtgccccataatcccctgggttttctgcatcccctgagtgtcgccaccgggtcgcacctggcaggtgccttggctgcagccgcgccccactcctccgcgccgcgctcaccttctcccgggtcttcaggtaccgctgcagcgcctgctgggtgagctcgccgacgcgcagctggccctccttgcagggcaccacgatgcccgtcctgccgaagcacacggtcactttcatcctggcccccggcgaccacgccgggccgggccgaacaggtgtctgaccccgcgggcgcagcccccactctcggaggacgcccggggcgggtgggcccagagacccggggcgccgctccccggaacaccctgaggcccggaggctcgcggcagcgccccttccacctggccaggcggcaggtggcgggaatcggggaggggcggccgcggaaaggggttacctcccaggtgcccggcggcccgggacgcggcagctccgcggcaccggctcctcctcctcctcctcccgctcctactcctgcccggcccaggcggctgctccgcgcccaccaaagcgaaactgccggccctgccctgtcgctggtcctggccctggccctggccctggcggcgttggcagggccggccccaagccgggggctggagtgggcggcggcggcggcggcgcacggggccagagttgggaggaaacttttgcgccggctcccaactcctctgcggcgcccgcgctctgggctcctgcggtcccggcgacggcctgggcccggctcttaaaggggccgcggcgctcccgggccccgccgcacgctgggcgacgacgtgccccggccctgcgggccagtaactggagcccgggagcctcgtctcgtcacctgggtctctccctggctctctccctctcgcacgcatgcacacggagctctggggagttgtaaggggacctgagggctacacgctcgaggattgaaaccggatctcagaaagaacacccgagggaagagcgaggagactgcagagctgcgcccttcacaggaggggactgcagcaagatgcaaaaggagcccaggagcaggtgcttctagtcacgcccaccaaaaacacccaaggggcgaggctgccgggtgcggagatgcaggagtgccccgagggcctgttaggaactcgccttaagcacagcccgtgccgctgccatcaggagccctgggatagcagagctgaagcgaaccttggagagaacgcgccagtggaaacttttccttttacagaccctcgaggacactgagtatttggccaaaggtcacacccaagacccagatatgatcgcgtgtgttgacacatagccttctggaatgcgactaccgttgtgcattttattaggaaaaaaaaaagttaacacccttaggctcatgatttggcaggtgtgtatccatcaccaattgaaatgggaatatgtgggggaaaccaacaaattacgttagtttcattcttagctctcatgtaaatgagctcctttgagcttaacaactacccggtaggtagatattattcttcgcatcttgtgcatcaagaatggtgctcggagaggtcaagagactgagcagaccatggtgttagttctgttgaaaagaactcaggtcttctgagctcaatctctggtctctccctgcagttttcttagcc

SEQ ID NO: 2111 - DNA, 6000 bp, Homo sapiens
agttaggagttcaagaccagcctggccaacatggtgaaaactcgtctctactaaaaatacaaaaattagccaggtgtggtggcacacatctgtaattccagctactcaggaggctgaggcaggagaattgcttgaacccaggaagcagaggcttcagtgagccaagattgcaccactgcactccagcctgtgcaacagagctagactctgtctcaacaacaacaacaaaccacaaagccttaaactaatgttggtcaaatatctaatgttataaattctgttaccagacagacagggaagtgaagaaagcactggactatgaccaagaggttctgggttctgattctggctgaaccagtttccttgacctctctaatccagtttcctcatctacaaaatgaggatattgtatcaggtaatctgcaaggccccattcagctctgtaattctgtgattctcagatactagattaaatgtttccggattgctttttgagcatcaaatgaaataatatgtagattgtgaattagaatacacatcttaacattagttttgctatggtcctggcaccctcattacagagctagttacactttgtctccagcagttgtgtacttgatgtgcagtttctacgtatcatttgaattgtttcactttgcaagtagtttcagactcaatgaaaacaagtgacatttagaaatgctagtaagtggaaaaaaagttgaaagagggcaatatatcttgcctactatgtgttgagtgctttatgtatattacaccttaaaatagagttatcatcccattttacaaaaaaggatagtgacatatgactaagattacttagcttatcactgcgcacacatgacttacacactgaaatgtccaggcccaaatctctctctaccttctgtcaattacatggatgcccgttcacttcctctccaagtaaagggatataaatgagaatcagaaagtggcctttggtaaagtaagcagaattgaaaagagaactcttggttgcacccttacctcaaagctatctttggacagctgagcttgctggagagcaccaatgaccactgctattggccctctttctaacagtcttctacagatgcctagaggtgaaaggacttggtcctatccagagtagggcctattcctgtgcttaccgttaatgggccccagtgagcttcagagaaggagatcacacattgaggaaaacaactaattaataatcaaaattaacttaatataacagcatcaggacagtttccttgcttttggttgctcattttacttttttttttttttaagagatgctcatttcatgattcagctccttttcaagaaaacaaacttagggagaatattagtttctacagagtagaattcaatataaggaggggtgatatagctgtaccatttgtgaagacttgtgagtcttgcttataggatgggcaaaaaatggaccttccaaaaagccggtggcccataatattccccttagggtgaagagcattgttatttgtgcatccaggacagctacagaaataaataaccaaaaatgtcaacaaatgaatgccatgcagtatttagagacaaacagctctaaagaagaatccattcttgtccagttaaacaataacccagaccatttgcttttaaatataaaagggaaaaaatgaaaacgaatacccatttttctctttcattatttatgcaatcattcttgcacctgctttcagaaggaagcaaagaatgtgatcttttatactaatgctccaagggttttataaataagttaatttaattagtaaaattgattcaatttttttgtgataaatagtacttgctataaataattccttgaaaggtaaaaatattttgtttaacagtgcaaaacatgagactcaattactggtcaactatagattaaatattatcattcttcattcaatgtatacctgatagtacctgacattttagttaggcagggtggtttaataatattggtcaggattattgttctttctctgtataacacttctttactggctactccagtacttgctaagctgttggataacaaatggaaaaatatcacatcacaggcatatttatctaccgagcaggcaaaacaagaaaatggaacccgggcttggcatcatctagtgttactcaatcaaggcaaattatttattgtcttctgcccaggaggtcccatggggcatgaaatattgatttaggaatttgctgggcatgaatgactgtgtgttgcaattgtgttcttttttttaatcccttgataatatatggtaaattgtttctatatatgctgtgatgaggctgaataacaaattaaacctggctatttaataaacatgaaatgtaaacactaaactcttcatactaacttagggctataaaaggtcaccccatggtgtacaggattgcacaatgcactgttcacatccttgtctagagtcatctcttccttcatctcacaatggcatggcctctgctgcatcccctaggtcccgattccaacttcccaagtggaactgggagagccggagtgttctttatggttcacttggggattatcaaagccaggacttggggtgggaggttctagatattgggaaggagctaaagctgggctaagagggaatttgtggcgaagaggaggagctattcatgacccaagcagaagaaaatgagtctggagcaactgtaaagcaaaaagccacgatgcaggaaggatggcaacatgcaaagttatttcatcagtggaaaatctttgctctgtaccattctataggtccatgaaataccgaatattaaaagtgagggccacacattaatgcacggcatcagtatctatttgtttgtttgattcactcattggtacttctcatgtaagaaacagcacagcagttacgatgaagactctggaatcagatgacctgggttttaagccagcctctgctactttctaagaatgagattttaactaaatcatttaacttcctttggcctcagctcctcatctctaaaaagaggataaagtgtctcctttgaagagagctggcctgagaatggagaccacactgaggaacagatagagctaagagctggacagagctagctggcccctgaggacatagtttgagttcctgctttcaaccttgcctcaatggagtgccctctggatcttctgattttatgaggtgatcaattctgtctttggtttatttaaatgtaaattagtttgtattggatttacaaccaaattacaatggacttggtttacgtgatcctcttggtttgccactgactttctatacatagaagacaaccaatatatacttactgaatgtatgaatgagctaaaatttatttttttaaaaaacctcttgaaacccatgaatttaatctcctctgcattatcataccatcctaggcaattcacgttcaatttaagtgtgtccacataggagcacatccttctgtagagaaacacatgatgcagccctgagggtcttgctggatgaactggatggctaagaaaactgcagggagagaccagagattgagctcagaagacctgagttcttttcaacagaactaacaccatggtctgctcagtctcttgacctctccgagcaccattcttgatgcacaagatgcgaagaataatatctacctaccgggtagttgttaagctcaaaggagctcatttacatgagagctaagaatgaaactaacgtaatttgttggtttcccccacatattcccatttcaattggtgatggatacacacctgccaaatcatgagcctaagggtgttaacttttttttttcctaataaaatgcacaacggtagtcgcattccagaaggctatgtgtcaacacacgcgatcatatctgggtcttgggtgtgacctttggccaaatactcagtgtcctcgagggtctgtaaaaggaaaagtttccactggcgcgttctctccaaggttcgcttcagctctgctatcccagggctcctgatggcagcggcacgggctgtgcttaaggcgagttcctaacaggccctcggggcactcctgcatctccgcacccggcagcctcgccccttgggtgtttttggtgggcgtgactagaagcacctgctcctgggctccttttgcatcttgctgcagtcccctcctgtgaagggcgcagctctgcagtctcctcgctcttccctcgggtgttctttctgagatccggtttcaatcctcgagcgtgtagccctcaggtccccttacaactccccagagctccgtgtgcatgcgtgcgagagggagagagccagggagagacccaggtgacgagacgaggctcccgggctccagttactggcccgcagggccggggcacgtcgtcgcccagcgtgcggcggggcccgggagcgccgcggcccctttaagagccgggcccaggccgtcgccgggaccgcaggagcccagagcgcgggcgccgcagaggagttgggagccggcgcaaaagtttcctcccaactctggccccgtgcgccgccgccgccgccgcccactccagcccccggcttggggccggccctgccaacgccgccagggccagggccagggccaggaccagcgacagggcagggccggcagtttcgctttggtgggcgcggagcagccgcctgggccgggcaggagtaggagcgggaggaggaggaggaggagccggtgccgcggagctgccgcgtcccgggccgccgggcacctgggaggtaacccctttccgcggccgcccctccccgattcccgccacctgccgcctggccaggtggaaggggcgctgccgcgagcctccgggcctcagggtgttccggggagcggcgccccgggtctctgggcccacccgccccgggcgtcctccgagagtgggggctgcgcccgcggggtcagacacctgttcggcccggcccggcgtggtcgccgggggccaggatgaaagtgaccgtgtgcttcggcaggacgggcatcgtggtgccctgcaaggagggccagctgcgcgtcggcgagctcacccagcaggcgctgcagcggtacctgaagacccgggagaaggtgagcgcggcgcggaggagtggggcgcggctgcagccaaggcacctgccaggtgcgacccggtggcgacactcaggggatgcagaaaacccaggggattatggggcactgcctgtagctgcagctgttgtctattgctaatatcagtgatgtgggtgtctttgggtgtttgtgggccttgagctccgagggtcgtgagtggacctgcagcattggaatctcttgggagcttcttagaactgcccaatatgggcagttctccaaacccaccgactcaggatctgctctttaacgagatccccaggtgattggaatgcccactgaagtttgagaaccactggtttagaacttgtttgagggaacgtcttaaaaggtgctgctcacctaagtgtgatttttgacccattaaggcccgcctcacttaggctccttggagttagaaagttgattgtgcaagtgacacatactcggaagttacaactgatggggcctttggagtttcagccttgtgagctgccctgtctcagtgacttgggcaggaacacaggtgggagcatgctgtttgcttagccaacctgtctacattttgagtgttttcagtttaatgtcacagattctatgaccatttactatgtgtgtgggctgttgtcaggtcctgagtgactattaaaatgagaaagacgttcctagctctgtagctgaagtcaggaacaagtataaattaagtgacaattttttttaagtgtgcaatacatgttgagaaaatatctggcactagaacttatgccaagtatttgggtaacattgggcctctgggacttcctcagtgaaacttttaaaggaaggcattgaataa

SEQ ID NO: 2112 - DNA, 6000 bp, Homo sapiens
acctctttgcccttgttaatttctttctgatgctgccaacacatatatctctcccttacatcccacccaagcttcccaagtaactccaaggtctggccaactctggacaattgtctcagtgggactccaaaggccacagtctctggccaggctacaaatcacctgacctcgggctaagtgcccatcagctgtggcagagaatggcaggggaggggacttatggctgccttggatgtggtcatgtgagtgcagcagtctcccttaggtgtgcagggcaggcaacctgattgacatgtctggttcagcttgcatgcgtccagctctgtctccaaggtggctctccaaggagcttggagcactattatgtcacccccaagcgttgtagattcccaaccaatacacatccagttatagctcttgaacttcatgtctctgaggtcaagtgtggctgagtgacctgagatctgacagtcccatgctcctgggggcccaactccatatcagagaagctggagaacatatgtcaagtcatatgcactgtgttctttattgagatagaagtggggtggggagggtagcccataggcagagaagtgaaaggagggaggagtgggagccatctatttcccaactctgcctttcctcccagctgatgatggtgggggcgtggccaccagccatgggattaagaaggaagaccccccacccttagatacaagcacagtgctgcgtgagaaggttgggcactgtctcatacttgaaagagtaacctccatccgaggtggtgcggacatgtaggggcctcatggtccctgggagagcagcacagcagggctgggcccctggcagcaaggagtagggctgggctggggtagggggagccccagggactggaagggacaggtttggtgggatgtgcagcccacaaccaccatgacagtagtggaagatgaaactgggagggtacacgatccaccgttcccagcccagctcctggaaggagatgttcagtgctactctgtggcagttggcatgggcagccggttcctccggaggcctctgcagcaggcgcagagcagagggagaccaaggccaggacatcaggggagttgagcgtcgggctctctcccctccactgggtggtctggtccgagtgtgggccaccaggaagggcgtggcctcaggccgggctgagcaggtacagaggggacagcgcagcagcagcaccaggacggggtgggtcagcagagagagagcagaggtggccaggtgcagcacggcccagtgagggggagcatggcccaaagacatgggcacagccacgggtcctcccggtgacagtgccagcaggcctagcaggggctcagagctattggaggctgctgtgccctgcctgtccagcccggtgtggaaccacagctgggctgaagtcacctggcggctgcgtgtatgctgggatggccggaacatgtatctgaagaggccctcctcagcctcctgggccagccctctggcagctgacttgtcctcacagctggcatctgcaggagacagaagaaaagggagagggcagccctgactggcaggacctggcacccctcctcttcagcaggagggatgtggccaccagtcatgagccaatgatgggctgcactctgctccacgccctccgggacgtggggactctcctgagttttgggagagcttctgtaggcttcccattttttaatttcatcatgaagggacttaaaaaaatagaagacattgccaacttctctctgaagtggttttaccaattaacatgcccatcagcagtgtgtaagaggccctctctccacttcaccagcactaagactttgtattagacttcaatgcttactcaccagatagtgtgaaacagtatcctgaatggtgtctacatggatggttgttatattcttttttttttttttttttgagacagagtcttactgtgtcacccaggctggagtgcagtggcatgatcacggctcactgcagcgtctacctcctgggctcaagcaatcctcccacctcagcctcctgagtaactgagaccacaggcgtgtgctaccacacctagctaacttttgtgggttttgtagagacagggtctcgctatgttgcccaggctgatctcaaactcctgagctcaagcaatctgcctgccttcaccttccaaagtgctgggattataggcgtgagccatcacacccagccatattaccattttttttttttttttgagatggagtctagctctgtcgcccaggctggagtgcagtggcgccatctcggctcactgcaacctctgccttccgctccgcctcccacgttcaagcaattctcctgcctcagcttcccgagtagctggtgccaccatgcctggctaattttttgtatttttagtagagacggggttcaccatgttagccaggatagtctcgatctcttgaccttgtgatcctcctgccttggcctcccaaagtgctgggagtacagacgtgagccaccgcgcccggcctatattactctttatatctttggcatgtcaggaatattgtaggataaattctttaaaataattccatttttaaaagacaggtttacaccaaaaaaaaaaaaaaaagaagaaggagggaaaggcaagtgggaaagggaagaaaatggagaacaaggaagagggggaagagaaggaggagggctgtaactcagaacagagggcagtcctttcaagaatgtgtagttagcatcctcacactgacacactcatagactatactaatcatcctggagcagcactcgttcatggactggcaattggaactatactgttacatggcttctctcattatctagtcacaattggtccattttgcagataaggaaactgaggcttagagaggtgaaatgacgttcaacgactaagtggccaggcttggattttgcctgatcccaaagccatccttctccccactgtgctgcgaacggactgaagtgagggaggcaggggtcctctctaagagaaaggtggaccagatgacaagaaagcccacccacaggagggcttatccattcagtcagtggaacaagggggcacatatatgttgagacaggaactcaagagaagatagactagttttccagaaaagtttcccaactaatcttttgcctgtatctctgatagcttctcagtgtcagctacctgggagtaaagaaacagggtttggagcagcgagcagaggcagagataggaggaaaggtggcaggaaggggctcaagcccaaatatctccatctttagagacccccggtctcccagcgcatacttcccaaatgcctcccacctgccatgcactctaggtacagcctctcacttaatcctgagaggtgggcattagcccattttacagatggggagacagaagcataaggaagtttagtaactggcctattgctgcaaagcaactgagtagcaggactaggattcaaacccaggtccgcctggcctgcaaacccatgctgtgccttgctttttctcaaagtcatcctgccggttcccccaccctcgttacctgtggctgggaaaaggatggcttgggagacatcctcctcttcctcgggctcagagcccctgtgtgtgaagccccccagggcatgtcttcggggcagccgcctgactccagggtccccaccttccctggtcaccgcggggggccccaaggcatccaagaacagggccctcaccttggccagaacaagttcccgggccagctccagcccctggcagctgtgcccaccctgtggggtcagcagcaagaagagcagtaggtgcagcaccatagctcacctggccctgctagtggggaactcacaccctgccccgtgccccttctgccagggtctgcccagggcctttccactctcccctccccatcccacacccaccctcttctacccttctcatccagtcttccccagtcctttccacgccccacagtccgagttgcccctgcccgtggcattgagacctcctatctctgacgcagatgtctgtggccatgagccttatctcccactcccgccagggatgtgggggaggggctgggaaggatttcgcctcaagcgacctgactcacacatgcaaacatacaacaccttctccctacacacacacacactcacacacacactcacacacacactcacacacacacaaattctcacacacacacactctctcacacacacacacacagacacatccagaggtgacatcaggtgggacaggagcctgggagctgtagccggccagccccagaaagtgttatttgtcagggagacaaagtgcatcacccctcagaccttctggggcccctttcaataagcagctgctggccggccagcccttgggggcagggctggaaccggggctagaaccggggctagggccgggggcaggtggtcctgcctgctctatacttagaccagtggagccagtctgggctcttgtcctccagctgtgtcatcagagaatatttttgggattggcagctgcaggcgcctctgccactcaggcccaagcctggcgggcggctggggacctggcggctggaggtgggagggaggagggggaagaggcccaagctgtgggagggggctgggaagagaggctcctaagagcaggaagccaggcagcgggcaggggaggctgcggggccactcgctggagaggcaaacaggaaggactgccccctgagcgccaggcttcgggcccgggaatcgccgccgccgccgccgcagagctgcagctcggggccgagggtaaggaggcgagccgggagcgggaggcccgggagagctccgcgggtccccgcgcccagtccccagccgcgccccgaccccgccgccccgggcctcggctcgccctccgcacccccccctgcccccccaccgttcgccgctgcaggcggtcggccgccgcgatgaaggcgagctcgggggatcaggggagccccccgtgcttcctgcgcttcccgcggcctgtgcgggtggtaagtggcgccgaggccgagctcaagtgcgtggtcctgggggagccgccgcctgtagtggtgtgggagaagggcgggcagcagctggcggcctcggaacgcctgagcttcccggcggacggcgcggagcacggcctgctgctgaccgccgcactgcccaccgacgcgggggtctacgtgtgccgcgcccgcaacgcggccggcgaggcctacgcggcggccgccgtcaccgtgctggagccgccggcctccgaccccgagctgcagcccgccgagcgcccgctgccatcgccggggtccggggagggcgccccggtcttcctcacggggcctcgatcccagtgggtgctgcggggggcggaggtggtgctgacgtgccgggcggggggcctccccgagcccacactgtactgggagaaggacgggatggccctggacgaagtgtgggacagcagccacttcgcgctccagccgggccgcgccgaggacggccccggcgcgagcctggcactgcgcatcctggcggctcggctgccggattccggcgtctacgtgtgccacgcccgcaacgcgcacggccacgcgcaggcgggggcgctgctccaggtgcaccagccccccgagagcccgcccgcggaccccgacgaggcccccgcgccggtggtggagccgctcaagtgcgcgcctaagaccttctgggtgaacgagggcaagcacgccaagttccgctgctacgtgatgggcaagcccgagcccgagatcgaatggcactgggagggccgcccgctgctcccggaccgccgccgcctcatgtaccgcgaccgcgacggcggcttcgtgctcaaggtgctttactgccaggccaaggatcgtgggctctacgtctgcgccgcgcgcaactcggcgggccagacgctcagtgccgtgca

SEQ ID NO: 2113 - DNA, 6000 bp, Homo sapiens
ctccacggctccggctttctcgatgctgaagcactgaatccagtcttcagagcccacttcctgccgctccagccggtagatgaatggggtctcgggagctggctcgggaggcttccaggtcaacaggaccgtgttcttgtggcccttgaacatctctgccaatatggggggtcctgggggactgtgcttgacacctgagaccaaggcagggatgtgttccggccttgcttgggcctccacagcccttccaccttaaatctacttcaccaacccagctccggcatctggccaacctcctgccctgcctcgcctgtccagaggccttcctgccctcacattttactctgagaagcgtagtggtacgggagttgcccaggctaaaggtgacctcgccagcatcctctcgggtgacccctggaaggaccagggcatgcatgtggcctgagctgctctggcagatgaccggcagctcctccccatcacggctccagcgtccctcgaccccggcctctagagtttccactagcagcacagcattctctccttccaggacgtcgagcttccggggcaggcgcttcaggatgggccctgagatgcggacaggaatccatcaacctggaatctgagcacctgcctgcctccgcctcagcctcttccccacgggccagctgacctttgactgtgacgttggccacggtgcgcacccggccccgcatctcgcacaggtagataccatcatcgtctgccttcagcctgtggatgatgaggcgccggacagtgccctcttcgatctgctcgtacttgcggcagggcagcagccgctggtcctcacggaaccaggccgtggggatgcgggagttgggtactttacattccagcacggcaatcccgtgctcacggccctccacgtcctgcaggggccgtgtgaaccggaggcggggctctgtggagaggggagagagagacaagagagggctctggagaaggcccagactaggagtaggatacctagaagcgcattagctcatgctgtgtgctcttcatgcagagccagcgggcactgtggaatcacagaaaactaccagaagggaagtggtggttcctaagatgacctgagttctcatccagccctgacactagccacatcaccttaagcaagtccatttcaatgcttctgggcctcagtctccttacttgtaaaatggggaaagggagagaaggggttggaccagattgatgatttccaaactgttccctggggtcctccaggccctagattggtgatttccaaactgttccctggctccccccgccccagtcatttcacatattctgcaagggtctgagtagaatttaaaatattttaactctttttttttttgagatggagtctcgctctgttgcccaggctggagtgcagtcgcgcaatctcggctcactgcaacctccacctcctgggttcaagcaattctggtgcctcagcctctcaagtagagctgggattacaggcaggcgccaccacgcctggctaatgattttgtatttttagtagagatggggttttgccatgttggccaggctgttctcgaactcctgacctcaaatgatccgcccaccttagtctcccaaagtgctgggattacagggtgagccactgtgcctagctattttaacccttttcaaaagtgtatttcaaaaaaaaaaaaagaaaagaaaagaaaacaggatgttggaaatcagaggattaactagggctgctggagaagcaagtttttgtgtgcgtgtgtgtatgcaactcggggaagctcctctagccttccctccgggcttttctttcctgatggaggtccagatcagcaccaacctgatgaatctgtgagcattgaactgtaacagtgaggccaccaccgcagcctgggggcaacatgcttgactgcatgctaggaaggactcaggagaatttaccaactttttttcctctaagagaaaaaactggacaataactagtgaaggtgtactcttttgcgttgtgatgaaatcctattatggggagcgttaccttctggtgagtttggggtgtgcttttttttcctttggaattttctgtttatgagaatgtaaccatttattggatattgttggtgattcaactttgaaatataaaccttctctccttcaccttcctcttcttgcaaacgtggggagcagtttaatcaaagaatagtaaaaacacgcaggacatttgtcctccctcaagtctagctttccactgaatcacttgtttctcaaggtgacagatgcagccaggccgtccccacagggttcagagcctggtctcatgaatgcagcctttaattcaaattcctgtattcaataaaatagcctccttattctcactgatggtttagaagtacctgttatatacgtagactcagcaatttacgcccataaactactcctttatctgtctcatatattggggctctggttgtgaattcagtgggggaaggaggagtaaaataacaaagacgttgaaaaccactagggaagaagagttctagggccctccggatttgtacatcaatcactccttagtggtgttccaccatctgcctcggaatcatttaaggagtttgctaagaagttcctgagtaccctggagacctactaaatccgaatccctggggagtgagaggcgggcgggtttggtattttaatattcccgcggaccacctctcctccagtcttgggggcagcgctgggcaccgaggagggctggagttcggagggcctcggaggacactcgaggcccctccctaggtcccgggctccgccgtacctttcacgtgcagctgcacggcactgagcgtctggcccgccgagttgcgcgcggcgcagacgtagagcccacgatccttggcctggcagtaaagcaccttgagcacgaagccgccgtcgcggtcgcggtacatgaggcggcggcggtccgggagcagcgggcggccctcccagtgccattcgatctcgggctcgggcttgcccatcacgtagcagcggaacttggcgtgcttgccctcgttcacccagaaggtcttaggcgcgcacttgagcggctccaccaccggcgcgggggcctcgtcggggtccgcgggcgggctctcggggggctggtgcacctggagcagcgcccccgcctgcgcgtggccgtgcgcgttgcgggcgtggcacacgtagacgccggaatccggcagccgagccgccaggatgcgcagtgccaggctcgcgccggggccgtcctcggcgcggcccggctggagcgcgaagtggctgctgtcccacacttcgtccagggccatcccgtccttctcccagtacagtgtgggctcggggaggccccccgcccggcacgtcagcaccacctccgccccccgcagcacccactgggatcgaggccccgtgaggaagaccggggcgccctccccggaccccggcgatggcagcgggcgctcggcgggctgcagctcggggtcggaggccggcggctccagcacggtgacggcggccgccgcgtaggcctcgccggccgcgttgcgggcgcggcacacgtagacccccgcgtcggtgggcagtgcggcggtcagcagcaggccgtgctccgcgccgtccgccgggaagctcaggcgttccgaggccgccagctgctgcccgcccttctcccacaccactacaggcggcggctcccccaggaccacgcacttgagctcggcctcggcgccacttaccacccgcacaggccgcgggaagcgcaggaagcacggggggctcccctgatcccccgagctcgccttcatcgcggcggccgaccgcctgcagcggcgaacggtgggggggcaggggggggtgcggagggcgagccgaggcccggggcggcggggtcggggcgcggctggggactgggcgcggggacccgcggagctctcccgggcctcccgctcccggctcgcctccttaccctcggccccgagctgcagctctgcggcggcggcggcggcgattcccgggcccgaagcctggcgctcagggggcagtccttcctgtttgcctctccagcgagtggccccgcagcctcccctgcccgctgcctggcttcctgctcttaggagcctctcttcccagccccctcccacagcttgggcctcttccccctcctccctcccacctccagccgccaggtccccagccgcccgccaggcttgggcctgagtggcagaggcgcctgcagctgccaatcccaaaaatattctctgatgacacagctggaggacaagagcccagactggctccactggtctaagtatagagcaggcaggaccacctgcccccggccctagccccggttctagccccggttccagccctgcccccaagggctggccggccagcagctgcttattgaaaggggccccagaaggtctgaggggtgatgcactttgtctccctgacaaataacactttctggggctggccggctacagctcccaggctcctgtcccacctgatgtcacctctggatgtgtctgtgtgtgtgtgtgtgagagagtgtgtgtgtgtgagaatttgtgtgtgtgtgagtgtgtgtgtgagtgtgtgtgtgagtgtgtgtgtgtgtagggagaaggtgttgtatgtttgcatgtgtgagtcaggtcgcttgaggcgaaatccttcccagcccctcccccacatccctggcgggagtgggagataaggctcatggccacagacatctgcgtcagagataggaggtctcaatgccacgggcaggggcaactcggactgtggggcgtggaaaggactggggaagactggatgagaagggtagaagagggtgggtgtgggatggggaggggagagtggaaaggccctgggcagaccctggcagaaggggcacggggcagggtgtgagttccccactagcagggccaggtgagctatggtgctgcacctactgctcttcttgctgctgaccccacagggtgggcacagctgccaggggctggagctggcccgggaacttgttctggccaaggtgagggccctgttcttggatgccttggggccccccgcggtgaccagggaaggtggggaccctggagtcaggcggctgccccgaagacatgccctggggggcttcacacacaggggctctgagcccgaggaagaggaggatgtctcccaagccatccttttcccagccacaggtaacgagggtgggggaaccggcaggatgactttgagaaaaagcaaggcacagcatgggtttgcaggccaggcggacctgggtttgaatcctagtcctgctactcagttgctttgcagcaataggccagttactaaacttccttatgcttctgtctccccatctgtaaaatgggctaatgcccacctctcaggattaagtgagaggctgtacctagagtgcatggcaggtgggaggcatttgggaagtatgcgctgggagaccgggggtctctaaagatggagatatttgggcttgagccccttcctgccacctttcctcctatctctgcctctgctcgctgctccaaaccctgtttctttactcccaggtagctgacactgagaagctatcagagatacaggcaaaagattagttgggaaacttttctggaaaactagtctatcttctcttgagttcctgtctcaacatatatgtgcccccttgttccactgactgaatggataagccctcctgtgggtgggctttcttgtcatctggtccacctttctcttagagaggacccctgcctccctcacttcagtccgttcgcagcacagtggggagaaggatggctttgggatcaggcaaaatccaagcctggccacttagtcgttgaacgtcatttcacctctctaagcctcagtttccttatctgcaaaatggaccaattgtgactagataatgagagaagccatgta

SEQ ID NO: 2114 - DNA, 6000 bp, Homo sapiens
caccaacccagctccggcatctggccaacctcctgccctgcctcgcctgtccagaggccttcctgccctcacattttactctgagaagcgtagtggtacgggagttgcccaggctaaaggtgacctcgccagcatcctctcgggtgacccctggaaggaccagggcatgcatgtggcctgagctgctctggcagatgaccggcagctcctccccatcacggctccagcgtccctcgaccccggcctctagagtttccactagcagcacagcattctctccttccaggacgtcgagcttccggggcaggcgcttcaggatgggccctgagatgcggacaggaatccatcaacctggaatctgagcacctgcctgcctccgcctcagcctcttccccacgggccagctgacctttgactgtgacgttggccacggtgcgcacccggccccgcatctcgcacaggtagataccatcatcgtctgccttcagcctgtggatgatgaggcgccggacagtgccctcttcgatctgctcgtacttgcggcagggcagcagccgctggtcctcacggaaccaggccgtggggatgcgggagttgggtactttacattccagcacggcaatcccgtgctcacggccctccacgtcctgcaggggccgtgtgaaccggaggcggggctctgtggagaggggagagagagacaagagagggctctggagaaggcccagactaggagtaggatacctagaagcgcattagctcatgctgtgtgctcttcatgcagagccagcgggcactgtggaatcacagaaaactaccagaagggaagtggtggttcctaagatgacctgagttctcatccagccctgacactagccacatcaccttaagcaagtccatttcaatgcttctgggcctcagtctccttacttgtaaaatggggaaagggagagaaggggttggaccagattgatgatttccaaactgttccctggggtcctccaggccctagattggtgatttccaaactgttccctggctccccccgccccagtcatttcacatattctgcaagggtctgagtagaatttaaaatattttaactctttttttttttgagatggagtctcgctctgttgcccaggctggagtgcagtcgcgcaatctcggctcactgcaacctccacctcctgggttcaagcaattctggtgcctcagcctctcaagtagagctgggattacaggcaggcgccaccacgcctggctaatgattttgtatttttagtagagatggggttttgccatgttggccaggctgttctcgaactcctgacctcaaatgatccgcccaccttagtctcccaaagtgctgggattacagggtgagccactgtgcctagctattttaacccttttcaaaagtgtatttcaaaaaaaaaaaaagaaaagaaaagaaaacaggatgttggaaatcagaggattaactagggctgctggagaagcaagtttttgtgtgcgtgtgtgtatgcaactcggggaagctcctctagccttccctccgggcttttctttcctgatggaggtccagatcagcaccaacctgatgaatctgtgagcattgaactgtaacagtgaggccaccaccgcagcctgggggcaacatgcttgactgcatgctaggaaggactcaggagaatttaccaactttttttcctctaagagaaaaaactggacaataactagtgaaggtgtactcttttgcgttgtgatgaaatcctattatggggagcgttaccttctggtgagtttggggtgtgcttttttttcctttggaattttctgtttatgagaatgtaaccatttattggatattgttggtgattcaactttgaaatataaaccttctctccttcaccttcctcttcttgcaaacgtggggagcagtttaatcaaagaatagtaaaaacacgcaggacatttgtcctccctcaagtctagctttccactgaatcacttgtttctcaaggtgacagatgcagccaggccgtccccacagggttcagagcctggtctcatgaatgcagcctttaattcaaattcctgtattcaataaaatagcctccttattctcactgatggtttagaagtacctgttatatacgtagactcagcaatttacgcccataaactactcctttatctgtctcatatattggggctctggttgtgaattcagtgggggaaggaggagtaaaataacaaagacgttgaaaaccactagggaagaagagttctagggccctccggatttgtacatcaatcactccttagtggtgttccaccatctgcctcggaatcatttaaggagtttgctaagaagttcctgagtaccctggagacctactaaatccgaatccctggggagtgagaggcgggcgggtttggtattttaatattcccgcggaccacctctcctccagtcttgggggcagcgctgggcaccgaggagggctggagttcggagggcctcggaggacactcgaggcccctccctaggtcccgggctccgccgtacctttcacgtgcagctgcacggcactgagcgtctggcccgccgagttgcgcgcggcgcagacgtagagcccacgatccttggcctggcagtaaagcaccttgagcacgaagccgccgtcgcggtcgcggtacatgaggcggcggcggtccgggagcagcgggcggccctcccagtgccattcgatctcgggctcgggcttgcccatcacgtagcagcggaacttggcgtgcttgccctcgttcacccagaaggtcttaggcgcgcacttgagcggctccaccaccggcgcgggggcctcgtcggggtccgcgggcgggctctcggggggctggtgcacctggagcagcgcccccgcctgcgcgtggccgtgcgcgttgcgggcgtggcacacgtagacgccggaatccggcagccgagccgccaggatgcgcagtgccaggctcgcgccggggccgtcctcggcgcggcccggctggagcgcgaagtggctgctgtcccacacttcgtccagggccatcccgtccttctcccagtacagtgtgggctcggggaggccccccgcccggcacgtcagcaccacctccgccccccgcagcacccactgggatcgaggccccgtgaggaagaccggggcgccctccccggaccccggcgatggcagcgggcgctcggcgggctgcagctcggggtcggaggccggcggctccagcacggtgacggcggccgccgcgtaggcctcgccggccgcgttgcgggcgcggcacacgtagacccccgcgtcggtgggcagtgcggcggtcagcagcaggccgtgctccgcgccgtccgccgggaagctcaggcgttccgaggccgccagctgctgcccgcccttctcccacaccactacaggcggcggctcccccaggaccacgcacttgagctcggcctcggcgccacttaccacccgcacaggccgcgggaagcgcaggaagcacggggggctcccctgatcccccgagctcgccttcatcgcggcggccgaccgcctgcagcggcgaacggtgggggggcaggggggggtgcggagggcgagccgaggcccggggcggcggggtcggggcgcggctggggactgggcgcggggacccgcggagctctcccgggcctcccgctcccggctcgcctccttaccctcggccccgagctgcagctctgcggcggcggcggcggcgattcccgggcccgaagcctggcgctcagggggcagtccttcctgtttgcctctccagcgagtggccccgcagcctcccctgcccgctgcctggcttcctgctcttaggagcctctcttcccagccccctcccacagcttgggcctcttccccctcctccctcccacctccagccgccaggtccccagccgcccgccaggcttgggcctgagtggcagaggcgcctgcagctgccaatcccaaaaatattctctgatgacacagctggaggacaagagcccagactggctccactggtctaagtatagagcaggcaggaccacctgcccccggccctagccccggttctagccccggttccagccctgcccccaagggctggccggccagcagctgcttattgaaaggggccccagaaggtctgaggggtgatgcactttgtctccctgacaaataacactttctggggctggccggctacagctcccaggctcctgtcccacctgatgtcacctctggatgtgtctgtgtgtgtgtgtgtgagagagtgtgtgtgtgtgagaatttgtgtgtgtgtgagtgtgtgtgtgagtgtgtgtgtgagtgtgtgtgtgtgtagggagaaggtgttgtatgtttgcatgtgtgagtcaggtcgcttgaggcgaaatccttcccagcccctcccccacatccctggcgggagtgggagataaggctcatggccacagacatctgcgtcagagataggaggtctcaatgccacgggcaggggcaactcggactgtggggcgtggaaaggactggggaagactggatgagaagggtagaagagggtgggtgtgggatggggaggggagagtggaaaggccctgggcagaccctggcagaaggggcacggggcagggtgtgagttccccactagcagggccaggtgagctatggtgctgcacctactgctcttcttgctgctgaccccacagggtgggcacagctgccaggggctggagctggcccgggaacttgttctggccaaggtgagggccctgttcttggatgccttggggccccccgcggtgaccagggaaggtggggaccctggagtcaggcggctgccccgaagacatgccctggggggcttcacacacaggggctctgagcccgaggaagaggaggatgtctcccaagccatccttttcccagccacaggtaacgagggtgggggaaccggcaggatgactttgagaaaaagcaaggcacagcatgggtttgcaggccaggcggacctgggtttgaatcctagtcctgctactcagttgctttgcagcaataggccagttactaaacttccttatgcttctgtctccccatctgtaaaatgggctaatgcccacctctcaggattaagtgagaggctgtacctagagtgcatggcaggtgggaggcatttgggaagtatgcgctgggagaccgggggtctctaaagatggagatatttgggcttgagccccttcctgccacctttcctcctatctctgcctctgctcgctgctccaaaccctgtttctttactcccaggtagctgacactgagaagctatcagagatacaggcaaaagattagttgggaaacttttctggaaaactagtctatcttctcttgagttcctgtctcaacatatatgtgcccccttgttccactgactgaatggataagccctcctgtgggtgggctttcttgtcatctggtccacctttctcttagagaggacccctgcctccctcacttcagtccgttcgcagcacagtggggagaaggatggctttgggatcaggcaaaatccaagcctggccacttagtcgttgaacgtcatttcacctctctaagcctcagtttccttatctgcaaaatggaccaattgtgactagataatgagagaagccatgtaacagtatagttccaattgccagtccatgaacgagtgctgctccaggatgattagtatagtctatgagtgtgtcagtgtgaggatgctaactacacattcttgaaaggactgccctctgttctgagttacagccctcctccttctcttccccctcttccttgttctccattttcttccctttcccacttgcctttccctccttcttcttttttttttttttttggtgtaaacctgtcttttaaaaatggaattattttaaagaat

SEQ ID NO: 2115 - DNA, 6000 bp, Homo sapiens
tgcgggttgcaaaaactgtgggcaaagcgtagtatttgggccagatagcacagtccctcagggcttcccttggctaggggagggagttccctgaccccttgtgcttcccaggtgaggtgacgccccaccctgcttctgctcaccctctgtgggctgcacccactgtctaaccagtcccattgagatgaaccaggtacctcagttggaaatgcagaaatcacccaccttctgcattagtctcgctgggagctgcagatcggagctgttcctattcggccatcttgccagatctcaaatttgtcgtttctaaaaactgaatttaattgttttttatttgtgggaatgagaagagggtagtattaagacctcaattccatggatcacatcaaatataaaattccagataaatgtgaaaatctaaatataagtgcaaatctatataaataatggaagaaaatgttgaatattttggtaaccttaatgtgagaaatgtctttttaaaaatgtattaccaaaataataaaggaaaagattaacagatttaaccacataagtgataacacatctatatgatgagatacattaagttaaaaatagactaggagaaattacttataacataaaaattgaaaaccataatctataaagagcatcagtaaatcagtatgaaggcaaacaattgagtataaaaacatgaaggaatatagatagagaaagcatagaagattacagatatcctgtaaatataaaaatattttttcccatagtggtcatgagaagtacaaattaaaataatgagatttcatttttagccaaacatgagcaaaagaaaatctggcgttgaagagggtgtgagggagtggatattcatatactatttttgtggggggttaaattgttaagcaacttgaaagcagttcattagtatttatcaaatactaaaaaaaaaaaattttgagacagggtctcattcttgcccagactggagtgcagtggtattatcatgtctcactataacctcgacctcccaggttcaagccatcctcccaccttagcctcatgagtagctgggactacaggctattttttaaatgtttggtagagagcagatcttgctatgttgaccaggctgattttgaattcttgggctcaagtgattttcttactttggtctcccaaagtgctgggattacaggcgtgagcaaccgtgcttggcgcaaatataaaatatttataactttgaggaagcaagtgcatttctagaaatttgcttttgaaaaacaggctttcgtgctcaaagtcagaaatgcatgtaccaacagaacattggatccagtctaaatctccacttgtgtcatgatagaacagtactatggaattccttgtagctttaatctctttttgctagctgaaaaatctgaagaaattaatagaaaaattcatgttatggtctcatttaacactaatactggtgtataggtggatgtgttcgtgtacgttcatgtatatgcatatacttgtattcatgtgtatatatagatgaataggaaaacattgcttttaaaaagtaatttaaatatacaattgattaccagagtgcaggtaaaatagtaatagtaaagataggcatccttatcttgttcctaactctaatagaaagatgtctagtatactaactactgttatgcttaactctctcattatatatacaaccttatgactttaggggcatttcattctgttcttaggcagctaagaattccccactataaggttttaggactgacttttataaaatacttttggtaatagttacctcttgggatgatctgtaatcttaaaataccacctaaggtatttctggttcattgaatatgattaagcaataactaaagtatgtaaataaatcacttttagcatgtatgtaataataaacatcttcattctaataatagcacctattttctgggattagcatttatactatttgaaatgtctaaagtaggtagatataaccagagattatttgaagaaaatgaatatgtgtaatcactgaaaatcacatttctctgaatccttgcctacctgacagttttttaggagaacagaactgttgctcaaagacttgtctagagagaatgactgactctccagatcagttactcgtataatctgaatatcaccatcttcatgcccactcttcataagctgcttttgagaaagagacagatagctgtatacagtgcatcaaagcaataaatcctagtgtcaagacttttactcaatcacatatcactatagacatgtagagactaaatcatataactgtacagtttccttgctgtcccactgacagaatagtgaatttaaaattacacagcattctttcctgagctgctttttctcccctagtattacactttattcataccattcacatcattattcataatacgcagtaaagattattacctgaacttcaaaacagattgcttgttgatatttatgtttaatgtaattccaggtttttttttttcttcatttggtcatagaagcatacatatggtcagtctggatggtaaattttgattgtatggtagaaggcctgagctcaggcttaccttccttttttctatgaaagaaattactaagcaaaagagtagtctggataaacttggatggaagattgtaaaatatttataaaattagcaattatatgttggttaacactttatttttacctaaatgttgaagcaggttcctgataatctctgctggataacatttttggattagccattgtatctcctgaaacaaaaaagtacatgtctttttaatattttataacttgaatcaccctttcctctcgtttgttcaaataatgagattttaatgatgtgtcatagtactcaagagaattcttttttgtgcattatttatttaatggaattacctctttttaactactgcttggtcagtttacttgctaattaactaactttaatctttcaaaaagtctaattatgttaatctgatgaaatttcaggaaattcagcaagagacagatatccctgaaagagagcttgttagagccctacagtccctcgcctgtggtaaaccaacacagcgggttcttacaaaagaacccaaatcaaaggaaatagaaaatggtcatatatttacagttaatgatcaattcacatccaaactacacagagtcaagattcaaacaggtatctggaattatatttttcctctcaaaaaattatatatttttctctttagaaaaaaaatctcatctattggatttcttttaaaaatactccttttctggtgctgcatgatacttaggcttaagaaagaaagcagcttttattgataagtatttgtatcaaaatgcatttgaatccaagtacagtaagcattttaaaaagtaatttatagtgtgaacaaagtatttcttttcatgtttttcaataaatagaatacagtttatgaacatattggtacttaaaattgtttttaagttgttaactaatagtcagtggaagtctaattttaaagctgatttagaagtttttcagaattgggagacctatataaaagtttgatgtttggatgttgctatttatattttgataaatattttttgtttcaaaatcttaaaacccatatcctctttaatttaaaaacatagaaatgatactgatgtgaatgatttttaatagagccatataagtcgataatgaaaattctattcattaaacatttaacataatgtaagatgcttgttttctgtgtatttaaaggggaaaaaaggcactccacccttgctgattgatgtttaaaactaattgtttactacttggcttaaaaactagtattagataggcttcctagtactaatatattcattacagccaaatatgtgtgcaataaaacagtgtcctaagataaataagatgatcttttaaatgactgtcatttgttgattttaaaaaaatgttatttatattgtatattatgatagtctttttaaaagtaatgttaaatatacagttgattaccagagtacatggattctagagctttatatgcacacttaaatttttgtttttcattttgatctttttgtttcgtatgtatactttgtagaacagagtagtgtctctggcaaggctttgccccctttgtcttgtagttgtaaactgtatcatagtaatctgcattagccaagattggcccatgtcttgacataaatatatattaagaataaaacaaaactgtgctagccagtgtcatggaataaaatttatttttcttccaatgcaagacataactactttatacatttgggcagatgcaggttttggattttagggctcatttgtatcctagaattagaggaaaatatgtgggaatatttatctggattgccttaccctcaccctactgtaccctaaataagtaactgtctttgttatcccagattctatcatgtccagcaataataatatcagatattagtattatgtttaaaaaagtcttcatagatttttagattttcgtgttaagtgtgcacacttatgtgtgtatctggagtatgtgtatgtagtgttttaggtatgttcaaaacagaaatatatatatgatgaatttcactagagcttaaaagttcttttcagcaataaaattctacaaagcaatgtttttttcttgggaatggtttttaaatgatcttggctcttactcatagtttaagtcaaaattttctctttggtggtaaatattgtgaccacattggttttactgtcaaaggctcagtaacataatcaaatattcgaagactcagaccctacctatttatgctgcttttactgtagccagtagtaaaagttcatgcaaagaagttaaaggaattactaaaataacacagcctttgaaaagaattagattaattgtaatctgggggggcagtttccagagttgacagtcttcaccaccaccaccaccaccaccaccacctgcctttctcaaattccatcccccagcgtgcatataggtcatatataggcacttgcacaacaaccccttctgctgcactcaagtgaggagtgttgtgttaggctccagagtgagcccctcccctcccatttaaaaagaatactcattttgactcatcagcacgatctgcacatccatgtttttctgcaggtatttaagaagacacttatttaggtgaccacatccagatgagccaaagggattgtttaaacaactacttttttccctgcaactttgtattttttgttttcaaatccacaaagaaagtgaaaagcactataatgaatatcaatatggctgtgacctacgtttaccagtcattagaattttgtcttcctccctgccttcctctgtgtgtgtgtatgtgtttgctacagcatttgaagttaatttacaaatatctcagtagtttccccctaaaaaactttagcacacgtctcctatatcatatccaagaaaattaatttcatgtcatctgtttaccacccatattgcctcagttgtctcaaaaatttcttttatatctcactttttggatccatgattccatcaagatttccacattacatttaatttttatgtctttttagtttcatttaaaccagtacctctatctttttattttttcatgacatcaacttctgaggaaaagcatcataagcatcattcttagtagattattttcatcgaattttttttttttttactaagatattgattatcttacacttgggaaatgacaccgaaagcagtatttttatccaaaggattctaattagaaacagttgaatggatacgcacaccagaatgatcttctaaattgtacaatctgctgtctcgtggctatctatgcccatgcctcagtcagcaatgccccatgtgctgctttgcaattttacggtttctacctccagaaacttcacatctatctccttt

SEQ ID NO: 2116 - DNA, 6000 bp, Homo sapiens
agtttccaccttaagatttttgtagactttcctttgggatttagttgtgacagggtgctgaaaatgcaaaaatatttgtgtcttccatattgacatacttagataaattagattggtttggggaacactgaagttacagaatggaaaaggaggaaggaggagtgcataaaagtaaagaacatttttgagataactaacatttgttttttatagctatttattttcctggggtaaaagaaaaattgtgacaagtatcctagaagaaattacaagttaaaagaacaataaccatatcctctattcttagtttctgatgctttgttttaaaactttgcctttaccacttatatggtattaggaaataaaaaacatggtactttgttctcctgcttcctagacgaaatctaagcaatattttatccacttctttttagtaaaagaaatacatattgcctgttggggtcatgagctatgtagggaatgaaaaaattttttaaaggagaattataaagagaaggaggatacaagagaaaggaaaacgaaagctggtgggaagttgagccatgtttatctctagtggaatccttaccttgtgttttaaaattgttaaatgtttgtatatatgagaaatccctgaaaagttatatgtaatttaaaaaaacaaaaaaaaaacaaaaaaaactagagaggcttcctttttaaaagactcttcagttaaaccttttttgtaaaagccaaaaaaaaaaaaaaaacagaagtcatctagtatatttgctgtgttttctaaaattgaggtccaagtcaggggttggcaagcttttttgttgttgaataaaatggcttgtgagccacgcagtcatagtgagaaaatagtcctagacaataacaaatgaataatcctgtgtttctataagactttatttatgggccctgaaacttgaatttcatataatttttatgtgtcactaaatagcattctttacagtttttcctcagccattaaaaatgtgaaaaccatccttagttcatgagctgtacataaatagatggcaggctgtatttgccccacgggttctaattcgatgacccttctctaagtggtctctggtagactgggactttatgcaaagcatttgccctgcttaaacaaaatgagtattgataaattatgtaatgtactgtttaggtattgaatgaatgctttcttacctaccttaggggataggaaatgtttgatggagaggttgttgggcatacctgaattacagcatctctgtaacctgtgtggagatgtatgtaaaaggtgtcaggtatgcctatcatggcgagcacttacgtgaatgaaggaataccataatagtactcaccagagttctcctttatttagtaccttaggtttccaacaacacagtagctatctgtgattctaaattaaattttaaaatcctgcttttgtccaggcagggtggcaaacgcctgtaatctcagtatttttgggaggctgaagcaggtggatcgcttgagctcaggagtttaagaccaacctgggcaaattggtgaaaccctgtctctatgaaaaatacaaaaattagctgggcatgatggcacatgcctagtcccagccacttgggaggttgaggtgagaggatcatttgaatctggctggggaggtcaaggctgcagtgaaccaagatgatgccactgcactccagcctgggctacagagggagatcctgtcttaagaaaaaaaaggtgggggggttaatttttctgagcttccgctagaaacctggtggcaaaatatcctaattgtggtaggccctgctcttggaaaaaatgttgctcttgttgagaatatagcagagccaacttcaccattatgaagccaaattctcataaatcagaaaatgaaaaacagttttctcactgtgaatggaggataaattggattgattattagatgcagatagcactatgaaatgaagttcagaggtatctttttttttttttgagacgaagtcttgctctgtcgcccaggctggagtgcagtggtgggatctcagctcactgcaagctctgcctcccaggttcatgccattctcctgcctcagcctcatgagtagctgggactgcaggctcccgccaccacgcccggctaattttttgtatttttattaaagacaggggggtttcaccgtgttagccagggtggtctcgatatcctgaccttgtgatccgcccgtctcagcctcccaaagtgttgggattacaggcgtgagccaccgtgtctcgccagtatcttattattttattaagtgtatgtagaaataatgatatttaatttttgcatgccaaattattttcatttacttttacattccctttaccccaacatttaaatacaatgaaattgtagtaatttatgtacaactaaatacacaacatgtaatatctaagcaaaacttacaacaacataggattgaaatagacaagttgtgaaccattttgttagaagtatttggtgtgccacatttactgtagtatgtgtccatagattgttgcatttgtaatacctgttctaaatatgggaaacttggttgtaatttatgctaagtatgtgagaagctataaaattgccatgtgtaggttactatgggcatatattattaatggaaactaactaaaatttgctgctgaaagtcactgaaataaagtttagtaaaactttgtaaatcttgctttgaaatattttaaaaatgtatacaactttaagctctaaactactcttagaactgtagaccaaggtaggcaaattagggcctgcctggtgcactaccagttttgttaaaaaaaaaaaaaaaatcaagagtatttacacatgaaaatttatataaattttcagggtccatgaagttttatttgaaacatagtcacactgaataatttatgtattatctgtggctactttcttgctacagcgtcagagtagttgagtcagagctctatggctcacattttaaaatatttattatctgatactttacagaaaaaacattggtcagcctctgatctagaaactcttaatgccattttaaaaagttattgattgtaaaacttttaaaattatcattgtaaagttctgacactgtgttctcccagtaagttgttattgcaaagaaacactagacatatgggaaaactgtattttaaaatctgtattttagtcttgtgaaaaatgatattaaaaaatggataggatccagagttttcattctaaatttaaaaagtatagtgagatagaccaaattttgaagtacagatattggcttaggatgctacctgggaaacattagggattgctctcaggaaaatattgaagaagtggtatttatattatacatttcataaaaactttacctgaggtgtaatgaagtaaatcctagtatagttcatttgatttgttttcatgattatcagttaaacctttggaaatacccataagacttaaactggctttaaaatttcttcctcattacagggactaccaattacctcttaattagtgaccctttttgtagacgttttgtagtgtcattaggtctgcattagagttatgtaggataaagtatttatgaactcaaaactgcagttgccatgtttttgtgacattacttgtttattatggtttttgacatctcttccatgtaaatttaaatttgctaggacatttaattgatggtttcaaagcatctcatctaaaagttgtgttttataaattacaataataaccattaactagcctacttcttcatgttttcatatcaatatatgtatatttttaatagtcatgtggtcagcaaatgggggtaatggagaaataagcttctctcagtattatagcgtgaacagagattcgtgtttttttctttaatctttaatgtagccaatttgtgttttctgatttgtagaccttggttgcatgtacaagttatttagtcgtgtgccaaatggtttgaaaacaatgtgtgagtgtatgagttcctatttgagggagcaaggtaaagctcttgtttctgaagaaggagaaggaaagaatcctgttgactatatccaggtaagtaaacccagaagattctctgtgtttatgataaaggcattttgacaagtgctaaaaaggccacttttaccatgctgtgtattgtgtactttcaacttaattgtcccagtagtaaattaatatttgtaattatcctacatattttaggattttgcaaggtgtgcgtatttatatcagggagctaaaattcagctgctacttttcatttaacttctttgatgaagaccttgtttaaatagcctcaatagtgaatgtgaggttctttggtatgccttagtgtttgtatactgtagtatattggaaaaaacaactggtttaagtattttttgtttgaaaatgttttgttttcaaggagtactatgaataaattatgtgccatgttttgtgttttaacataatcagctttttttggtacattttttaagctaatttttttcactggctaacccattccatcaagacaggagaatgagaaacagtgaggaggttctttggttcgtttgcattgtattaatacatatatggaagttataatacttctctcattgacatttttaatagaggcttagatataggcttgaaaataatatcaaaactgtaagtttaaaaatgaatatacatgtttattaccagcaaagttaagataaacatacatggtcataagtgtattatttatggaaaaattattataatgtgtcctaaattttgtttttatttctaagggcttattggatctgaagagtaggttcgatcgcttcctcctggaatcattcaacaatgaccgtctctttaaacaaactattgcgggtgactttgagtattttctcaacctcaactccaggtctcctgaatacctctcattatttattgatgataagctgaaaaagggagtcaaaggggtaagtagtaatgcatttgaaaataacatttaattttatttaaagatataaaattatatgtaaaattaggacatttcacagataaaaattaagcatgacccattgctgtgcttaaatgggtgccatggtctattaaaaaatattgtttgaaatacttgacatgcccaaacgtagttagacatttcacttaatgtgtaattggcttcaaaaacaagcaactggatgggcttggtggctcatgcctataatcccagcatttggggaggccaagacaggaggctctcttgaggccaggagtttgaaattagccttgttaacttagtgagactccatctctacaaaaaaaaagaaaaaagaaaaaaattagtggcacacagtggtatacacctgttgtcccagaagctgaggcagaggatcacttgagctcaggagttcaaggctgcagtgagctgtgatcgcgtgactgcactctatgctgggcgacagagcaagaccttgtctcaaaaaaactgaacaactgtccaggtatggtggctcatgcctgtaatctcagcactttgggaggccgaggtgggcagaccacctgaggttgggagtttgagaccagcctgaccaacttggtgaaaccccatctctactaaaaatacaaaattagctgggcatggtggtggatgcctgtaatcccagctactcaggaggctgaggcaggagaatcacttgaacccaggaggcggaggttgcagtgagccaagatgacgccactgcactccagctggggcaacaatagcgaaactccgtctcaaaaaaaaaaaaaaaactgaacaactacacagctgtagttggtaaacagtcatttttatgactgagagttaggcatgctgaagataaagaactagaaaactttctagtagagagtgttgtttgctctcatctggttctgaaggttatatgtcaaacaataattggatgccaagaatattaagg

SEQ ID NO: 2117 - DNA, 6000 bp, Homo sapiens
ctataatgaaattttagggttatcaagtttttcttaatattatatgtcatttaattatcatcacacatcttgacagtctcaagttgaaagacaaaggcttagctcttacaccacagtaacccatggctttaaacattctgtgttctgcctacaccttccagcttcaggttgattttgtctcttacccgaaatgcttgtgaccataagtgttttcagattttgcattttggggggattttggaatatttgcatatacataatgagagattgtggggatggaacccatgtgctaaacataaaattcatttatgttttatatacaccttatatacatagcccaaaggtaattttgtacaatattttaagtaatttgtacatgaaataaagttttggctgcaacccgatgcatgaggtcagttgtggaatttacttgtggcatcatgttgatgctcagagtttcagagtttggagaattttagatgtcagatttttggattggggtgctccaaactatgtattctgatcacatgccttggcttcctttactgaagcatcattttcctctatacacagcattcctgaagaattcatcagttctgactgatgtctttctgcctttttgccagagggcttaagatagcagacattgtaggccataaggtaatagatttacctcctttagtagcgataccatcactatgcttaaagttgggacaggggaaatccaagccatgggagaccgatagcaaatagaaggggaagaagtagtgaagtgtacatttatttgatcctgcatgtatattattttttggtgagaggattttcataggaaatgatattaatgttttagagattatctttaccagccatttgttttactgagggccacaatgaataagtgacttaaggtcacatagccagttaacagtagagccaggatcatataaagaattcctaacttcacatcaaatattattcttactattagaggttttttattaaaaaatttaccataagtgatagatcccccttagaaaagtttgataatttccatacagcccagtaattcctctcttagaatccacccaagaaaaatgaaagcatatgtccacaaaaatattgtacccaaatgtttatagccaccttatttgtaatagacaaaaaatggaaacaacccaaagtatccatcagcttatagataagcaaaatgtggtgtatccatgcaatggagtgctgtttagccctaaacagaaggaaatactgttgtatgttacaacattaataaaccttacaaactttatgcttaatgaaggaaatcagacaccaaagattacatattacaggataattatatgaaatgaccacaaaaggaaatttacagagactgaaagcagaagtgaacaaaggacttgtcagaattgccagtactttctattctagctgcaaatcccgataaaaggttctctcactactgttaggctacttttccagtataatcttccatattcttcacttaccagttgaactttgtgcttattgaagttctgttgtatttttcaaacctgtgtattcgaattgtacttattattaatatataattaatattgtgtaaattgataaaatcttgtgaaaaaaataaaattttttatttggcaagctagattggatgctttggaaagacttcataaaagcaaatggctacatactggtttgaattaagtgtaggtaatttaagacattagagtgaaaatagtaaaaaaaaatctagaaggattttacattcagattacttcacaaatgcctctagttcatgcttcaccttaatgaaactgagctaggaatgctagacaatttattatgtatgagtgtttataagtacactatttgttttctttttgaaatggggtcttgctgtgtcatccaggctggagtacaggggctggctcattgcagcctctgtctactgggttgaactgattgttctgcctcagcctcccgagtagctgggactacaggcgcgcaccaacatgcctggccaatttttgtatttttagtagagacagggtttcaccatattggccaggctggtctcaaactcctgacctcaagtgatccgactgcttcggcctcccaaagtgctgggattacaggcgtgagccaccgcacctggcctgtatgtatacaatattgagcttcagtcacaggactcattttcaaagaaagtcctgatgtctgaatgaacgtttatatttttaaattaaaatgttcaggatgcaaatgtgtgtatatgtttaatagtttccctgttttactacctgtctttagccattcagatagtgtttttgatcacattggttaaaaggtattctcctgtctctggtgcttttctgtacaatatatacttatatgtagaacttagaaaaatcaaatgtgtaaaatagtttaagcaataatagtgattatttttataataaaagggattcttgttggtttttgaattattaaatttatgctagtttttattatgtacatattgttctgtgctgagaagtaaaacacgattagttatgacagtaggaaaaggttgggcctggaggtcatgtgagatgaaagaggaggtttacaggcggtggctcacacctgtaatcccagcactttgggaggccgaggtgggtggatcacgaggttaggagatggagaccatcctggcccacatggtgaaaccccgtctctactaaaaatacaaaaattagccaggcatggtggcgggtgcctgtaatcccagctacttgggcggctgaggcaggagaatcacttgaacctgggaggtagagattgcagtgagccgagatcacaccactgcactccagcctggtgatagagtgagacttcctctcaaaaaaaacaaaaaacaaaaaacagtgttagccatcaaaagcaaggagggaggctgggctcagaggctcgcgcctgtaatcccagcattttgggaggccaaggcgggcagatcacaaggtcaagagatcgagaccatcctggccaacatggtgaaaccctgtctctactaaacatacaaaaattagctgggtgtggtggcaggcgcctgtagtcccaggtactcacgaggctgaggcaggagaatcgcttaaactcgggaggcagagttcacagtgagccaaggtcacgccactgcactccagcctggtgacagagcgacaccccatatcaaaaaaaaaaaaaaaaagcaaacaaaaaaggagggacgtggtcagagggaaacttggaatttaagatcttgaggatggaagtgtgaagtccaagaagttcaaagtcatcaataagcattttgaactcatcaaaattgatgttaagatttcaaaaatgtgatgtgagcttgtgctgagattatatagaatgtagaaatgtgagcactgaagaagataatataaaaaatagctttccttgttattaggtgttaaaccatcatacaagatgaatgaaaggagaaggttggaggaatgatgtcatatgaagcaagaactgcacgtggagaatttaattaaaattgtttggggccgggcatggtggctcacgcctgtaatcccagcactttgggaggccaaggtgggcagatcacttgaggtcaggactttcgagaccaggccaactgatgaaaccccgtctccacaaaaaaataaaaagattagccaggcatgatggtatatgcctgtaatgtcaactactcagaaggctgaggcagaattgctggaacccaggaggaagaggttgcagtgagccgagatggcaccactgtactccagcccagacaacagagtgaatgagactccatctcaaaaaaaaaaaaaagtttggaaagttgattagtattattctggttacattgttaatatggtagagctctgttcatgttcaccttatcgttagctataacctgtagattcatgttcaagaatctggtgaaagatatgggctttctttccaaagtacttaagcgtgaacaaacatataacttaataattttagaaggctcacagacccaccaaagcccagagagatccttgctgagacgagaaaggaattacattactaatccttctgtgcattacaaaaaacagtagttttatttcagtgtattttgctatcaatatggattttcaaggaatgcacaacacttctggattatctgtgctttataaactgagatatctgtaatcatgttggtaagaacttgaaagtaataatctgtttgaagtgacagtaagtagaggtgttttaattatgtaatacttaatgctgctctattttatgcattaaagccttttaaatatttatcagtaacaatcaatctaagttgtataaatccgtactttattcaactctcagttttacttcaaagaatatgatcttcaactacagtatttaagaacgaaccatgtttgagtatgctgtagctttggggagaaagtgtgctaccttactatttacctttttttactctgtttttttcttcctggctatgatgcttactttttaccctttttctttaggtaaatgggccaccatttatagccattgtcaattgtaaaaacttaactttatataacttgagaggtgctggaaagttgcacattgcttaagatcatttgaagtgtttctcacctgaaaaatgattgcttttggaattttatttcctttatttgttattgtagcacacaataattattatgctcacaagaactgtactcatatttatatgactttaactgtaggaccgtgtgtatgtacaacaaaataatgtggagaacgtctacaatttgggattaattatttttcgagatcaagttgtacgttatgggtgtattagggatcatctacggcaaactctattggatatgattgcaagagagcggaaaggagaagtcgtagacaggtaaaatttctctctttactcttgtggttttggttttagtgattatatcttgagaacgattcactgtcttagttttattaaaataaataaaagtttgaatgttgagcacattgggaaaatcctcagaaacttagtatcagagttaacagttacccaaaatttaatttgaaagcacacatcttttatatttttagaagagactatcctaagcttttatttaatatgcttttcagctagccgtcacttttggcttttcatttatttttcatgccagcatttttttctttttttctgtgtaataacatttgtatttttttttctttaagggcttttgtctgtccttcattcctaacatttttgaagaaaactattgaacatagtctaaaatgactaagaactcctgtgccccttttaagtcagatttcatcccccttcataacaatgattgcagtgtcattttggtgatgctgcagctaaagtggcttgaaatgcatgattttttttctctccttatctgttttcagaacagctgttggatgaaaacgtgtaaagttctttttatttcgtctttggtgcttgatcagcattgtccaaaatccatgtagtgcaaaaagttatattgcccaggagtagctgtatattggacccatgtctggcagtacagcttaatctgcctatctccctctctcccttcttccagataaacagcctctctgtgttttcaaatacatagaaatatttagacattttagagtaagaacaccttgagagaaatagctgtgcagtcaagatatgctttccaacttaaaattaggctaaatcctttcgttttacatgagtggcctattggagattggtcacttcagtaagagttaaatgtcctgaagatatttttacctactcctttttgtaatttttatgtgaatttttaaatgtaatttaattatcaagtgataataacttttttcgacagaggcgcaataagaaatgcttgccagatgttaatgattttaggtctcgaaggaagatcagtctatgaagaagatttt

SEQ ID NO: 2118 - DNA, 6000 bp, Homo sapiens
ttatagactatcaccacattcccatataaacgaaaatacactacagtttatttagtgtatagttaagtaaatacagtttacactataaaatatcacggaagaactgagaaggagttgttaactttgcttgaggagttcagtgaaggattcctagaggttatgacacctagctgtgttcagaagatatgtgtaaagaatcagataaagaaaaggcaaagcaaaggaggaccaaaagcaggggggaaaaaagacatgggaactgaaataagtggggaggggctgtgacagtgatggaaatagagtgagaaacagcaagttgtatatttaagaattcccattggtttaatgttgttgggaaatacatgtcagacaggtgtggataagtgagcataaactaggtctgtgcctactatgctaccatagaaaggttttgaacagggtcatggtgtgcctatgtttattttgattgtgattttgagggaagtagattccatgaggttggagttcatagtgtttggaaggctcttgcagtgaactaggtgaaaggtttttttttttttgagacagagtctcactctgttgcccaggctggagtgcagtggcacaatctcggcttactgcaacctctgcctcctgggttcacgccattctcctgcctcagcctcccgagtagctgggacgacaggcgcccaccaccacacccggctaatttttttgtatttttagtagggatggggtttcaccgtgttagccaggatgatctggatctcctggcttggtgatccgcccacctcttcctcccaaggtgctgggattacaggcgtgagccaccgtgcccggccgaagcctagaagttttaacaccaccctgggcaacaaagcaagacccccatctctacaaaaaaaattaaaaatattagccacgcatggtggcacacaacggtagtcccagctgctcaggaggctgagacggaaggatcccttgaacctgggagtttgaggcggcagtgagctatgattgcacctctgcactccagccttggtgacagaagaagaccctgtctaaaacaaaaacgaaaacaaagagaaaaacaccttgtgactaatcatcttcgtgtgagcagtttctctctgtagtgtagtaaaaagttttcttttgcggttttcacatatttttcattatgtttagtggaaaactgtaaacctggaataacacgatggaacccattcgacgtgcccccagtgaacctggaagtgctcccaaaaagcagagaaaagtcatgacgttacaagaaattgttgaattgcttgatgtgtactagattaagttctgcagctgtggttacctgccatttcaaggtaaatgaagccaggaccattgttaaaaggaagtttgtgaagccatcgctacacctgtgccagctggtgcaaaaaccttgtgctttttgcaaaatacttttttatctcatattgaatatgcagcttgtatgtgggtgcaggattgctgtaagaaaagtatacctactgattctaatatgatttaagaaaagcaaagtcattatatgacaaagtcaaaggaaggtgaaggatctaaagctggagaatataatgccagcaaaggatggtttgatacttttagaaagaagtttggcttaaaaaatgtcaaggtaataggagaagcagcttctgccattgaagaggcagcagacaagttcccagacaccatcaagaaaatcattggagacaaaggatctgtctaaacaggtttttgatgtagacaaaagtgccctattctggaaaaaagtgccacaaaggatattgactagtaaaggagagaagcacatactagggtgtacaaggcaggaagggataagctaactctgctgttctgtgcaagtgcagtcaggtttttgatcatggctgactttatctataaatctactaacccctgagccttgaagagaaaagataaacactagctgccagtcttttggttgttcaaaaaggcctggcctggacagtgagaactctttttccggattggttccatcagtgctttgtccctgacgtcaggaagtaccttgtcagtaagggattgccttttagtattttttctactggacaatgcacctagccacccagaatctcatgagttcttcaaaactgaaggtgttgaagtggtatccttgaccttaaagtgtttttaattcagcctgtagatggggaaggtggggggtcaataaggacctttaaggctctttaaacgcagcagtagtaatctatggaaaagattgtcattgctatggaagagaacctcaatagagggaacatgatgaaagtctggaagggttacaccattgaagatgccatcattgttaaaaagccataaaagccatctagcctgaaatgatacattattgctgtagaaaactgtgtccagatgttgtacatgacttcccaagatttacaacagagccagtcagaatcacgaaagactgtggtaaagtgaggagtgaagggtttcaggatatggatcttgaagaaattcaagagctaatggacatcacaccggaagatgacttgatggagatgagcgcttctgaaccagtgacagatgatgaggaagatgtagaagaagcagtgccaaaaaccaagttgacattagagaatctggcaggaggtttctgatactcaagaatgctttgacttttacgacatggactgttttatgatgtgggcactgaaacttaaaacaaacagtggcaaaagatttgggaacagatagaaacatttttagaggaatgaaaaagcagaaaagtcaggcaaattacaatgtgtttttgtgaagttacagagtatggctccctctcctgcctccctttctacctctccctcctccatctcttgtgcctgtgccacccctaagacaccaactacttctcttcctcctacacctcagcctactgaatgtgaagaccagaaggatggggacctttatgacaatccacttccacttattgaataccaaatacattttctttttcttacaatgttcttaatattttttctctttattctaagaatacggtgtgtaatacatgtaacatacaaaacaggtgttaatagactgtttatgttattggtaaagctttgggtcgacagtaagctattagtagttgggggacttaaaagttatacacagtattttgactgctcaggaggtcagtttttcctaactctcacatggttcagtggtcagctgtattcgggatgaaaaaatgggaacatatttgagaaataccttggggttaatgtcagtagtacttgatgattggataagaaggagatgagagataagaaaaaatataaggcttatgtttctagcttgtataattaggtagtttatattgccacaactgaattagagattacaggaagaaggtttgggcaggtttggatggtgagttgtcagggatttttgacatgataagtttgatctgtgtctggagcttttgattggagatgtgtagcaggtggttgaaacaagagttttagactttgtggggaagatctgggcaggcagtatagatttgggagccactaatgtaaatgccagtacagaagtccccaccccatccacagggaatctgtttattccaagacccccagtggatacttgaaaccatatagccctgagccctatatgtactgttttttcctatgacgtttaatttacaatttagaaacaataagagattagcaacaacaataataaagtaaaacaattataactatattgtaataaaagaacatgaatgtggtctctcaaaatatcttgtactgtacttaacccttgtgatggtatgagatgatacactgcctatgtgatgagatgaagtaaggtgaatgatagtggccatacttctgtagttttgagttgcgacagcaaaactagtgcagattctttttccttctccacagtttcgtggatagaagaagatgtgttcttttcttttctgagacagagtcttgctctgttgcccaggctggagtacagtgccacaatgtcagctcagtgcagcctccacctgggttcaagtgattcttgtgccctagcctcccaagtagctgagattacaggtgtgtgccactgcactcatctaatttttatatttttagtagagatggagtttcatcatgttggccaggctggtcttgaacttgtggcctcaagtgaactgtccacctgggcctcccaaagtgctgggattacaggtgtgagccaccaccctggcgagaagatttattcttaacatagatcttagcaatctcagcatacctttttttttccttattaagtagagaactttcaccttttcacttaaaggaagcactttattgcttctctttggcatttctgaattgtcagcatcactacttttgtggtttggggacagtattaagtaagataaacattgcctggacataagcattgtgattttgatctgataaaccagatggctgttaagttaccaagtttttaatgggtgtggggtgtgtaacatagtgtggaaatgctggacaaagatgtaattcaggattcacatcctgagtgggatggcatgagatttcatcatactacataaaatggcatgcaatttaaagtttatgaattgatatttctggaattttttatttaatattttcaggcagtggttggttgctagtaacttaaaccaaggaaggtgaaactgtagataggaggactgttgtagtttatcttctttaagatatggacaaacttaggaaatctgatagaaattagggacctactctccagaaaagaagtgcacacacagtatacttggaaagttttgtttattgttttaggaacctctggaatccctcttaagttttagaaccctgcatgtacggataatagatgtaaccatgacaatgaatgaaaatacatagagacccagtagagagtgacaagagccaaggacagagttctcagggtgaaaatgatttaaatggctctggaaaagtagtatacaagagatgtaggggaataatgttttctaaaagaaagctacgttatactgaggtgcatttatcatagtgttattcttaaggtgcctttgttttagctcatatctgtatatttgctaagcttgaaaaagctatatttctttctgacatttatttgatgactgtcgatgagcgttcaagagattctatcattgggcactttcctttgttgatgcatgagggattatactgtgctctgggctgtgttaaatctactgacgttctcatttaatcttcatgacagccctttgagatagatgctgttattgaacccaggacttaattttctcaaggtcacatggcttgtgagtaacaaagctgtggcacaaacctaaggctgtctgacagcaaaacccatgttctctaccagtatactaactatgtttaccaagataatcagtgactgtgatgttactttaccatattagcacaatggaatgtgacattagtccactgatttggactaggttttgggatatataagttctaatcccagctctatgattttgggtaagtcatttaatctctctgggtctatttttcattgtcgtcgtctttttttttttttttttgagacaaagtcttgctctgttgcctaggctggagtgggctggcgcgatctcgccttacttcagcctctacctcccgggttcaagcgattttcctgccttagcttcccctgtagctgggattacaggcacgcaccaccacatccggctattttttgtatttttagtagggatggggtttcaccatgttggctaggctggtctcgaactcccaacctcaagtgatctgtccaccttggcttcccaaagtggtgggattacaggcgggagccactgtgcctggctcttcttctcatttgttagaaaaatttttaaccttagctatcaccagaaggaacatt

SEQ ID NO: 2119 - DNA, 6000 bp, Homo sapiens
tagtctcttaaaggttcttttctttacgagggctccttctctcagattctgatttctaccagttctagatataagagttaagaatatagttttattacgaactgaagacaaagagcttattaaagaagtttaaagataatgccattgccgggcgcggtgactcacatctgtaatcccagcattttgggaggccgaggtgggtggatcacgaagtcaggagttcgagaccagcctggccagcatggtgaaaccacatctctactaaaaatacaaaaaaaggagccagacatggtggtgggcgcctgtaatcccagctacttgggaggctgaggcaggagaattgcttgaacccagcaggcagaggttgcagtgagctgaggtcccaccactgcactccagcctgggcaaaagagcgagactccgtttcaaaaaacaaaaaaaagataatgccattttattacatttgtccactgtagtatttataattcatacaattactaaatctaacataaaatttagaccattatttttatagctcttttggcacaatgctttatctcaactccaaaattaacttacttcacaaagacagagctgatgagttacaaacttcaacatatattttacttgtcatgaatgaaagcaatacatactcataactgtcccctagaggtttcttgatacatttactgttacaatggtattaataagaagaaattctttttctttgaaataagattacatagaagccatgcctatatttttaaattgagaatctatattatgttcaattgggttagttggttgtatagatatttttatttacaaaatgttaatttattgggtacatgtggaataaacagactgtccaagccaaccagaacatttccagagctgccagggagatgattttcttttgtatgaccatatgatgaaatactgagatggatttttatgatataatcagacatttaacattttttagtttaagatgtaacgtctcatatgcttatgtgtctcatatgcttcttgtctcaataatataagaaaaattttaaggacacagtagaaaagttgcatggagaaggcctacagttttcacatatttaagcatctgtggttatgttctcaatggggtatttgccgacaatgtcatcttataatgcacatacacatgctactaccctaaatatatacaactccatatctaatggcctataatacttattagttgcctggtagagacaagaaagtagaagatctagcccttccattccaagagctgataatatctatacatctttgccttccaacttaaaaacattttctctctcttaacatagtcttggtctactcaaaaccattgaacgggtctttcaaattgaaattgtaggctttgagctgttttaacaaccaatatctgtacaataaaatcagcagatctgaaacattgattaaagtgacttggtatcccgagtacctagaaactgatggtcaagaagaggctattacttccttttaccagctcctcacatcttatattgctctttcacagactgggatgtagaaaaggggctggcccacccaactgcctgatctctctgaatgcatgtgctccatatgcataaatggaaagaataaatggaaatgaggccactgttttcctgtgtcaggacactgtcagcatgagtaggaataccaatcgccagccatgcaagatctagtgagttcctattccagtgctgctttctctgctagatcaggtggcagtttgcagaaaagcaacatcctgaaagtttatttgctatttgcaagtcagggaatatgactgggcacagaaaaataatctactgctgcttcagaaagtatttcatagacattctgaggatgttgcttccacaggaaggaaaatatctgatttcagaactgaagcatatacaaagttggggccaaatccaatatgggtctgtggtttacaaactgtgagatgtgaaaaaggatgtgatggcaggtcccatctgtctcattcaccctagttcctgacatacagtagccattcaataataattattgaataaatgaataactgaacaaataaatgagcagacttcttaatgacaaaatcattttgaagcatttttctgatccttggtggttaaaagcttaagggaagacacagttcacagtgatgcttttagacgcagctaaattttggttaagcaacaccaatatacgaaaatctgggttcacaaagcaaatacattacagttactatacttactatatgctttacaattaagtagaaacataccttaatgtagtgggtttctaaatgctggcccatgatgtctccttaggttcacagtgaaataagaaaaattcgtgtgacgtattgttcattacgaggctgttcaattcaaggaactgtcctttattcaaaaatggatcttccctcatttctgaggttaaaatactttttaataaatgatgggaataatctatgctagttgttcctttttaatacccttgccaatataaagttgccaaatctataatgactccctagcttatcagaaaatattttattagtctgagagatccaaatgtcggagactggcttagtttcaaaatatgactcattttataaaagcatacaagtgttttttgttgttgttgtttagaaacctacctattgaataaaggaagtagtataaccttggctttaatgcccatgttaataacagccaacaggtggtaagttgctgctccatgcccagttctcagggctctttaaaacgtattcatctatttaaatttcacggtagcccaaggaggaagtattgttattgtctcccttttacagatgagaaattctggggattgtcaactccatgccccaaaagatgcaaaacacagctagtaaagtggcagaattgagattcaaacaatggctccaagaacacatattcttttttaaaatatttttttatttctttttttggttcctcagagatccctattctgaacatatattcttacattacaaagaaactgggccatatgagagtacaaccaagagaaaaacattgtttgttattatattatgttatggaaatggaggttcaattagcatagagattataaactcctattcaaggctgacattatcttacattgaagtcagagcctctcccaatcttagtttatcaactcagttcttgataacctatttttagcttcagtatttacagatattgtcttaagcaacattcttgtttcttaagctcctgctttaattagccaataccaaaaaactcccacaaaaaaaaaaaaaaaacaagaaaatatggtatttgcagtggggcgttttaagcaagaaggggctttaagcacaacactcataagcttagtcatcaggattaagttaatttagggcaaattcaaccttacagtcaacaaataagtgtatttcactttatattgtttgctatttaaaagtattaaaattccagcttctaaatgtagatatccatcccccaaacatatgcttctttaaaataggaagaacacaaactttaataagaactcacgtattcccttgcagagtcagaaacccaaacataacagcaattgggcaagtaggtaaatgaggaagtacaattcataacaaatggacagcaaaaccgataagtcaaattagacattttgactataaagcgaccaaacgcctctcctccaaaaccaaaagccaaaaccttttcaaatatacagcaactgaatcagacggtaattttggctttaaaaatctacaatactcttggtaatggtagaaatgatttatccggtaggttaaagataggtttctatcattccacttaacattatttaccaaatgctgcatttcattaatggagctgtcagtttattctgatggtaatgaaaaacaggttttaacatgaataagccctgggtccaccagaaaatatcagtgaatcaagaggtcccgaagcttatgcagtttaagggaacttcgtagattaaatttccaccttccagtcctgagagctgtggtgtgcacacccagtccgaataccttgttgagcatacaggacactaatttccgacactgcagctaactcctgcacaaactcttcaagttgcaggcttctactcaagtacccatccctagtccacatgccctagaaaaacacaggaaccagttcgggacgtagttacacatctagcaccccacgctcctcctcaagactatcctcctgctgtcccagcccagtggggcccagcccactaccatcccgctcccgctctccgaacttcccccctcccactccccaccatgtgaccaggaccctcccaaccgccgctccgagctccaccaatcagcaaccacctccacccagaacccgggacctggcgctccactttcaaaaaggcagcttaatcctcccgccctcagccacgccccctttccgcttccccgccccgccggcccctcccacttccttcagttccctgttcccctcctcccctccggtggcgcccaccctctcccgggcttcgccccgcccaccaggggggcagcgcgctcgccctcttctcgcgagatctgagcgtcccccgcggcggccgccgggctccccctcccgtcctcccacctccctcccccggcatctctcactctccggctctcctccctccctcctcccccctccaccctctgggccggatctcgtctcgctcaggcggaggaggagaaggaggaggaggaggacgacgttcggcctgcgcagtgagatgtttgtccgtcgccgccgccgccgccatcgcggaggagcgcgataaagggagccgagccggacgtgagggggaccccgcggagccgccgcgccagcgcagccccccagccgcatcggagtcgccagagtccgagccgccgccgccgccgccgccgcccccgccgccgccgcggctgcccaggggccggccagctccccagccctgcccgggggtcgcgccgccgccgcccccagcgtcgcccctagcctgcctgcccgccttaaatgtgacaccggcgtcgcggagcgcgacctgaagccgccgccggggaggggacgagcaccatgtcgaatctgagcaaaggcacgggcagccggaaggacaccaagatgcggatccgggcctttccggtgagtctctcctcggcgtccgggaccccggggccgggggccgggccgagagccgcacgcgaggcccgggctgaagtcccccaacaggccgcaggcccggcctcccctcccccacgcccgccggccgcggggcgcgagccttcccggcaaccgggcggcgcggggccccggcgcggccgccctcccgggccgttccccgcgccgggagcccgggcctggcgccgcgcccccgtccgggagctgctccttcagccgctccgcgggcgtcggctgcggccggggcccctcggccgccccacgcctccccacgttgccggggttgtaggcccagtctccggcgctgctagcagccgcggagtcctccctgtgtggggcgtgtgtggaacttttcacgtggggtttcgctacactttgaaaatttacccagcctagcttttagggtgatgaaggggctgccctctctctctgcccccctccccaggaaggtctatgccatcaacctgcccccgacgcagtgacagtggttccacggaatgctccgtggtcataaactagtaacattgggtgtatttatagcgtctttcatcctacaagcttcctaagcactttacaaactcttgtgcaggattgcctcgccactcggaggaaggccgggtgggggggaagcaacagagagcaaaccggccaattggttctccatttctcagccttgggagcccaaagaatgagtgtagtcgccttgcggagtagctttgtttcatcgctttcagtgacagcaaacgtgttctgctcagaa

SEQ ID NO: 2120 - DNA, 6000 bp, Homo sapiens
aacaacaatgacataatcaagaaaatgagccctctgcattatcaggttctccttacacttggaaaatatgagcaaagcttgcatagaagtacaatgcatgatcatgtaagagaagaagatgattcaacagagaggaggatgctaggaattgccccaccacacaggcagagcattagttgtggtagaaacaaagcaaagctttccagaataaaaccactgataactcagcgtttatttttcaagagaaatgggtaggaattacattgaagtaatatcttcctccatagtctgttaattagatgatctgaataaagatacttcataatattcccttgcatttctaaaatgtttataagttttaactttcattttcaaaagatttaatttgattatgggagataagatacggtatattttattatcatcactgggggaaaaaaatagcaaaatttgaagtccagacaaaaatttgcccaaattctaactgatgaacacataaatatttctcatttagtgctagaatcacctcaatttcagcagaccatagtgagggggttgagggactctaattcagaagcaaaatgagtgttaacagttttcatttagagttgtttcttttttagaattcagtctcttgccacctttccccagtttcatattcagcgggtctgagttgaatccctgaacctgctttttttttctttttttttttttttccctgagatgaagtctcgctctgttgcccatactggaatgcagtggtgtgatcccggcccactgcaacctctgcctcgtgggttcaagcaattcttctgcttcagtttcccttgcagctgggattacaggcatgtgccaccacgccgggctaatttttgtattcttagtagagacagggtttcaccatgttgaccaggctggtctcgaactactgacttcaggtgatccacccatctcggcctcccaaagcgctgggattacatgcaagagccaccgcacccggcctgaatctgcatttttaataagcatcccgggtgatttttatgcaagaggtccttggatcagttttggaaaacgatgcaggggtttaaaacacaatgtttggagtaacctgagtccagccccagctctgtcctggctgcttgacgtcagacaagtttatctttatgagcctcagaatcttcacttataaaatgaggaccataattactttgttcaggctgacataacaaagtaccacaaactaaatttattatctcacaattctagaactacaagtctgagatcaagaggttgccagggttggttcttgctgggggctgtgagggagaatctgttccatgcctctctccgagctttgggtggtttgctagcagtctttgacactccttggtttgtagatttctgccttcatcttcacatggtgttctccccatgagactgtccgtgtccaaattcccccttttgtaaggacaacaatcatgttggattagaggcctaccctactttagtatgacctcatcttaactgattactattatgtcttaacaatgacatcttaactagttttattccattgtctcctgaaacactgggagtgtgagcctcctttctacctttactataggttatgacatataattatcatttaaacaagagaaatggccctttcaaaatggttcttgtatactagaaagataaatgatctgtgttttctttattttacaaaatataagaaatatagcaattaggaaaaccttaccaatgcactcagggtctgaaagctgtgggaaacaaagcaatcaccttggtgctttctctgcttttagaaagaaacttattttttaaaatcctgcttttaattatattacttaggccccagggtactgagtcttttctaattgtttgccttttgtataagggtttttccattgtttcaaggttttatttacttacgtataattcaactaatagaattgttgactctcttagaagttaaggtagtttgccgggtgcagtggctcatgcctataatcccagcactttgggaggcgaaggtgggtgaattacctgaggtcaagagttccagaccagcctggcgagaccccatctctactaaaaatacaaaaattagccacgcatggtggcttatgcctgtaatcccaactactcagaaggctgaggcacaagaattgcttgaacccgggaggcggaggctgcagtgagccaatattgtgccactgcactacagcctgggtgacagagtgagtccatctaaaaaaaaaaaaagaaattaaggtagtttaaagggtttattgtttaacttaatgattaaattccccatgttgtcccaaaatatggcacttcttacaaagaaaagagacaccattaaaaagtaagtagaattgcgtaagagcaattttcagagtaactatctattctcattatcccccagcaaattagccacttcacagattatttgctgaaaacgtaaactcttatcaaagacaggatgtgaaagctaaggtatttgcattaccattaaccctctagtgactctgcaactctgaaagctctcaaaatatgtcatttcttggctggctgatcacccaaatatgacaaagacaggtgttatggttaattttatgtatcaacttgactggccatggggtgcccagattagacattgtttttgagtgtatctgggagggtatttccagatgcaattagcatttgaatcagtggactcattgaagtagactgctcttcccatgtatatgggcatcatctgatcaattgagagcctaaataaaagaaaaagtggagaaaggagaaatttgccctgctctgctgagctcggacacctcatttcagcttcttggccctcagaacgtgatttacataattatttctcctgttttccgtccttctgactgaattgtaccactggctttcctgggtctccaatttacagatggcagattgtgggacttctcaggctccataattgcatgaaccaatttctcatgaaccaatgcctaggtgacagagcgagactctgtctcacaaaaaaaataaataaataaaaatgtatatatatatatccatatgtatattactggtgctctttctccggagaactctgactaatgcagttaaggaactatatatgcatctaactatgcatgcatatgtaatgcatgcaagttttctataaagttgtagaaatttctagttagggtcatcagcatatgatcagagtctgaccttttgtaaaactcgaagaaatattctccaaactccttcaaaattacattgcggtcaatatatggtaagataaagaaaactgggtatgctttacacttcagcaatgtcttcctttttttctttttttttttttgagacgaagtctcaatctgtcacctaggctagagtgcagtggcacgatctcgggtcactgcaacctccacctcctgggtttcagtgactctcctacctcagcctcctgagtagctgggattaaaggcacctgccactacgcccggctactttttgtatttttagtagagacggagtttcaccatgttaaccagcatggtctccatctcctgacctcgtgatccgcccgcctcagtctcccaaagtgttgggattacaagcgtgagccatcgtgcctgcccctagtaatgtctttctacatattcctttagttaaatcacctgtgaaaggtaacataacattaccttgcctttgtaaaatcctttataatttttagaattcatttgagggattgaatttgatcctgtgaagtaaggtaaggcacattttattgtccccacttttaaaggcagactctaaagcccattagattttgcagtcttgtaggagataactactgttttggcctggccaacatccagccaccctctagaagtcagtgcctggtctttcaaggaactaaccctttcccaacacttaggttacaggattagatgagtcgacctcatacccacaaacctcctgtctctaaagagaagcatgtgattcaaattagccaataggtgcatcccatttccctggccacattgactgattcagggtggggcacatgacccatgatgtttcaaaaagaattgaatctggtccttttattataactgttgtgaaagatgagcttttcctgaagatgctaaccttgcatgatgccttctttgtcaccacaagagagaacttgcccaaaaatgaagccaacatgaagagaaacagaatcgggaattgagagggacatattattggtgacgttgggccccatattattggtgaagctgtgcctgcaacactactgcttgactttctagataagtgggcaatatgtatttctcttttctggagaaaagagaaatatgtattctttttcgtccagtttaagtacaatttctgttacttgatactaaaatagtccttactgaatacagttaaaaattctaggccaggcacagtggctcatgcctataaccacagcagtttgggagggcaaggcaaaagtatcctgagcacctaattggaaactgcaataagcagacacaaaagaacatcaagatttggtggcatctgctcagcctttaagttagcatggacataccaatgtgtgtcggaggattacttgagcccaggagttcaagaccacacacacacagtgtttctcagaggggatattctggatcaaatgaggttaagtgatggtttaggctttctaaaatccatctcggtgaagcaaatataatggtttctcaccttgtctttgagacggtgtgggtctcactccaggtaggaaaggataagcaagcttggtgaggcttttctgattgctggaaatcaagtctccattacctgggaaccacagaaacagtactgcctttggtctcaagcaacaagggctgcaaaactgaacctcacacattagaggaacccactctggccttcatctggctactggctctccccacagaccaaggagtctacaagcccagtggacatactcccctggatcccacattttcttcttctgaaccatgatccacatatacagaacctcagaatcttctgcccaaagagtcccacgcctgattccagagcctaagctcttcccaggctcctcatactgagaccagagtggccaaaaagcagttatgtatgtgagatgtggggagaaccattgcagaaggtttcttgcagagcaagatggagctcagatgggaaaaggaaagtcacagatgcatagaggcagggacgtccaaggattccaataattctaaaactgaaaccagggctgcatgcagtggctcatgcctgtaatcccagcactttgagaggccaaggtgggaggattacttgagcccaggagttcaagaccagcctgggcaacatagtgagacacaactctataaaaaaaacttttaaatattttttttaattagccaagagtggtggcatgcttctgtattcccagctactcaggaggctgaggtaggaggatcacttgagcccatgagatggaggcagcagggagccatgatcatgatgccactgcactccaacctgggtgacagagagacaccctttctcaaaaacaaataaatacattaaattaaattgaaacaagccttctaatcattgtgaagatgaggacacaatatgtcttatataacagtttggtgccttgatttataacttttacatatttgcacatatggcacaatggcctccatttggactcctgccccagacctcacagtattcagagcaggcccacagaggaagcaacaattaaaggtccagagaaaggaaaagaggactctgttctggaaaacagctccctctattatggtttgggtgtgtccccattcaaatctcaacttgaattgtatctcccagaattcccatgtgttgtgggagggacctgggggaggtaattgaatcatgggggccagcctttcccatgat

SEQ ID NO: 2121 - DNA, 6000 bp, Homo sapiens
ctgctcaatagcacttatggctggtggctactgtattggacagcacccctcaagaacaggggaggcctcgcgcggtggctcatgcctgtaatcacagcactttgggaggccaagacgggtggatcacctgaggtcaggagttcaacaccagcttggccaagatgatgaaaccccatctctactaaaaataccaaaattagccgggcgtgatagcgggcacctgtagtcccagctacttgggaggctgaggcagagaatcgcttgaatccgggaggcagaggttgcagtgagccaagattgcgccactgcactccagcctgggcgacagagcgagactccgtatcaaaaacaaacaaaaaacaggggaaacaggtgagaggcctgtcttggggattcattgtgattcctgcggcagttgcctccccagacacccagagcttgctggtcatcccagacccttgggcaagggcaagacagcagcgtccagcagtcggcttgtgcagggcagccttccaattgcccaaaatatgcgccctcccggacaccatccttggaagagaacctagttccttaccgatcctttcgtgcctcagtccacccagaccaattccagccttggtgaggcgtttccctctgaccaagcacccacccatgggaggcccgtgtcacccggctgcgtttcgcatctctgctcccatgaataaatgtatttactctaaaaacgtgtggctcgtgtgttgtacgtgaaacagccaccagcctcgtgctgagtagccgtaaaatctgtggtgtattgagcggagcgctgcgctgcgtgtcccggcggccctgccaggtaggtggatccagccatccctttccctttggcgggagaggctgggctcgagggacgcccgcggccacagcgctgcgctgcgaagtggcagagcagagatttgattcccgggctcccaggctccacgggcctgccttttccaccttatctccgtgcagcccaagaggcagtcgagctcgagtcttgacgggagaacggagcccttctaaaacccggggatttgaatgcctgcaggatgcgcggtgcgctaggggcggtcacagcttcctccggagcgcccgcctcctagaaggccttgcgcccactagcgggcgccgcggggagatgctctgggcagctcggaaaccacggtggcctcgccgggaaagagagcgcctaacccagggccaggcaccgccacgatttccttcaccctgacacggcccccagcccagccgatacctgtgtgaggccacagctgacctcgattgggctttgagaagttttgtgtcactcaactctggagggaggttgtttctaaaccgagcacatcctaagaattttttccgtgatttcactatgtcctaaaaaatagagctcattttagagtcttggacagggcgggggtttcagaaccgtaggtctgagttctagccctgtgccaataactaaatgaccgggtgttcatccgatcatctgagaaacgtttattgagcacctattacgtgcccaatactgtgctagttactctagcggacaatgagatgaactactcaagatgtggcgttgctcttgagtagttccttgtctagttgggactggggcaaggagatgtgatgccagctgggtagggtaaaggctttaagggaacccatggtgggctgggccaagaaaggcttcctggaggaggtgccgcctgagactcaaaacaagtggtgttagcctggagtgtaggggagcgagccttgacgacagagacacgagcaggtacaaagggcagtgaaaaggtacatggccacgtggccactctgggagcttcaggggttcaggatgctggagtgtggcacgccagagccacactccagccacatgaagacagtcccaccatcctggaggagaaagtcgtgctcctgttggttctgatcatgctcctggctggctgtgaagagtggactgaagccttctggggctgtaagcaggaagtcaaggctgtaggaggctgtcgtggtctggaaagaagaaggagaggcaactattgggtaatggagtgaggatgggagaggtcggtgtgagagattaaagaggagatctggtgctgactgttgtgggagaagagaacagtcagatttccgttgcagtggctgatggatgtccttcacccacactgaggtcaaggaaggaaacacacaactgtgggacgacaacagcgtgcacaactttgaggtcactgagttgaaggagcctatgactctgccaagcagagatgcccaggaagtgtgtgagtctgtgctcaggagaaagcgcagggcagtagagacacattttatgagccaccaccttgtgcacagcagccaatggcatttcactcttacaggggttgcagggagtgagaagaaggccatggacagaaacacagaagaaagacacataaaaaaaatagaatccaagatggggactgaagatttgaaggagcagaagtaatcagagttgagtttcgaaaagattgctctggctaaagaatgcagaatggactggagagggagaagccacaggcatgggccagtcactcaggagggagaacagaatcctcccggggggagaagtctgatgtctgtgtccaagctacttaccttttgcccatctcacaggttcacgtgaggctcacatggggttgtggcaatgacacacacagcatccaagtggaagacaggattgtcctctcatacagaatgacttctccttgaagagcagaggtggcatgttgaccacctctctgttttaaaacatgttgaattagtagccaacatgtaaaattctggagatgttgcatgaaattctgatttctggcttctcttagaaaaaacatgtcttccaacagtcaccctgcattcttggcaggaactgagtagcagttgctctgtttagcagttgctctctttagatggggcactcactttttttttttttctttttagacggagtctcactctgtcgccaggctggagtgcaatggtgtgatcttggctcactgcaacctccacctcctgggttcaagcgattcttctgcctcagccttctgagtagctgggactacgagtgcccgccaccacacctggctaatttttgtttttagtagagacggggtttcatcatgttggccaggctttggtctcgaactcctgacctcaggtgatccgcccacctcggcctcccaaagtgctgggattacaggtgtaagccaccgcgcccggccaggaattcactcttcatcactgtccccaccaccccctagtgcctccttgacactgttagttgccattcaccatcctgtggagcttgtattttctttcgctggtcctgctttactcattttcattacctgttggcatttgtttgtgactcctctaggggtttggggaatacaactgtcttcatgtgagggcttggtagaagtgcctctgtagagccaggtgcagtgactcacatctttaatcccagcattttgggaggccgaggcgggcggatcatgaggtcaggagatcgagaccatcctagctaacatggtgaaaccctgtctctactaaaaatacaaaaattagccgggtgtggtggcatacacctgtagtcccagctacttgggagactgagcaggagaatcgcttgaacccaggaggcggaggttgcagtgagccgagatcgcgccattgccctacagcctgggtggcagagggacactccatctcaaaaaaaaaaaaaaagaagtacctctgtagaatgacaccccaagtaatctgtttactttgcatgcacatcttctcgagccctgcctttcaatctgagccacaggctcttcaaaaatgttcaataattatatttaatatattttaaacaaccacagtttaagaattctaatttaaacaaaaaaagtcacagatacaacaaaatgtgttatcaagcacatttaattcactggcaaccacaagacattgattgtgcccctaggttacgtagaaggccgtagaaatgaactcgccatcgctgtgcgattgaagagtttagcttgatagtgcaaggccggtggctgaaaaaaatgctaccgtttgccctattccttgtcaagactttctcagtactgactcttgaaataaattgacttcttgaagctagcataagactgcaaatggccattgcaactgccatttcaaatttctgaagatgtattagaaacgaagaacccactgccgtcgggggaaagaggacctgggcagatagaaggaaagaatggaagacattttttctcccttggaaaggctttcgccatataactactgcacattttaatatattgacaacactggacatttttccaaaagtaagtaaaaaccttcattgttcaactttataataagccaatgattacttgtggattcattatgataataaagcacttctatggggattttcttttttttatgataggttttgctttagaaaacaattgaaagccacttttctgggaaaaaaaacaaaaaacaaaaaaaaacgctgtttgcggcagccccaattccctaagcattatctggtgggagatgtgttgcagcgagacctcccaccagtaggtggcactgcgcgcaatgctcgcacctcccctcaacaccctttctctcagcaatggcgggtgatggtgggggtcctctctttgcagggctggccattctaatgcctgacctcaggtgcagaccagtgttccgttgcgcgggactcctgacctcgaggaggtttagagaaaacaatggtgttctctgtgtacccttccgcgagggctggggagtataccgccgcgcagaagacgcaggccaggggagaattcgcgccgggcggcaggcggggtggcgggcagcccctgggcgggcggggtcctggcgagaagcgagccggcggcctgaggaggcgactgactgagcagcgcacccggggagcaaggaggcgcggtgaactgagcggcccctgagctgacagatacactgcgcagctggaacggcgagcgagccgacgggcgagtgaggggcgcagccatgatcacctcggccggtgagtgcggcccgtagccagcgcctggagggaggagccgccgccgcgccggcttttagctgagtcagggccggtgactgggcgcctcccggcggaacgccggcctgggcagcttcttgctgcccagggcccacccccgggccggggggctgggagtctgatcaggtcactgcgtgcttctctggcttgagggaatcgagccgggtcgaccgcctcggcatccctccccaatcacaccccagcgccaggacccgaggggcttcctgggccttcccctgaccccagaagggcttaccttttttctgtgcctcccattcttggccgtgtgaggtcgtccagccccagttcttgcccgcagggggccggggtgggatgggcccctgtgccattgaacagtaaggcaaacccccctgatcgggcagcctaactgctacagaagtgtttctggacgtggccgagctccattcgccttagaatgaaacccgaaattaggtttgaggtgggtcatttctgggtccgatccaagggtgttcattcaaaacacccagagaacttttgggttcggcgaagaccctaaagacgccctggagatacctttatactgagagcctacttataccctttcgaggttatgtgctcagtctgttgactgtacattcaagaaagaatggatggatctgcggagcaggtttcatacgcgcaaaccattgcataggtagattcacgtagtgacatttgcaatggagtaagttacagagatcaagtttcaattggagacttaagctccccgttacagattgacttgcatatagctgtccagagccttggtgcttttttccgttgcctatttacatacccttttctcattttcttac

SEQ ID NO: 2122 - DNA, 6000 bp, Homo sapiens
caaagaagaaaaatgttgatgattgaaaacagaaaagaaatgtgtaaactcaagaaaaagtgtaagttggtaaatttttatatttgtcatagagtaaaagtttgagtaaatattactgaggatttgatcattgatttgctgaaaagaattttttaaggaagtgtaatgataagtctatctcaaaataggattttggttatcttttacaggaatttgcactacacaaattgaatgcagttgttaatgacttctgggcagaaatttccgagtccgtagacaaaatgtaagaaattatttttataaatcagaataagatggatcaaatttaattgtgaatgtgggtcttgtggcttattgattcatttagaaatttgctgttaactgaattgtggcttgaatatttagatttgggatttttagggaaaaccacagtttgaactagacctgtacttcctaatttctttcagagaggttttatacgaagatgaaggtttccggagtcggcagtttgcagccttagtggcatctaaagtattttatcacctgggggcttttgaggagtctctgaattatgctcttggagcaggggacctcttcaatgtcaatgataactctgaatatgtggaaactattataggtaattatcgtctatctggtaaggctttatcttgtcggcttctttcttgctgtagtgcacatagaagcttttttcctgaatttgatgttgccaaatttcattttaattggaagttcctaatctttctataataattttatgcaggctgagtttttagatctgcccttcaactgagtgctggttctcagtggttatgatgatcaccagtccagtgagcctactgttagaggaaaagattaaatcagattagtatgagtaacaagtggtaccagtttgtgtagttttttcgaatacaggaaaccattatttagtatctgcattgtgctaggcaccgtgctagtcactctgcataccatggtttattccacagctaccccatgaggaaggagctagccgttttacagatgagacaacttggattttgagatgataaagacatggttattaaatagaaggataaaatttaaaacctggttttactcactctaaaacccatactgtttctatttgtaaccgttgttttcttacttgtttccttatttttgaaggaaggggataacacacaggcaaggctttgaattttctgacacatatttcaaccagagttgtaaattcaactagttatgtaagatttgatacaaagattttatagtgtaaaaaaatgcttgaaaactgttgatgtagtaaatgaaagaagggactgcatacccttcagacatgtgtttatcagactttggattcatagtacagagagctcaagggcatgttctgtcaggagtgtgcagtgcagatatttcacattgctgattagtagaaggtctgtattattcacttgaacacttacaaggaggaagttggtattctcttttagaaattgggaagtcctgcacaagggggttgatagaggtaccatcaactgtccttgggattctgtgttcatgtttttaaagtttttgctatgatgatgtgaaaattttgcaagttactttattgctgttggaggctcattgaattgagctgtcatctgtgaatccagtgggaagaactgatggcttaaaaggatggaccgtattatttgaaactagactactttcttcactttaagctagaagcagggggtgaaataccttacttatctcttttatttgatggatttttttttttttgaaaacagggcaggatctcactgtgttgaccagggtggtctcaaactcctggcctcaagcagttctcctgctttggcctcccaaagtgttggaattaacaggcgtgagccaccacagccagccttttttttttctttaatgaaggtttatggttttttacaacagtgatctacaaatgcttaaaatgccaccattgtacaaattgtgcttttaaactggactgttggtatgaagtgctatggcatggtagatgccttctaaacactgtatcattttacctttggaaggtgagttttgatcagtagaccagttctgtttgcatttatttatttaaaagtggggttcacccttcctctagttttgtagggcacattttttaagatgtcagtgagattcatgagggggtatacaaaacagaatttgggtaaggcttcctagcgtcttaatgaatatcgtaaacagtacctccagaaaatccaggactcataaatctccaagttatgacaaggctttagcaggaaatgaggctgagttttagttataacataaacctgggatatatttatgacatatatgcaaacctggtgaatgagaacatgaatctcatttgaaacctgggacatacatttttccccttcagttatataatctaaggaaaattccccaaatgttctaattttgaggttcctctctgatggggtaggggtaatgtttcctcacttagctacagttggttcaaaaagctcacattagggcctggtggacattttcaacaactggaattctttaaggtctattttgcattataacatccactgtgtttttttgtttgtctgtttgttttttggcagtttttctctgttgcccgggctggagtgcaatggcacgatcttggctcgctgcaacctccacctccctggttcaagtgattctcgtgcctcagcctcccaagtagctgggatgacaggtgcacactaccacacctggctaatttttgtgttgtagaaatggggttttgccatgttggccaggctggtcttaaactcctggcctcaagtgatccacttgcctcggcttcccaagattttgggattacagatgtgagccactgacccaacccactatgttcttattaactgtacctgaaccttcatggttccagctgaatcttgaatgtagtatattccaatttataaaagtcctctgcttccttcaagatatagacccatttaacccgggtcatctagtaggccaacaatcatttatgctagttaaaattatttttatttcttggggctatggtttgtaactaataaatcttgccctcgtcttcttacttatctttgaaagggaaagaaacaagccaatgaattatggagaggataattaatgtatatgtcattcctcttgggtgactgggttttttgtttttttgttttttttgtttttttgtttttttgttttttgttttgagacagtctcgctctgtctcccaggctggagtgcagtggcgcgatctcggctcactggaacctccacctcccgggttcacgccattctcctgcctcagcctcccgagtagctgggactacaggcgcccgccaccacacccggctaatttttttttttttgtatttttagtagagacggggtttcaccgtgttagccaggatgatctcgatctcctgacctcgtgatccacccgcctcggcctcccaaagtgctgggattacaggcgtgggccaccgcgcccggccagggtgactgttttatcttccttatgaaggtggaaggcttagggaaatgtccttcttttggttgtacttagaaagtttaaggtgtgattgcaaagatataactaaattgcaaacaaatgtttcttatcaggtgtgctattgatatccttcagtatgtcacaccctcccctccatgcacccaaatcattgtgaaatatggaagctaaattgggcacaaacacttttgcatgaattttcagacaccttcttgggagaaataggttccacctacctcacattgagacaataaatagagtcaggaatcacataatgacagactgcatagacaacagatgtcccataagagtacaataccatatttttactgtaccttttctgtgtttagacacaaatgctattgcctatagtattcaatacactaatatgctatacaggtttgcagcctagaagcactaggccataccatagagcctaggtatgtagtaggttatataacatctaggtttgtgtaagttcactccatgatgtttgcacaatgatgaaatcacctaaagatgtgttttccagaatgtattactgtcattaagcgacacaggactgtttttcaaaggatctgctacagttgctggaaaagtttttggaaatctttggaactgccttttaaacttgtggcacatttcaagtcatttccccattaccctacagagacaatttagacatagttcttactctcaggttgctaatagtttcattaatgcaaagaagtccgatatactactatgtgataattgctataataggccttttaaaatatcttcagtaatggcaaatgtttgttttttgaaagtgaagcagcagctatttgtagccagttcttttgaataagcagcttaatcgggtagagtaataaaattttgatcaaaatggagtaacaagatagaaactttaaaaataaattaaataagagacagggtcccattgtggtgctcaggctggcgttgaactcctgggctcatgtgatcctcctgcctcagcctgccgagtagctgggactgtgggtgagcactaccacacctggcagatagaaatgttttgaataatgtcaactggattggaattaatgtgtagttctccggtgtaaatattatgggagaacagtattcaaatgcataagttctagcatttcaaaatttgcttattgctttatagtcatcccataagtatatatgattataaatataggcattgccctttctgatagtttagcccaatttacaagataatcagttattttatttcctcaacagcaaaatgcattgatcactacaccaaacaatgtgtggaaaatgcagatttgcctgaaggagaaaaaaaaccaattgaccagagattggaaggcatcgtaaataaaatgttccagcgatgtctagatgatcacaagtataaacaggctattggcattgctctggagacacgaagactggacgtctttgaaaagaccatactggagtcggtaggtagatgatgttattttagaaattattgttgatagggaatcagcaaagcaagttattcaaactgaaactttcataggcagtgaaaagaaaatctagtttagaaatagcaggtgatcttttgccaaatattttattttcatatttatgtatgaaccttggttgtgttttgtgttcatgaaatatctgcttttatcttaccacataatcctttgaagtcttgcatggggaagttgtattaattactctgccctttttaagaagacaataaactatattttaatgcatttattagggttaaaactactcagctagattcctggtttgcggtgtttgcaataattaagacaatttaagtcaccaaccgaagtggtcagaaaggtacaaagctgagtaaaatggacattgatctgcaggcttactttgcctcaccagctatttctttccatgagctagctctctgtacactagccattttggtatcttctcatctagatgaaccctgcctcgttcccccttccaaaaatattttttacatttcttttttctttcttttttttttgagatggagtctcgctctgtcaaccaggctggagtgcggtggcgcaatcttggctcactgaaacctctgcctccggggttcaagcaatcctcccatctcagcttcctgaatagctgggattacaggcgtgtgccaccacacccagctaatttttgtatttttagtagagttggggtttcatcatgttgaccaagctggtctcaaactcctgacctcaagtgatccacccgtctcagccgcccaaagtgctgggattataggcatgagccaccacacctgccctccattcctttctttgcctgctttatttctcctcacaatccaaaacttagctcaactatcccttgtttgcagaactttgatc

SEQ ID NO: 2123 - DNA, 6000 bp, Homo sapiens
gacaccatcatggctcactgcagcctcaacctcctggactcaaacaatccactcacctcagccttctgagtagctgggactacaggcacatgccaccatgcccggctaatttttaaaaaatttttagagtcgatgtttcgtcatgttgccgagactggtctccaactccggagctcaagcaatcctcctgcttaggcctcccaaagtgctggggatagaggtgtgagccaccacacctggccgtcctctctgtttcttagaggagagaaagtaacttgcccaattcacaaagctagtgtatgtcagggctgccatttgaacccaggcagcttaaaaattcattctgcctgatcttttggggatcaagcagatttgtgagataaccaattagaaatatgttgtaaatggctttaggagcaggcttagttgcaaactgaagtgcccacagggccaggcagatgaaatcaatgtgttactcaggctgggcggggagaggcctgtgggccatgtggacagtgtgtagaccacccagaggtgtccctgtgaaaattcccccaaaacaagccaggcacagtagcaagcatctgttgtcccagctactcaggaggctgaggtgcgaggatagcttgagctcaggagttggagttcagcttgggcaacatagcaagaccccatctcaaaacaaaacaaaacatgcctggaggacatattgggtcccttgctcacagcagctctagccgaagcccactgtatctcaggctggggtcaggaaagcaggcttaccagggcacaccagcttgtcttggggggtttgaagggcaaggtcaccaaagtgcctgacttcctctgtaataacaaagggcatgagatgtatcaatgagtggaagtgacagaggacaggaagaatagtctgttcagaaacagcaaaagagggccggtgtggtggctcatgcctgtaatcccagcactttgggaggctgaggcgggcggatcacttgaggtcaggagtttgagaccaccctggccaacatggtgaaaccccgtctctactaaaaatacaaaaattagctgggcatggtagcaggtacctgtaatcctggcttctcaggaggctgagggaggcaggagaatcacttgaacccacgaggcggaggttgcagtgagccaagatcatgccaatgcaccccagcctgggcaacagagtgaaacttcgtctcaaaaaaaaaaaagcctggcacggtggctcacgcctgtcatcccagcactttgggaggccgaggtgggcggatcatgaggtcaggagtttgagaccagcctggacaatatggtgaaaccccgtctgtactaaaaatacaaaaatagtaaaccccatctgtactaaaaatacaaaaattggccaggcatggtggtgcacgcctgtagtcccagctactcgggaggctgaggcagaagaatcccttgaacccgggaggcggaggttgtggtgagctgagatcacgccactgcactccagcctgggctgaacagagtgagactctgtctcaaaaaaaaaaaaaaaaaaaagaaacagcaaaagaggtagggagctacctgttgctgaaggaacacggttcttcatagcctaaataactcccccactatgagctgtcagataccacactcctgggatgagagggaggtccatgggggcaacttctgccccagggctcatctaaaaatgcagattcctctgttttaggacttagcctcggctccatcattgatccagtgggtaactccaagtcccttgctataatctctaggtttgcttttttgatttgttaaaaggagggttatatcagaagttgaacctgtaaatgtgttgattttcagttcgttttcacctacatagacatcagtttcatatggttcaactccataactgtcctacccaccttgtacatgaaaatgaagcatgagtcaaaggctcactgccatgtacacagcgggcattcagtgagtgtttgggaaatttaagtggtggttctggaaccagatgggcatgagccttcctcacccacttctagcaaaggcacctgcatgggaataacgtcagaaaacagttctttttttgtttttttttttgagatggagtctcactctgttgcccaggctggagtgcaatggcgtgatctcagctcctgcaacctctgcctcccggattcaagcgattctcctgtctcagcctcccgagtagctgggattacaggcgcacgccaccaggcccggctaatttttgtatttttagtagagacgggggtttcactatgttggtcaggctggtctcgaactcctgacctcgtgatccactcacctcggcatccacccacctcagcctcccaaagtgctggaattacaagcgtgagccaccgcgcccggccaggcaaagcagttcttagagggaaattcacattcatcagttccttctgggtgtttgaccttcccgctcccacaacagcctgaatccagaactgtcaagtctggttttcagctatggacacagtccactgcccgaaggccaccatccagacgacggggaagccttgatggcctttccggagccactgcccgaaggccaccacccagacgagggggaagcctcgatgcttagagatggtacaagccaggctctcattgcatctgggtttcgtggaaaaaacaatcctctcgagggtaactggaacttaatggatgcgccgcaggtggaaggcgctctgtccccctgtttacgatgacgcataatccctccaactctctgagaatgtgacacaaaggagggggtcacggtggctgaggtcaaggagcccttcctctgtgaagggcggccccaggtctgcgcggcggtgaagacagactggcagtgggagggagggaacccgacaaagagttgagacgcgtagtcctcgggaacagcactgtggaagtcccccggattgaggcgcgcccgtccagtggagaatgccacctccagccactggggcgcctgggggcagggcggagacacagcgggcgtcccttcgccgctgcataggagggcgaccgctgggcagcgggtgttggcgcggtatccccgccctgcccagcatctgccccacgtttcttcaggctaaactaccgggatcccgggcttcttcctaaagtaaaactcgctccggaaaggccaacagtccagcggccagacgggcacctgggaacgcgggcctaacgcgtactggagacggagtggcgcccggcactgcgcgcctcctccccgccgggagactgcgtgctaagctcagcaaagccccgctgtggagacggagccatgtcgcccattacctaatgaaactgagaagggagactcagtctctcttctagccccgagcgcaagctctgctggacttggcatcgtccgccctccacgatcccacactccgggttttccccattcccagctcggctgcaaccgagagacagacggaagaaactgccaatggaaggacgcaaagcgtcaactttgtgttcgcccgccactctcggccaatgtgcgctcgtgtctccggagtcccgccttccgtgtcgggcgcccccttttggcagcacagggacgaaccctacgtctcgccatcttgtgtgtggcacaggtaaatttctggactatctttccacctattctggtcctttttcccacacaaccgatttcttagttcgacagctaagtgcggtggcgataaggccagcgtagcctgttgttctcggatcgcccacgtgagctagatcgctacgtcacgccacgcttgccgagcccggcgccatcttgagtgtggcgttttgatgctcccctttctcggggctccgcatggttctctaaatggtcccccaaatttcaggtagtccccaaagattagcccaactggctccagagacgatgatttttcccgaggaactctgtaatgttcatgtgcccatcgcagtccagcagtggggtgggagaagggtagactcgatggcccggcaggcccctggaggaggctgccctgaggctgtcgcgacggcagtgaccgctcgggacagaccctaactagaaacctagaatgaggggaccgctatgccgtgcggggcccgcgggctgtcccactcgagggctggagccggcatcgcgcatcgagtccgcttgatacatgaatccgtgtgtgcttgggacggtgcccgcttgtcgactgacttggccgacggacgccggacctgatggtgggcaatcgaggtcgcctgcccacaggactaggggtgccctgccctgggagggcgcgagggcatggcagagggacggggcggcccaggtgcccgggtctcggcctcgtgacctcgttgctcgtcgtggggctgccgtccacttgcactgggacaatccttggtccaaggcgcccaggcgcggggggcgggcacctccgcgggcactgcgctgggcaccgcccggggcgagcgcggcccagcaccccgccttcccctcccccgcgctggcagccgtcgtgtgcccgccgccccctcttccctccccctccttccgagcagccgcggggagggcgggagagggagggaagggggttgggcgggcagctttgccgcgctttggctttctgcgtcagcagccccagcaaaacagctgcgggagcgcgcgtccggaacgcgctcgcgcacccctcccccgcgccctcggccctgctgagacccggcaaactccggccttgaatgacagtgcgatcggcgactgcgcagcgcgggacgcgccggggcactgccgctttaagcacgcttgtccattgttcggaatcgagccaatgagcgagcgcccgctccctgcgctcagccaatagcggccgggcatgggaagccgagcgccgcccactaatctatattaaagcttctggcgccgcgtgagtcccccactggctgctctgaaaagccatctttgcattgttcctcatccgcctccttgctcgccgcagccgcctccgccgcgcgcctcctccgccgccgcggactccggcagctttatcgccagagtccctgaactctcgctttctttttaatcccctgcatcggatcaccggcgtgccccaccatgtcagacgcagccgtagacaccagctccgaaatcaccaccaaggtgaggctggacgccgcccgccccctcggggtccgcgcgccgccgctcgggcggtgtttggcgcgcagcagctggactgtctcaagcccgctgttgctccctctcgcggggaaacggcccgcccccggcgcggtgccctcaggcagcccactctttgtgtggtgcgggggagggggcgggaaccgccgcgggcagacgtgatgcccgtcggggagtgggccgggcgccctcgggggccgagggctaggcgcggaggccggctcacggccctcgaaactcgtctgtggccggtatgagtggcggcgggaggagaagagcctggctgggggtcgtcggcccgccgggcgcacggaaataactttgaaactcaagcgcgttgggaatcggaagtgctggggggcgcgtgttggggcgcgggccggccgcgggaagtggcggcgagcgcccgccggccgcgctgctctttgttcggcgccaggccggcggtttcgcgccctgcagcggacctgaggtggtttgtctagactaagtcccgataaggcggatggggcgacgggctggctggccgcgacgtcggccgtcccggcggaggtgtgacgggcttatccgctttgggcgctctgggaggcgggggtgggcgcccttcgaggtgagtgcgccgggagcggccgcccagcttcagtcatgcacccgcggtgccgggcttggctgaggaggcgagagcccacgcgccgcagggaggaaagagaaagtgaagcgcggcgctggggcgacgatgggcgccccccgcggctgcccgggagcaccgtgtgcgc

SEQ ID NO: 2124 - DNA, 6000 bp, Homo sapiens
ctcaaaaaaaaaaaagcctggcacggtggctcacgcctgtcatcccagcactttgggaggccgaggtgggcggatcatgaggtcaggagtttgagaccagcctggacaatatggtgaaaccccgtctgtactaaaaatacaaaaatagtaaaccccatctgtactaaaaatacaaaaattggccaggcatggtggtgcacgcctgtagtcccagctactcgggaggctgaggcagaagaatcccttgaacccgggaggcggaggttgtggtgagctgagatcacgccactgcactccagcctgggctgaacagagtgagactctgtctcaaaaaaaaaaaaaaaaaaaagaaacagcaaaagaggtagggagctacctgttgctgaaggaacacggttcttcatagcctaaataactcccccactatgagctgtcagataccacactcctgggatgagagggaggtccatgggggcaacttctgccccagggctcatctaaaaatgcagattcctctgttttaggacttagcctcggctccatcattgatccagtgggtaactccaagtcccttgctataatctctaggtttgcttttttgatttgttaaaaggagggttatatcagaagttgaacctgtaaatgtgttgattttcagttcgttttcacctacatagacatcagtttcatatggttcaactccataactgtcctacccaccttgtacatgaaaatgaagcatgagtcaaaggctcactgccatgtacacagcgggcattcagtgagtgtttgggaaatttaagtggtggttctggaaccagatgggcatgagccttcctcacccacttctagcaaaggcacctgcatgggaataacgtcagaaaacagttctttttttgtttttttttttgagatggagtctcactctgttgcccaggctggagtgcaatggcgtgatctcagctcctgcaacctctgcctcccggattcaagcgattctcctgtctcagcctcccgagtagctgggattacaggcgcacgccaccaggcccggctaatttttgtatttttagtagagacgggggtttcactatgttggtcaggctggtctcgaactcctgacctcgtgatccactcacctcggcatccacccacctcagcctcccaaagtgctggaattacaagcgtgagccaccgcgcccggccaggcaaagcagttcttagagggaaattcacattcatcagttccttctgggtgtttgaccttcccgctcccacaacagcctgaatccagaactgtcaagtctggttttcagctatggacacagtccactgcccgaaggccaccatccagacgacggggaagccttgatggcctttccggagccactgcccgaaggccaccacccagacgagggggaagcctcgatgcttagagatggtacaagccaggctctcattgcatctgggtttcgtggaaaaaacaatcctctcgagggtaactggaacttaatggatgcgccgcaggtggaaggcgctctgtccccctgtttacgatgacgcataatccctccaactctctgagaatgtgacacaaaggagggggtcacggtggctgaggtcaaggagcccttcctctgtgaagggcggccccaggtctgcgcggcggtgaagacagactggcagtgggagggagggaacccgacaaagagttgagacgcgtagtcctcgggaacagcactgtggaagtcccccggattgaggcgcgcccgtccagtggagaatgccacctccagccactggggcgcctgggggcagggcggagacacagcgggcgtcccttcgccgctgcataggagggcgaccgctgggcagcgggtgttggcgcggtatccccgccctgcccagcatctgccccacgtttcttcaggctaaactaccgggatcccgggcttcttcctaaagtaaaactcgctccggaaaggccaacagtccagcggccagacgggcacctgggaacgcgggcctaacgcgtactggagacggagtggcgcccggcactgcgcgcctcctccccgccgggagactgcgtgctaagctcagcaaagccccgctgtggagacggagccatgtcgcccattacctaatgaaactgagaagggagactcagtctctcttctagccccgagcgcaagctctgctggacttggcatcgtccgccctccacgatcccacactccgggttttccccattcccagctcggctgcaaccgagagacagacggaagaaactgccaatggaaggacgcaaagcgtcaactttgtgttcgcccgccactctcggccaatgtgcgctcgtgtctccggagtcccgccttccgtgtcgggcgcccccttttggcagcacagggacgaaccctacgtctcgccatcttgtgtgtggcacaggtaaatttctggactatctttccacctattctggtcctttttcccacacaaccgatttcttagttcgacagctaagtgcggtggcgataaggccagcgtagcctgttgttctcggatcgcccacgtgagctagatcgctacgtcacgccacgcttgccgagcccggcgccatcttgagtgtggcgttttgatgctcccctttctcggggctccgcatggttctctaaatggtcccccaaatttcaggtagtccccaaagattagcccaactggctccagagacgatgatttttcccgaggaactctgtaatgttcatgtgcccatcgcagtccagcagtggggtgggagaagggtagactcgatggcccggcaggcccctggaggaggctgccctgaggctgtcgcgacggcagtgaccgctcgggacagaccctaactagaaacctagaatgaggggaccgctatgccgtgcggggcccgcgggctgtcccactcgagggctggagccggcatcgcgcatcgagtccgcttgatacatgaatccgtgtgtgcttgggacggtgcccgcttgtcgactgacttggccgacggacgccggacctgatggtgggcaatcgaggtcgcctgcccacaggactaggggtgccctgccctgggagggcgcgagggcatggcagagggacggggcggcccaggtgcccgggtctcggcctcgtgacctcgttgctcgtcgtggggctgccgtccacttgcactgggacaatccttggtccaaggcgcccaggcgcggggggcgggcacctccgcgggcactgcgctgggcaccgcccggggcgagcgcggcccagcaccccgccttcccctcccccgcgctggcagccgtcgtgtgcccgccgccccctcttccctccccctccttccgagcagccgcggggagggcgggagagggagggaagggggttgggcgggcagctttgccgcgctttggctttctgcgtcagcagccccagcaaaacagctgcgggagcgcgcgtccggaacgcgctcgcgcacccctcccccgcgccctcggccctgctgagacccggcaaactccggccttgaatgacagtgcgatcggcgactgcgcagcgcgggacgcgccggggcactgccgctttaagcacgcttgtccattgttcggaatcgagccaatgagcgagcgcccgctccctgcgctcagccaatagcggccgggcatgggaagccgagcgccgcccactaatctatattaaagcttctggcgccgcgtgagtcccccactggctgctctgaaaagccatctttgcattgttcctcatccgcctccttgctcgccgcagccgcctccgccgcgcgcctcctccgccgccgcggactccggcagctttatcgccagagtccctgaactctcgctttctttttaatcccctgcatcggatcaccggcgtgccccaccatgtcagacgcagccgtagacaccagctccgaaatcaccaccaaggtgaggctggacgccgcccgccccctcggggtccgcgcgccgccgctcgggcggtgtttggcgcgcagcagctggactgtctcaagcccgctgttgctccctctcgcggggaaacggcccgcccccggcgcggtgccctcaggcagcccactctttgtgtggtgcgggggagggggcgggaaccgccgcgggcagacgtgatgcccgtcggggagtgggccgggcgccctcgggggccgagggctaggcgcggaggccggctcacggccctcgaaactcgtctgtggccggtatgagtggcggcgggaggagaagagcctggctgggggtcgtcggcccgccgggcgcacggaaataactttgaaactcaagcgcgttgggaatcggaagtgctggggggcgcgtgttggggcgcgggccggccgcgggaagtggcggcgagcgcccgccggccgcgctgctctttgttcggcgccaggccggcggtttcgcgccctgcagcggacctgaggtggtttgtctagactaagtcccgataaggcggatggggcgacgggctggctggccgcgacgtcggccgtcccggcggaggtgtgacgggcttatccgctttgggcgctctgggaggcgggggtgggcgcccttcgaggtgagtgcgccgggagcggccgcccagcttcagtcatgcacccgcggtgccgggcttggctgaggaggcgagagcccacgcgccgcagggaggaaagagaaagtgaagcgcggcgctggggcgacgatgggcgccccccgcggctgcccgggagcaccgtgtgcgccgcagctcggggcgacgcgggccaacacggcggccgcgacaggccaatggtagggtcgaactgggggggcgcccgggccccgtggcgggttcactgccctcggctatgaggtcctgcgcggctggtgcggctccgctcctgttgtcggcgccgcctcggtcccactgcccgccctgggtagcgtctccgcccttggcgggagcggggcgctctcagactgactggctctttcttaatatttcggccctcgtccgcgcccgtcgtgcccctgcagggattggcgcgagtcaccttggcgtctccttaacccttgtgtccctggcgtcatctctgactctcccaggggcgacttcttggcagagcggagctcggggcccggatctccacaggggctctcagtgaccccttctggactcagtccgggaatgagtttgtggggtgagaacaccgtccccagtgcggggcctggctgttcgattttctccgaagcaccaaaaggtgacttcccgcgagggcgatgagtagtagcccgagaggcgcatccccgacagtctcggacctacgcagcccggtggactttggggcgacctcccgtgggacttggcccgccgaatgcagacattcgggcctgccggggtggcggcagtggggcgtcgagtcgagagcccggccgaccgacgcgcgacccgcgcgcgtgccactgcaagctctgcctgccggccgggagtctccaaggcaagggacgcactcggcggccccgggccacgtgctccctgcgcgcggtgcgtgccgaggcccgcgcgcaaagcccgccgggcgggggatgcgcgcctgcgcgccgcgacctccctgcccccactgctccccggggcttcggccgccagggggcgagagcgggcggagccggggtccgcggagcggagcggggcgggccggactgagagggccgacaggtggcccggagccgctcgccggacagcggccgaggggttcccgcaggcccggacgccggacctctgttggtattggtggccgtgtcgtgtggaaaaagttaccgggcgcccggggccgcgctgccttttggatcccgggcggagtcccacccccgaggtgctgtcgggatccctagccgccgcggggaggccgggagttggtggctccggcggcaggccccggcctggggcaccgccaagcagcggtttgcggcctctagg

SEQ ID NO: 2125 - DNA, 6000 bp, Homo sapiens
ggttgggcgggcagctttgccgcgctttggctttctgcgtcagcagccccagcaaaacagctgcgggagcgcgcgtccggaacgcgctcgcgcacccctcccccgcgccctcggccctgctgagacccggcaaactccggccttgaatgacagtgcgatcggcgactgcgcagcgcgggacgcgccggggcactgccgctttaagcacgcttgtccattgttcggaatcgagccaatgagcgagcgcccgctccctgcgctcagccaatagcggccgggcatgggaagccgagcgccgcccactaatctatattaaagcttctggcgccgcgtgagtcccccactggctgctctgaaaagccatctttgcattgttcctcatccgcctccttgctcgccgcagccgcctccgccgcgcgcctcctccgccgccgcggactccggcagctttatcgccagagtccctgaactctcgctttctttttaatcccctgcatcggatcaccggcgtgccccaccatgtcagacgcagccgtagacaccagctccgaaatcaccaccaaggtgaggctggacgccgcccgccccctcggggtccgcgcgccgccgctcgggcggtgtttggcgcgcagcagctggactgtctcaagcccgctgttgctccctctcgcggggaaacggcccgcccccggcgcggtgccctcaggcagcccactctttgtgtggtgcgggggagggggcgggaaccgccgcgggcagacgtgatgcccgtcggggagtgggccgggcgccctcgggggccgagggctaggcgcggaggccggctcacggccctcgaaactcgtctgtggccggtatgagtggcggcgggaggagaagagcctggctgggggtcgtcggcccgccgggcgcacggaaataactttgaaactcaagcgcgttgggaatcggaagtgctggggggcgcgtgttggggcgcgggccggccgcgggaagtggcggcgagcgcccgccggccgcgctgctctttgttcggcgccaggccggcggtttcgcgccctgcagcggacctgaggtggtttgtctagactaagtcccgataaggcggatggggcgacgggctggctggccgcgacgtcggccgtcccggcggaggtgtgacgggcttatccgctttgggcgctctgggaggcgggggtgggcgcccttcgaggtgagtgcgccgggagcggccgcccagcttcagtcatgcacccgcggtgccgggcttggctgaggaggcgagagcccacgcgccgcagggaggaaagagaaagtgaagcgcggcgctggggcgacgatgggcgccccccgcggctgcccgggagcaccgtgtgcgccgcagctcggggcgacgcgggccaacacggcggccgcgacaggccaatggtagggtcgaactgggggggcgcccgggccccgtggcgggttcactgccctcggctatgaggtcctgcgcggctggtgcggctccgctcctgttgtcggcgccgcctcggtcccactgcccgccctgggtagcgtctccgcccttggcgggagcggggcgctctcagactgactggctctttcttaatatttcggccctcgtccgcgcccgtcgtgcccctgcagggattggcgcgagtcaccttggcgtctccttaacccttgtgtccctggcgtcatctctgactctcccaggggcgacttcttggcagagcggagctcggggcccggatctccacaggggctctcagtgaccccttctggactcagtccgggaatgagtttgtggggtgagaacaccgtccccagtgcggggcctggctgttcgattttctccgaagcaccaaaaggtgacttcccgcgagggcgatgagtagtagcccgagaggcgcatccccgacagtctcggacctacgcagcccggtggactttggggcgacctcccgtgggacttggcccgccgaatgcagacattcgggcctgccggggtggcggcagtggggcgtcgagtcgagagcccggccgaccgacgcgcgacccgcgcgcgtgccactgcaagctctgcctgccggccgggagtctccaaggcaagggacgcactcggcggccccgggccacgtgctccctgcgcgcggtgcgtgccgaggcccgcgcgcaaagcccgccgggcgggggatgcgcgcctgcgcgccgcgacctccctgcccccactgctccccggggcttcggccgccagggggcgagagcgggcggagccggggtccgcggagcggagcggggcgggccggactgagagggccgacaggtggcccggagccgctcgccggacagcggccgaggggttcccgcaggcccggacgccggacctctgttggtattggtggccgtgtcgtgtggaaaaagttaccgggcgcccggggccgcgctgccttttggatcccgggcggagtcccacccccgaggtgctgtcgggatccctagccgccgcggggaggccgggagttggtggctccggcggcaggccccggcctggggcaccgccaagcagcggtttgcggcctctaggaacagcggtcggatttggggggtcggtgtgctttggcttttttagatacctgtcctggccggggcggtgcggcctcgcgggccttccaggctggcgcgcctgtggggctctccccgagcgcaggcccctctctctttgccttatttatttttggaacataacctgccgcctttctagacggctcgaggggcgggctctttgcacttggaagcaggctgatgggcgtgagtgtccggggctcgtccacccggccggacgggctgggggctgtggcgccacatggctcctttttcctgggaagcgccagggggcagtgggaaccgccaccggggccgctgtagcgggccttaaaggatgggaaaccttgatcacagatgccccccgccggccttccttccaccagaccagtgggagagggaccgcaggggcatcaggcctttctcaacatgcgactcttaatttgggacggacagaacagccgtacagaccagtagttctcagcgcctttgcttaccctgggttgctcagaagacttactggttactggttccttcttcccttttgaaggacttaaaggagaagaaggaagttgtggaagaggcagaaaatggaagagacgcccctgctaacgggaatgctgtgagtgtctgctttgctcctgagccctggcagctaccgccccacaaaatttttcctgttctactttaaacatacctatatatgtgtgtgtatgtgtatatgtatagctttgcacagtggcagtatcgtagccaatgagctttacccgaggcgcgattattgctagttaaatatttataaaaacctttcgagcagcgcctgaacaagaataggttcagaggagactccggtagtctgagtttgggcttggcccagggtggggaaaagcccttgtcctggggcagttaatgtgcaggtttcatgatggagcctggagggtgttgactggagaagggtctctggggtgggcttggcttggctgggctgtagatgcagccgccagcctctggtgggaggccgggcatcaggagcaacgctctgtccagcctggggccagctggtaatgacatggcctgttttctgtcgaggagaatgaggaaaatggggagcaggaggctgacaatgaggtagacgaagaagaggaagaaggtggggaggaagaggaggaggaagaagaaggtgatggtgagtagccttgtctatcttccccttttcaggtactttttcctggccttgtctggcagaaggggaaggaaggaattggggctcctgggagtgggacaatggtacttggggccagtggaccacatggccctgggcacccacctgtagagtcagggaaggtctccctgacatggagttgtgcccatgcccactcacactcactcgcacacctgaaagtttctttcgtgcagctctgaaagccactgatctattgggctggccttttggggtgcagctgcttgggcctctctcctctggagagtcccacctgtgtagtgggcgtgggtgccctgattgggcccagttgcaggcagtagaggcagggcagggaccttgcagtccactacatgttcctcgggatttccccaggagccacagtaggagggaagtgtggtttacctggcctttgattctctccaggtgaggaagaggatggagatgaagatgaggaagctgagtcagctacgggcaagcgggcagctgaagatgatgaggtgggttctggcttgagaagaaggggggtttggcatctgggtctccccacctgcctttagctgaggtgctcaagctgcggagggactgtttctgactttgtaggtggccactgtgtggtcctgaatcttaagaacaggaaggaaacagggctgggctcaacttcccagaggccttgggctgtggagctgggggtccctggttcttgctctgccagcaggagctgaggcagtgggctggatagggctcctggggttggaggggcctttgacagtctttctctgcttaggatgacgatgtcgataccaagaagcagaagaccgacgaggatgactagacagcaaaaaaggaaaagttaaactaaaaaaaaaaaggccgccgtgacctattcaccctccacttcccgtctcagaatctaaacgtggtcaccttcgagtagagaggcccgcccgcccaccgtgggcagtgccacccgcagatgacacgcgctctccaccacccaacccaaaccatgagaatttgcaacaggggaggaaaaaagaaccaaaacttccaaggccctgctttttttcttaaaagtactttaaaaaggaaatttgtttgtattttttatttacattttatatttttgtacatattgttagggtcagccatttttaatgatctcggatgaccaaaccagccttcggagcgttctctgtcctacttctgactttacttgtggtgtgaccatgttcattataatctcaaaggagaaaaaaaaccttgtaaaaaaagcaaaaatgacaacagaaaaacaatcttattccgagcattccagtaacttttttgtgtatgtacttagctgtactataagtagttggtttgtatgagatggttaaaaaggccaaagataaaaggtttctttttttttccttttttgtctatgaagttgctgtttattttttttggcctgtttgatgtatgtgtgaaacaatgttgtccaacaataaacaggaattttattttgctgagttgttctaacaaagctgtctcaagcctggtttttctgtttcagtttcttcagaccttccagggcacaaggataggagggggaggatcctggggacagtgggttgacattttgggaggcagttggatgtgtcctgtgatgggcagcagagtctggtgggtgggcagggactgagctgcagttggctgggggggctgctcactggggcagtcagtgattgccccaagaagccttaactggggaggaggacttcatcactgggtgccacatggggaccctggtgccctgggggtgggggtttgcagtcctagacactggaaacgggccacacgggactgccattatgtggagcgcagggtgctggtggtataggccaagagggaacttgccaagcctcccaggatgagcgtccaagtggtggctgcctctgcaggcctcacaggtttagctccatgacgtggctccccctgctggtggcacgtggtaccccccggcctcttagaatgccggggttttggtttggcactggtgcagcctggcagtcatccaacctttggtctccaggtcccttaggttagttgggcaggcccaccctgccccttgaacacagttggagaagttactgtgccgtttggatattcatacacgggctgtgagcagt

SEQ ID NO: 2126 - DNA, 6000 bp, Homo sapiens
tgccaagctcaagctatcctcccacctcagctttccatgtagctgggactataggtgcgtgcaccaccactcctgactaatttttaattttttgtagagacagggtttcactgtgttttccaggctggggctggtctcaaactctatatctcaagtgatcctcccacctcagcctcccaaagtgctgggattacaggcacgagccacaatgtcctgccagaaaacccttttagcattgcttaacctagcgtttctccagatgggatggagtcacctcccctttctcaggtacaccttggggcagagagacaactgggaggttccaggctgcatgaagacgggatctcacaccttatccagaagcctcccagggccatcgagtcacttcaatgagtgtgtctgcctgtaaggcccgatgggagcactgggaggtcagcgggccagagatcactgtgggctggagaagaggggattagaagcttcacacagaggacgccaggtgggcagctcagatgactcgagccatccccccacctggctggaatggttcaggcaggactcagatcctgctgagagactgaccatgagatcacagcctcttctgaggctgactcacctctctgtattcctcccaatctggaaaccacaccagaaaaggcatccccacacctctgtcccccaccagcaagctgtctttgttcatggaggcctagttggccctggagactgaagcctgaagccctgcattctccctgtttattagttgggagtctttcagttacggatgacagaaaacccatcctgaactagcctaaaccgggaggaaatttactggcttgtgtaactgaatactccgcgtggctggactgaagcactcaagcaatgtcatcagaattgaggttcctctgcctcttggctcagttctgcttctcactgagtagtctgcagcctcatcttctcagcctcttaagttcaaatccctgagggacaaaaccaaatgtttcttccctttccggcaacccccgcaaaaaaaaaaaaaaaaaaaaaaaaaatcccagaactccttctgattggatgacttaggtcatgtgccaactgtgaaccaaccaatgcagccagggcacctcaggccactgattggccaggaccaagtcacatgttctgccttggggcttgtctgagtgtgggaggggggaagttcagaaggaaagctatggcctggtggctcacgcctgtaatcccagctactcgggaggctgaagcaggtgaatggcttgaaccccggaggcggaggttgcagtgagccgagatcacgccactgccctccagcccgggcgacagagctagactctgtctaaaagaaaaaaaagctggacattgcttcagggcattactgccaagaaaagggtgaaggaatggctgctggtggcaaaaacaatagatgtcccctgggaccttatggaatccaccagcagctcctttcagtaagggatctgctccctgcccagagtctcacagtggggtccccacatgggtgcatgtaaaatgaggttgcttcaagtgaccacctggtacttcttgttgctgtgggtgacagccttgacagagagcccatggaggcataccatcgatccttggctatgctcaggacttcatggaatccacatcagtcactggctgctaggccttctctgcaaacaatgcatgtgtcattcacccagtatataaatagggtcagtgtgccggacggccttaaaatgtttcagccatgtttcctaatctgtgcttcctccacctctctgagctcaggccagacccatgagcgtaggctgaggtatcccgagaggaacagctcagagcacagctctgccccattccctggctggttctgcccatgcctccatgggcctggggtacagggaggacaagcagcgacacagcaaaactgagcacacttgcatcaaggagatgggctgctgagcagacaggttgggcatagcggggggccaggcctgtgaggcccagccagactgaagcaggccccaaataacacggggcccagggattccaccctcatgaagcagctcccaccaggaggggaccacgcagcagccagcgccctgaggcaggcagggctggcctgtatctaggacacaggcatccaacccgcaggcttggtagaggcagggtaggcagcagggccctggagggactgagatctgggaggagttaggaagggccagaggctgaggatcctgaccccagggcttgtgatagcagtagaggagaagcagtactgattcctggggctgtgtagccaacagccaagataaagccaggaagtagagctgggagcccctgactccccgccccccattctagtgactgagtcattctagtcattctagtgaacaccccccattcaaactctcctagtttgtactcagggcagcagtcccagtgagggtgtgtggagtccagtgaaggagtgtggagtccagtgagggagcgtggagtccagtgagggtctgtagagtccagtgagaatgtgtggagtccactgaggatgtgtggagtccagtgaagatgtgtggagtccagtgagtaagggtgcgtggagtccagtgagggtgcgtggagtccagtgagtgagggtgcgtggagtccagtgagtgagggagcagggagtccagtgagagagtgtggagtctgctgaggcagtatggagtccagtgagtgagggtgcatggagtccagtgagggtgcatggagtccagtgagggtgcatggagtccagtgagggtgcgtggagtccagtgagggtgtgtgtggccacagggaagcccaagaccgtggaagagtggacccctgcttccagctttggttccacgtaaaggactcagtccttgggagagggcatcagttgcccagaaggaaggtctgggaaatgaccactgactgtcacatctgactggggttccagcaacagagagggagaaaggtcttgttgcgggagtcaggtggagggtgactggcgttgcctaccttgggaccagggcccactgaagggtctttcctggacagaattcagcggcacgctttacagttcctctgtgtccaccagggggcgcccattccttgataatcttttaacctgggctccagtgggaggtcattcggggactttgggagtggtatcaaggtgactctgggccctgaggtatatcctcaggcagtggttaattgtgtgctaggctcaggactaggggtaagtgtgttctgctagaaccagcaaatgctgttccaggccaaacctttggtgggatgaggcagctcagacagcagaggcagtaagctctgctgatatgggtgtctcagggggaccctagcaaggcagccctgggccctggctcatgcctcatcctattgttcccattttgcagaggaggggattgaagcccacaaggttcagttacttgcctcatgctaacatgcctgccgtgtctgtgtgcggaccagggcacagcttctcccctttcaggggccttgcggtagtggtcccgagcaggactgcagcctgagggagctgggttagatctgctctcagctccaagcgctacctgccctgtgtggccttccttcacggccttcgcctgcactcctgccttagagacaccctcctgggcgccgagcttgggaacactgcagtactgagtcgccttgggcggcagaacagagaggagccagcgttttggctccagaccctccctttcttccctggatgagccaggatgcagatacccaggctgtgcagggggtgtggggtagatacaggtcagagggtccctcctaccaaggcctcaacctgcccccgatcctggtggcagctgcctggggacatgctgaacaagcggcctgagcagccccatgagagtgactaagctccagccagagaagggaaaggtccccccagaactctggtgcctggtgtgaaacacaaaggtcgggggggcatggaatggggtggacacggtgtcaaggggcaggtagagggaactggtctctcttgctctcttcaatgcacacatttccctccttcccagcatctccccttaacccaggccaggcctctgcagacacttcagtctgctcctgggagttttcctgcagataccactggatggcttcctcaggtcctacctgggcaacaggcccactagcagtgcctataccggcccctgcccctgcagctctcattggaggatcccagaaggttctaggtgagctctaatccttacctccacctctgagggcacgagctggtggcacttcctccagttggctatcctgacccactgctcacagcccgtgtatgaatatccaaacggcacagtaacttctccaactgtgttcaaggggcagggtgggcctgcccaactaacctaagggacctggagaccaaaggttggatgactgccaggctgcaccagtgccaaaccaaaaccccggcattctaagaggccggggggtaccacgtgccaccagcagggggagccacgtcatggagctaaacctgtgaggcctgcagaggcagccaccacttggacgctcatcctgggaggcttggcaagttccctcttggcctataccaccagcaccctgcgctccacataatggcagtcccgtgtggcccgtttccagtgtctaggactgcaaacccccacccccagggcaccagggtccccatgtggcacccagtgatgaagtcctcctccccagttaaggcttcttggggcaatcactgactgccccagtgagcagcccccccagccaactgcagctcagtccctgcccacccaccagactctgctgcccatcacaggacacatccaactgcctcccaaaatgtcaacccactgtccccaggatcctccccctcctatccttgtgccctggaaggtctgaagaaactgaaacagaaaaaccaggcttgagacagctttgttagaacaactcagcaaaataaaattcctgtttattgttggacaacattgtttcacacatacatcaaacaggccaaaaaaaataaacagcaacttcatagacaaaaaaggaaaaaaaaagaaaccttttatctttggcctttttaaccatctcatacaaaccaactacttatagtacagctaagtacatacacaaaaaagttactggaatgctcggaataagattgtttttctgttgtcatttttgctttttttacaaggttttttttctcctttgagattataatgaacatggtcacaccacaagtaaagtcagaagtaggacagagaacgctccgaaggctggtttggtcatccgagatcattaaaaatggctgaccctaacaatatgtacaaaaatataaaatgtaaataaaaaatacaaacaaatttcctttttaaagtacttttaagaaaaaaagcagggccttggaagttttggttcttttttcctcccctgttgcaaattctcatggtttgggttgggtggtggagagcgcgtgtcatctgcgggtggcactgcccacggtgggcgggcgggcctctctactcgaaggtgaccacgtttagattctgagacgggaagtggagggtgaataggtcacggcggcctttttttttttagtttaacttttccttttttgctgtctagtcatcctcgtcggtcttctgcttcttggtatcgacatcgtcatcctaagcagagaaagactgtcaaaggcccctccaaccccaggagccctatccagcccactgcctcagctcctgctggcagagcaagaaccagggacccccagctccacagcccaaggcctctgggaagttgagcccagccctgtttccttcctgttcttaagattcaggaccacacagtggccacctacaaagtcagaaacagtccctccgcagcttgagcacctcagctaaaggcaggtggggagacccagatgccaaaccc

SEQ ID NO: 2127 - DNA, 6000 bp, Homo sapiens
gtgcccaggcccagtgcatatacatttattaaggacagtcagccatgtggtggggctccctgtcacagctttttagaactggaaggatagaggcttctcagaatggcaaacagatcacccaacattttctggcaaaaccgaagtcttgctctctcttatagctagtgtctcactgaattcttggcaaagtaacgttctccaagctgctggggaagttacagaggatgggcagcatctagatgccccatgagcccccatttcccaacacggtccccttggaatctctctctttccctctttccattcacttcattcttttctctccagcctcactggtgtcatttcagttccctgagggtgtgaagcgctttcaagcctcagggtctttgcacatgctgttccctctgcccagcacgcccctctccactcctttcccttcgggtccaatgtcacctcccctagggccttctccagccctcccacataaagcaggtctcacctcatcctagttcacagcccactgtgctttcttttaggatgcttatcaccacctgtaggctttgtggttccccttctgcctgggtccactctggaatctcagctgcctctgtctcaccagggctctcactccctggggccacgctcggggctggcatgcagcagatgtccaataagtatttcttgaacaaatgaatgtcattctgtaggcttgtgaatcatgtaagcagcattttctccctcaacttaaatccactgtattaggctgttcttgtgttgctataaaggaatacctgagactgggtaatttatacagaaaagagatatatttggctcacagttctgtgggctgtacaagcatggctctggcatctgctcagtttctgatgaggcctcagggagcttttacttatggtggaaagcgaagtgggagcaagagaaagagggggaggtgccacatactttcaaaggccagatctccccagtactcagtcactattggggggacagcaccaagccatgaggggtctgtcaccatgacccagacacctcccaccaggtcccacctccaacattgggagtcatatttcaacatgagattttgaaggaacaaatatccaaattttatcaccaacagagggtatgtatctaggcttgcattttgataacaggtcctctctctgcattctgagtcagaggcaactaatttaaaaatccattcacccacattgacgattaaatttctactcttacagattccatttgaaaaatatcctatgccttgtgctcttctttgccctttagctgtgttttgtacatttgtattctattttccctgtgacatgggcattttgatcattaatgatttcacttcaccagaagaacattattctttttatttcattgctgagaatgtttttgtccatagagagatattttcattatgggccacatgcaatttctgagtagttatttcctaatatgaagtgtattttataggtggtcagaatgttataacatattagagagcttatgtagagtttgggatagtgtatattacttgggagttattcttgcccgggctgctttttctgggagtgttgtatctattctgagaagtccttggaatgaattggtggtgcttggtgtgattgaactgttgctggtgttagtaacagatgcagcacattgactgtcaaacctaccccaatctttccctgctcatctgtgtgcatcttactttcctagacaacagagccgctgagtacaccccaacacagaggagccagcgctcaccgagagatttgccaagtggagtccttttgagacatccaaatttcactgtcttcaacttattaatgtgaaacaaagaataacgtatatgtgtgtgtaaacacgaatagtaacagcttatatttgtaaacaatgtgccgtgcgcccagcactacattaagcagtctccatgcagcacctccattaatcctggggagcactgtacccacttcaaggtgagaacactggtactgagtggccctgctttatgtcacccagcaggtgagtggtgggtctggcattcaaagctgggcagcctgattttagaacctaccacactgtctttatacatagatgcatgtccacgtatatatacccacacacatcacgcacatatgtatcatctacacatgcacgcacccaacgcgtgcaaacgcttggggaaaacctctggtagagtataattcactgtgaactatggaatctgggaaagggtaggaacttaggatcgatgcttactttttactctacacatttctctaatcattttaatcctttgaaacaaatgtgttatctctgtactaaaaaaaaataaaaacccaagttattgattttgctgtatgtgttcccactggaaaggcttattgaataattgaatgttatgaatgaatagctcatttttttttcttttgatccagaggcctttagaagagcaagtaacaaaaactggtggaaaaaaagcacacattcaacaggaagcaacatctagagacctttctgccttccaggatacaaaaagaaaacagttcataaacaacttacatctaaaccagtaatgttgtctccctggctcataggagctgaagaagaattccagttactgtagtaagaatataaggtaatgtgttcttgttttttttttctttttttttttaaccactttgtttaaacattctgacctctgttaattcctctctaggatgtggactggtttgaggatgcttgaggcatgactatagcaagtactgcgcatacatatgtggacatcgtaagacacactctctgcttccccaggcgaaatctgtaatgctttgtttattcatgttctattctgcgtttccatggcactttgttctttgtggtttttagggtatctttctccctctctgctcagtgaactgagctgcctggacaggccttgagttttcttattcgattgttttttgtgtgtgtatgttttgccttagctccctcactagtatagtcaaggagcttttcatgctttgagccatttgtggcatttcaggaattaccttcatagcttttgtccattttctactggcttgtctttttcaatgtttttataggcattttttaaaaaacacagtgtggatgtcatttgggatagcagtactaatagtagctaaaacttactgaaagctactgtgtgccaggcagtctgctgagcactttacatgctgcctttcatttttacactcatttaggaaactgagtcacagagaggcgagataacttgccagagattcaagcacactccagacacatccctacaccaatcagacctcctagccacccagaaactctcctctgctcggaggcttctctgcttcctccacctgccccttcgcctcactgcctcctttcaaaatctgcggcatgtattttagggatactcgtatccattttcaggaattccatgatctacacacagatgacaccaaaatcggaacagcaatgtccacccttctcccgagccctaggtcggtgcctctgtccacctgtgtctcctgaaacttcaacacagacttcaaatggagtggcagaaaaccagattccttagggaaaggaaggtctcccagacggcaggagcggcaggccttaggggcagccgcaggggctcgggagtctgaacatacccggtttgaattcagactctggcacgccccatgcgatcataacatagtgctgcacgtctcaagccacctataaaaacggggacaataacaatatctgcctcggggttaatggtgaggactgactgtgtgtgtctcgctcaggaccaggagcaacaaatgttggcttcttccccggcaaagacccgcgctttctcctgggctccgggttcccggggtgggggtgggcgcagtcccgagggccccaggcagtggcgcagtggttagaccccagcctctggagtcggcctcggttcagattctggttctacccttctcctctgtggcgaaccaaccctccgagctctagtttactcgtgtgaaatggactagccaaaattgggatttttttttttttttaggattagatgtgtcggtccatagacgttgctggccacatagttaagtggtgcgttcactcactgggcattgatggagcgcctactacgtgccaggcctgttttacgcgccgggggcccagaggcgcccaggtcagacaaagtgtaaacgattccgaccagagcccttcaatctgcattccgcttcgcaggaaactctcctccttttatgattttcagccggactgccttccctgttgttagtttgtaactttcgctccggcccccgcagcctcgcgcctgccttccctccactgtcctcagccaaggtgtagtaaagcgtctccgaacgcggcgcgaccctcgcccacgcccgctcgcggggggaccgcaccgccccaggggtcctcgctaggggttcccggagaaggggtgggagatgggggtgcgggggggcacaggagcgcgggccagcacccagacctgctcggtaccggggacccagacccgaggatgccgggcggccaaggccccgctaccctggccggctccgggcggaggaagaagaggaggcgcccagactggatacccgcctggacccggagccgcggcaccacccccagcccgccccacgctcgccagcctcagacggccgcgccccgccccgcccctctcccgaagccccgccccggcgcgggaccaccccctccgcggcctcagctccggtcctggccccgccccccgcgcccccgcccccgcccccgcccccgcccccgcccaggcgcgggaccaccctccgcccgccgaggcgggggcccagcgcgcccggcactctcggcggtccgggcccctcgccactaccgccgccgccgccgccgtgagtcccgcggagccgcgcgcgcccccggctgggccgagccgctggccgacgagcggagcctcaggagccggcggggacgccatgcgagccaggtaggcaggcggcggcggggagcgcctcgggcggcagggccctgggggccggcgggggcgcggggtcgtgctcgggggctttgcactcccttgcgggcgcagatcgtgccgcgggcgccgatcgtgccaccgccgcctgagttcggggctgcgcgggtgcctgggcgtggggcggcttcggggaagcctcgcgcgcccctcgccgctcccccgggcgctcgggtctccctggtgctggtgggcagggacccggcccggggttccgggcgccgagccgcagccctccgcgtgcgctcgggccgccccccaaccccggctctggccacttcccggcgggcggccctgcggggtggcctccctgggcaaccggacgcgtcctcgggcgcaaatcggggggcgcgctcggctcacgggggccgtgggggccacgggagggcgtggaggggtcggggcgcccccctcgagcggcgctggggaggagggaaggacgcgcggtctccggttaaacttgttggtgacaatgcatatttcaacttcttcggagatccctcctgtgaggatgaaattgaaaactccggtttctggcttggcgatcgggtgaccgagcagccgcgaggtgacagcgccggcggcccgcgggcggggaccggctgggatagaggcgcgttgttctctgagcgatgtttaccgagaagcccgctccgcggcacgggcgggtgtcagttgggaccccaaccctgggtcccgcggctcctagcccggggcctgcggtgtagacgggggttggggacaggcccagctggccctgaccgggtgtcgggcgcccagagatgccgcgcgggaggagccgcgggagagccgccggactcagcgagcagagggtcgtggagcctgatggatcgatgagatctgaaaaagaacactgtgcgagattgtattcctgctta

SEQ ID NO: 2128 - DNA, 6000 bp, Homo sapiens
ggcacaaggatgagtgacttctgggctcaagggatcctcctgcctcagcctcctgagtagctgggcccacaggcgtgtgctaccacacccagctaagttttacaactgtttttgtagagagtttccctatgttgcccaggctagtctcaaactcctggggtcaagggatcctcctgcctcagcttcccaaagtgctgggactatagatgtgagccactgcacctggccaagcctggatttttggggggctgtgaggctgcactgccaacatgagccagtctccaagtgctccgggtctagtaagtcaacaggggaggctttcagaactcagcagctcctcactggctctgggaaaactcatttagcgatttgtgaaggacctggcgcagtggctcacccctgtaatcccagcactttgggaggccgaggcaggtggatcacctgaggtcaggagttcgagaccagcctggccaacgtggtgaagccccatctctaataaaaatacaaaattagccgggcatggtggcgcacacctgtaatcccaactactcaggaggctgaagcaggagaatcacttgaacccgggaggctggggttgcagtgagccaagatcgcactattgcactccagcctgggcaaagagcgaaactctgtctaaaaaaaaataaataaataaaagagaaagagagatttgtgaaggtcatgagttccagcccatttcactgctccataaaatgctacgttggtgaaatgggcaggatgagttgctctgtggacaggcagccctggagctaacaggagtatcctgcatcccaccacaggatgtgctgagtccacttggaagcccagaaaaagcttctgtgtttagcccttcagtttcttgccttagtgttaggctggcgcgggccttctggtgctcagggcccccgttccctggtctcattttacactaacaagggcttcatgcagcccgcggcccagggcgttcacaagctctcttagttccgaaaaatcgaggggttccttgccagcttctctggctcctgtctgcctcctctttgttccctggctggtgttggggtgctttctggacaagggtgaggggaggggaaggaatctgagccagtcagtgtgcccacactgggggtgctgcaggtcgcgtttcaccctggcacgccctgcctgccccgttacgtggcgatttgtgatggggatcataataaaacttagcctgattagaggcatgtgggaagcatgcccagcacacgtctcagtcccgtccctcggagcaggccaagctcgggcggcaggcagctgccttgcaattctcggagtttcaggaactggacaggggaaggttggcttgcgatgtatttctctgggttcgtttggtgccgggattgagtatttctggtgagacagttgttggagagctcctggggagacaggcattttgtggttggttgcattgttatcccacagggaattggtttcttgcctccaggaaatggcagtaacatcggggacagcagcagttgcaggacgacagacgtgtcactgagggtgcagggtgctatggctggagctgctgctgttctccctatcactcgtggggaagccaggcctggcgaggtgcaggcacttgctgaggtcacggcggccagactggagcccagaactctgtctgcacctaagcacagtgtcccttacctccagcatctgagtcccatcgtctaatgtggctttaacctcaggatcgggcctaattctagaatcctacctgcaagacaagcactgtaagtggcttcatttcatatatggggaaactgaggcaccgagcagttcgctcaagctttgagggtcaaaaattgaatgaaagttgtttgaggctgggcgccgtggttcatgtctgtaatcccaacacttcaggagactgaaacaggaggattccttgagtccaggagttcaaatccagcctgagcaacatggtgaaaccccatctctgcaaaaaacatgaaaattagctgggcatggtggtgcatgcctgtagactcagctacccgggaggctgaggtgtgaagatcacctgagcccaggagattgaggctgcagtgagctgcagtcatgccattgtactccagcctgggcaacagagcaagaccctctctcaaaaaaaataaaaaataaataaaagtagtttgaccaggaacattcaaccttagcttctctctaacctctagtggcttccccacttctctgcctaaaagaagctatttcttttctccagcctcagtttcctgtctcgtcagccccatagaaactgagctctccaaattgaacgaggaccccagaacacgggagtctgtgccgagtttggcaccagggatgatgtgtgtggttgtatcttctagggacaggggccctggctttcatctagtgacccctgtggaggactcctgcggattccccatctacccatgaagagcggctcctgcggggtggcccgggttaccccagcagcagcccacctggccaggtttgaagggcttgggcaggacaggtggtatctgggcccttctcctaaaaattgcctttttataaatgcaggccaggctgtcacctttatttatttattcattcagtcacttagattttaaacttgtgttgaccttatagtcaactgatagttctgagtagttaagttagatccttagggggtgacagggccggtgtgtaccaggttaaggtctctcttgcattttgtgggtggctgcctgcagttaagcagggctaccgtctctcggcccggggcttcttgtttcatgataaatacagaagccgatgtttacccgcctctggtagcggacataggggcatctctgagcagagcaagcaggggcctgcggaaggggttaagaggggctgggcaggtgaccaaggtcaccatggcagggataagtcacgctgatggcattgtgtggcaagaaggacacctgcctctggtcttcctctcagtaacacacaacccagtctaactgggagaaaaacccccagccgaggggcgtcttacagaatacctaaccaggcctcctctactgtcaaggtcacccaaaacacacaatgtctggggagatgccctagccaagaggagcttaaagagacacgacacctaatgtcatgtggtgatctggatgggatcctggaacagaaaaaaaggacctcagggacaaacataggagacccggatgaaggacaggctttattgtttgatgatagtgcaccgacatccattgtgacaaaggtgccgtcctcctgtaagacactcacagggaagccgggtggcgggaggcctgtgggaattctctgtattatctccacgacttttctatgaatttaaatctatcctaaaagaaaaagcttatttaagaaaataggtaagagtggttaggaaggctggttggaggctggggttccaggcctgaccctctgcacccgtgtctgcttcaggcaggtgacactgggcacctcctgccggggagaagctcagggtccccatttcctggccgggaacttccctttcctacagaccctcgcttggtgcgccatggcagctgggcccaggcctcccagttgggccgaggcccatctcttttcccaacagcacatcctttgttctctccagcccagacgtgtagaggtgagccaccctcctggccagtgaggagcttctaaacacggaggcagatcagctttttgccgagtgaacttgagaaccggagcagagctgcagggacaatggtgcattattaaactgctctgaaactcagagcccagagcacccagctctggggcgactggcaggtgttggacctgtggccgtggtgccagcccccactaatcccattagcgacttaggggtgagtggatggaaaacaggatgagagtgtctctcccccaaagagggctggttcaagtatgaatattcacagccacaccgaggcacctgctccgtagatgatttttttttgcttatgcagttagtgcacagagtgagccctgcgctgggaaagacacgcacacgcatatgcacacacatgggcacacacacacatgcgtgcacacacacgcagaccctgagaccctgcacttgagtttctagtcttaagcaagaagggtgtcaccgaggttgtgtcctgcagctgctagtggccagtctgtcccacttggatggtctgtttctattttattttattttttactttttttgagacagagtttggctcttgttggccaggctggagtgcagtggcgccatctctgctcactgcaacctctgcctcctgggtttaagcaattctcctgcctcagcctcccgagtagctgggattacaggcatgcgccaccatgccggctaatttttgtattttttagtagagaaggggtttcaccatgttggccaggctggaatcgaactcccgacctcaggtgatccgcctgcctcagcctcccaaagtgctgggattacaggcgtgagccaccatgctggcagtctgtttctattttggcatttcctcactgcacctggagaagagcttcattcattaattcatccattcattcattcattcaacaagtacctgacagcctgtacagcagtggtgccaggtgaggagggtgggtaaaaatgcagggtcctcctcactgcagtcactgcgggaccaggtactcttttcctgcgccccacactgccccaaggccccactggtcatccgtccagcactctgtgctcgctgactggtgcggtgaactctccggctgggctcctttcctgctgcaggtgccgcgtctctttcttaagcctgtgtagaaagttcttttgtccgggtgacattggcatgattgaatcagtgccagagccaaacaggatgtggttctgggcgactcccaacttccagcaaatccgtggttgttttcagttaccttaagagggacaactgaaacagagacaagcaccccaacagtagggtgcttcgaggtcctggaggggagccctggccctgtggagagagaccgagtcgtgcagcgtccgtggcctgcatttgaaactgaagggcaagaggctggtgagatccgagagtcatgccgctgcgtggaggaacatgctgaacctctggaggaacggctctacctccaggtcaggctggaggcttttgcatttggtttggcgaggagagacagcaggatttctgggtgccggacatgcttctcggtcagagctggtgcgtttctttgcagggcaaggtggaggcggggatgccagggaggcatctgctgcatttcttgaggtttcacagggtgcagagcccctgtcctcactgttctgtggggtgctaagggagcaagccatgtggtccctgaactttgagtagatacaggtaatatttgaaaatatttgggaatgtttacacaatcacaaaaacaatgaacacttgtgtagccactactcaggccaagaaatggaacttaactttgaaattccctttgcccctcccaatcccagcttccagctcccgatcctctccccttcctgcaaaaatgtgtttatcagataaacctgaagcatttgagggagtccctgtcctgaatttcgcagttgtcattctctgctgttttttagttttatcacatggggttgtgtttctaagcaacatcgtttgtttttgtttttaacttttatgtacatggaatcatgcagtatcttttgtggctggcagactctgagatggccttcagtgatccacacctcctggtgttcacatcctgtgaagtcccctccctttggcgtgagccgagctagcaacttgcttctaaccagtaggatgcatccaagttgatgctgtgccttcctcccgtgattacattatgtgggcttagaacttcttccttgacaacagatggtctcccctgctggctgtggtggagcaggctgccatatagaga

SEQ ID NO: 2129 - DNA, 6000 bp, Homo sapiens
tatctggagcaggtcttgggttaaagtgttggagggcagagggtccgctgaaagatatggaagagttgaaagtcttagggctgtaattttctgtccttgtgatagtttgctcagaatgatggtttccagcttcatccatgtccctacaaaggcatgaactcatccttttttatggttgcatagtattccatggtgtatcgatgccacgttttcataatccagtctatcattgatggacattcgggttggttccaagtctttgctattgtgaatagtgcgtaccactcatagggtggaattgagcaatgagaacacgtggacacaggctggggaacatcacacatcggggcctgtcgtggggtggggagaggagggagggacagcattacatatctaatgtaaatgacgagttaacgggtgcagcacaccaacatggcacatgtatacgtatgtaacaaacctgcacattgtgcacatgtatccttgaacttaaagtataataataataaaaaaaagaaagttttagggctgtgagaagagccctgaactaccccacccctgctccctccactgcagcccaggctgcacctcccacatctgtcctacagcccccggctcgtgcccgcttgacagagtctctcagaccttgctgtctccttagtgaacttcatgtccttcttgaatttttttaaataattatttttttacaaaagaaaaacatgttcactgaagaattaagaaaacaagtgagcaaaagaaaacaagaatctctcattttccacttagaagaggacacatttttcctcattgtttttgtgtctataaatgctttcatttgtaaaaattacatcacattgtaatgaggtcttcttgtctttcttttcccttgaaactataaagtgaatttctttccctgatataaaaccccttatttttggtgatatatgcatacatattcatcccaaccaaccattgtttctgtggaccttttagctaaatgtttatcagcatccatgtttgtctctttgaatgaggttctaaaattgcaatcactaggtgaaagaaggtgcaaattttgcaggttttatttatgagtgtggttaagtagctgtctgaaagtttctatcagttgacactcagttgctgtataatagcgtttatttccacacatttgcttttatcaaacaaagcattgcacttcttttattagagaacatcctgtcatgtttatgggcgtttcttcttttgtctttgcctctccttgtccctgcctgctttatgtatgggctgctccgctctgaaaaccctcctgcctgtgaagatcagcctctacgaatcccacgcaaacgctttccccactcacttgtcttaattttattgtgttctgaagcaccagaagtccccccttcccctccaaactggggcagccactgccttcaacaatttttttttcttctgaattaaaatcttcctgagaaaggcacagctcttaaattcaacgagttttgatcggtacgtacccctatgcgatctacaccccagacagaaagtgtattatctccattgcccgggaaggttctcgtgtccttcccagtccaccctctgtaggcccccaatctggagagaactgttctgatctctaccccatatttggctgaatttcatattaacagtcatacagtgtaaacccttttgtatctgacatcttttatgatgttcttgacgttcaaccgtctataacagttcattcttttttattgctgagtaatattcccttgtattttgcagttggggtttatccattttcccactgattatacactaaattttaattacaacatagctaaattctcaattatttccctttatgactgttgacaatattctttatattccacaaccctatagagatgtccagagtttttccttagtactttttttaaaactgaagtctttactccatttgatgagtaaagatttcaactttaatatcttctcttcaaatgattagcaggtaccctaccatattgctttctcactgatttgaaaagccactttcattatactttaaatccctacaggggtggtattaaaactagtcaatagttggtgaggcacaggcactgaccagcctgcaaagctgcccattaagaacagctggagcacactgatcatacacatatcggctgggtatcagcctggagtcagtacatttgcttggggccattcctttactttctattattttgcattgatctgggccaatatcacgttgttttcatttcggagcccagataacatgtttttattttctggaagcacagtttctccttcattactcttctttttgactgctctcaaatctttattcttccagatgaactatttaacgattttcacaattcccaggaagttctgttggaacttactgttacatttaggtacttaaaatgtttttgctaattgagaatgtttcatattttctaacacatatgtaagtgcttagcacaaagctcaccacatactgaatatgcaacaattatttaattaccgattgaatgttgtcagttatctgaaagttactgttatttgtatattttataattggccagcttgccgatcgtagccagtctaggagttctaccaatttattggatccaccaaccctagattttaaaatttgagtctttgatgctggtttctttcaactgtgagaacacggagattcctttgagtgtgattcatttgactctgtcaaatacctgtatgtgaagtcccaagcgcgaatgctcccaggcattggggttgtcaccccacctttctccttatacacagctcacaggatagcgtgtttgctttcactgcacactatcgtactgaattgctctgcactggctgtgcaccggtctccttcagacagcccctctgacacataatggcagacacagccacccaggccaagtttctcttttccagacatggcgagtgaggttcttgcaccatccacccaacgtctgcgtggtgcctcactctgctggagtgcctctcaggactcctgtgaggactaaatggcacgcagcaatggggctacccattccttctaatggaaatctactttttaaaaattacctctgcaagcattagatcccagagctcgtttcacgtgactttttgcgcaggcacttctctttgtacgtgaaaaactaactttggtagacttacaggcaggttttaatattttctcgtgattgtatgtttttgagaatcctgtcaaatgatactgaatcttatctagatgttagctagctacagaccctgtttcattctacatgaaaattagatagtgcaccgtttccatcagcagccaagtctccaaaaccccgtaattgctctccttttcttcagctgtatcttgttttaaagttctctaattcaccattcctttccttctaagtttagcctaagcatttcttgcaatgaccaaagttttctaattattaatgagatatttaaggaaatgtaaaattggcatttttattttgctaactgtatttttatccacataactagtttcccccaccaagaatcacaggtcgagaatgctgtaaaaacggatcctttctcagctcctaaaaggaatggcctacaatcgaagcgaacgcgcatctccgccaggtccgcaaccacaggcccacgccgtcgggccccacgaaccggcgcgcgctgtcaaaggcgcttcctccctggaacgcgggattccggggacagtgtgtgcactcaagttgaaaagttgtcatactcctgttggaaagaaacggaaacatcaccaccaggagggtggccactgaagaccctcgccgacacctgctggcaaccaaaggcgcttccggggatctacgggccgacctgtaactcaacacaagcctcccaagccctgcggccttaaaacaacgcccacccgggcggtgcgccgttcccgccacctccacgcctgcctggacccggactcgagaccctggcggcgggccgggctccctccgcctgagcagggacgcggcgagcgcatcccacgaccctcggcagccgttgcaggcctggcggacctacaccccacaccctcacggccgcgttcccgccgcggggcagggcgaggcccacggcgcctgcgcactcagtgaccgggccgccctgcgcctccgtgcgcacgcagcaccacgtgacccactgccagtatccaagatggacgccgcggcgaggcctggccggctccccgcgttagcctgcaccccattgtgtgccctctaagcgcgaattaggctcgcagacatgcggtgctgaccgctaggcagccatgcgggctaccgagtgcgaccggacacggccggggcccgtgtttacggccactactggcccccggtccctgcgcctcctcaaccgcgaagcacccagcggctggcgcctggagcgtcttttggtacgccccaccctctagaattggcagctccagcagccaatgaggtccaggacgcgtgcggggaggcgggcaggggtggagcctctctgccgctcatagggcatccggccccgcggttgagcagccgctgggcgaggggtgggagcagacgggctgtgcgcaggtttcagcgggccaatggaaggccggccaggcgcccggggcgggcgggcgggaggcggggccgagccgtaattgacgagctcttcattagaaaccaggcgggagggcggggcccgcaaggggaggtgacgcaaggctgccgcagccaatggttggcgagccgccggctggctgggcggggccgggccggctgacgggcgtgcggggtggcctatcgccgcctggctcgacgctggagtggggagaagcatcatggttcaacgtgggtcaattttttgtgaatgaggaggggaggttgtggggccgccgccgcggagcaccgtccccgccgccgcccgagcccgagcccgagcccgcgcacccgcccgcgccgccgccgccgccgcccgaacagcctcccagcctgggcccccggcggcgccgtggccgcgtcccggctgtcgccgcccgagcccgagcccgcgcgccggcgggtggcggcgcaggctgaggagatgcggcgcggagcgccggagcagggctagagccggccgccgccgcccgccgcggtaagcgcagccccggcccggcgcccgcgggccattgtccgccgcccgccccgcgccccgcgcagcctgcaggccttggagcccgcggcaggtggacgccgccggtccacacccgccccgcgcgcggccgtgggaggcgggggccagcgctggccgcgcgccgtgggacccgccggtccccagggccgcccggccccttctggacctttccacccgcgccgcgaggcggcttcgcccgccggggcgggggcgcgggggtgggcacggcaggcagcggcgccgtctcccggtgcggggcccgcgccccccgagcaggtgggctccgggccgccgggagtgagggcgggggcgggcgggcgccggggccggccgggcgccgtttatgtaactttgtcaaatgctgtgagtttgcagaaaaacgtccctgccgggggtccgcggccccgcgcttgtcgtcgccgctgcgagcgcccggggggtcgcgggagggcggggggctgcccgggacccgctcggctcagcccgcagggcgccagcaggccgagacggggcccggtcccgctcgggggtgggatccgcgtttgccggcgttgcgaaaacacaccacggaatcataagcaaattatctcgtatttacattgagcgttgaattatttgacactgttataggaggagaccgtgcgtatcagttggaaaggccgggggtggaacccagtgtactcatttaatgcacatcaaaaatttgtaataacttgaggcagctgatatgagtgttttctttattgcatgttgtaaattgacctgctgtgacacagt

SEQ ID NO: 2130 - DNA, 6000 bp, Homo sapiens
aaggtttctgggttggtattgaaagagtagattaacttggtcctcaaatgctttcttccaataaaatcttccaaggtaatcaacagaccgaacaacaaacactaaaagctgctccggctgaagtggacttggagcattagctcccttccgtcacccccacctgcctccaggcgtcctggggactttgcaggagaagaacatgatgtcttctagttctgcagtcccacacgtgacataagacagcatgagaaagccagaagtactgcccagacctatgaaacgcgcctgtaacagcgccaagaacagtcaacacagcactagaaagtctaacgacactgaactagaaaggtattccaaatcgtcctcttctctaagaggctgtgttcgcccaagcacctcgacaagctgaacttcagcttcaaggtcaccaccagcctagaagcagaggcacggagaggaactggcctttgggactggagatgcagggggtggcacatggtccatttcattctacccccagttcctccagaggtagagcccacctgcaggactgtgctgacacctacatggtgagtgcatgaaacagcacgagccccaagcaggtgctcatctggcgtcagctacgggagcacgtgacagctgctcgtggcatcatctccttgctccaggatacatcctcatcccccgacagtgatacaggaagtcacggtgggggcaatctatgcaggaccccgaccttccttccaggaagtgagtaggaggtgtgtcagcaaggccacagcaaggggacatgtaggaccctgaccctccttctaggaagtgagtaggaggtttgtcagtgaggctgcagcaaggggacatggccatttaatgctgcagcaccatggccctcatgccaccccaaaacaggtcccactcttcccacgcacagaagcccaagagaagaaaactgaccgtatgaagagaacttactgaccttagtgacacttgttcccacagaaacgcttatgaatgagttaaggtctgttcaaaggtagcatcacttttgacatggcacccctcatctgacctgaaccagaaggtgcagtacccgcctctaacgtcaaggccaaaaacccagagcccaccacacggcagggcatatgctgaccacctgaaatcaaaacaaacactccctccaaatccatcctttccgactccttaccccaggacagactgggggctgccaacaacagggcaggggctcagtctcggttccacagccccaagcttaggtggagactgggccccttcgcccttcagttcccccatccccagctagtcatcaattctgagcctcggaggaaagcccggccacagcctgtcgccccgctgcctctcagcaacggcagttctctcggcctctgcggctccttcgcgccctacatcaggtattaatatattactcatggcagcttctgagctatgaaagcccagccgttttcaatagagaatggtatggatgaattctacaggagtgatgaaatgtttcttctgctccggcaattaagacagcataaagtcgcctttcctttggtgccacccccaacattaaaggattggaattcaaagccattcatgctgcattgaaacctcacaatgaagctggagaatggaagtcgattactgggcataaatatgcagtagttaaaaggaaagagttataacaaaattaaactgcagcaaccccacaatgtgtggaaacttccagcactagagtcctcctggtaaacatccatagggcattcttctcaacgaggtctctggccacagagtccagatgggctgcctgagccgcacgtggccagcgtgccaggttgtcctgtccatcttgctacagcaacagcccccaaggcctccgagaatatggcatttggggatttttattttgcatggctaggaagctgctgaacacagaacattctctctggtgcagggctccgaggccacatctgtccttcgtccctaggccttccaggcccatatgcagtccagtcatcttccctccaccccgtccccttagcccagggctcccccgggggcatgcctgctgccagctccccttgcaggagaaagaaccctaaagagggcagcgttacatctgcctgctgagtacagccggcttcttttctaattgattactgctctctttaggatgggatttgatctctaaaataaaagcccagaacacagaaagctatagaagtcttacaatgtgttggggtgtgtgtttttaaggcatgaaaatacttccctcccacacaaatgtgagttcttctggggaaagatgccacagatcccagagagtagaatatctgggaaagcccgatcagtcttaaaaataggtaattgaacacagattttagaattcacaagagctacctgaaaaaaaattaaatttcacatatttttgatatccaaaactccattctgatgaaacttctaactcggtggcattttgcatttccaattataatagagtaattgtgttgccatagttactgcaaaattctgcaataacttttgttgctttgtaactgctgtagtgtatatttgtgtacaagcagctgagttttcttaattcgatctccctcccttccaccctccctctccccagccaccaccaccacctttcctggctaggtcctgaaaccaccacaccagccttctttggacagtcccgaaaataatgcacagaattatcagaagcaattaaaactccaggcaaccacgatcatattacaaaagaaaaagtgaaaccaggtcaaggtgcaaacctgccagtatccccccagtcctgctgggctggcgctgggccaggactgtttacaggcttactcccaggccttaactgcttcggtgatttgtgggaataaacagaaaagcctgaacagagaaaaacggggcggcaaagtgactgcacaggccctttcctccctcacggagagcaagcagaactgctctcagcaagcaattaggtaggtctctacagtcatgcaattaggatttagtgaagaaagtcattagttttaaaataacttaagtttaatttctgcaacgctttatttgaaaactgtgtcacagcaggtcaatttacaacatgcaataaagaaaacactcatatcagctgcctcaagttattacaaatttttgatgtgcattaaatgagtacactgggttccacccccggcctttccaactgatacgcacggtctcctcctataacagtgtcaaataattcaacgctcaatgtaaatacgagataatttgcttatgattccgtggtgtgttttcgcaacgccggcaaacgcggatcccacccccgagcgggaccgggccccgtctcggcctgctggcgccctgcgggctgagccgagcgggtcccgggcagccccccgccctcccgcgaccccccgggcgctcgcagcggcgacgacaagcgcggggccgcggacccccggcagggacgtttttctgcaaactcacagcatttgacaaagttacataaacggcgcccggccggccccggcgcccgcccgcccccgccctcactcccggcggcccggagcccacctgctcggggggcgcgggccccgcaccgggagacggcgccgctgcctgccgtgcccacccccgcgcccccgccccggcgggcgaagccgcctcgcggcgcgggtggaaaggtccagaaggggccgggcggccctggggaccggcgggtcccacggcgcgcggccagcgctggcccccgcctcccacggccgcgcgcggggcgggtgtggaccggcggcgtccacctgccgcgggctccaaggcctgcaggctgcgcggggcgcggggcgggcggcggacaatggcccgcgggcgccgggccggggctgcgcttaccgcggcgggcggcggcggccggctctagccctgctccggcgctccgcgccgcatctcctcagcctgcgccgccacccgccggcgcgcgggctcgggctcgggcggcgacagccgggacgcggccacggcgccgccgggggcccaggctgggaggctgttcgggcggcggcggcggcggcgcgggcgggtgcgcgggctcgggctcgggctcgggcggcggcggggacggtgctccgcggcggcggccccacaacctcccctcctcattcacaaaaaattgacccacgttgaaccatgatgcttctccccactccagcgtcgagccaggcggcgataggccaccccgcacgcccgtcagccggcccggccccgcccagccagccggcggctcgccaaccattggctgcggcagccttgcgtcacctccccttgcgggccccgccctcccgcctggtttctaatgaagagctcgtcaattacggctcggccccgcctcccgcccgcccgccccgggcgcctggccggccttccattggcccgctgaaacctgcgcacagcccgtctgctcccacccctcgcccagcggctgctcaaccgcggggccggatgccctatgagcggcagagaggctccacccctgcccgcctccccgcacgcgtcctggacctcattggctgctggagctgccaattctagagggtggggcgtaccaaaagacgctccaggcgccagccgctgggtgcttcgcggttgaggaggcgcagggaccgggggccagtagtggccgtaaacacgggccccggccgtgtccggtcgcactcggtagcccgcatggctgcctagcggtcagcaccgcatgtctgcgagcctaattcgcgcttagagggcacacaatggggtgcaggctaacgcggggagccggccaggcctcgccgcggcgtccatcttggatactggcagtgggtcacgtggtgctgcgtgcgcacggaggcgcagggcggcccggtcactgagtgcgcaggcgccgtgggcctcgccctgccccgcggcgggaacgcggccgtgagggtgtggggtgtaggtccgccaggcctgcaacggctgccgagggtcgtgggatgcgctcgccgcgtccctgctcaggcggagggagcccggcccgccgccagggtctcgagtccgggtccaggcaggcgtggaggtggcgggaacggcgcaccgcccgggtgggcgttgttttaaggccgcagggcttgggaggcttgtgttgagttacaggtcggcccgtagatccccggaagcgcctttggttgccagcaggtgtcggcgagggtcttcagtggccaccctcctggtggtgatgtttccgtttctttccaacaggagtatgacaacttttcaacttgagtgcacacactgtccccggaatcccgcgttccagggaggaagcgcctttgacagcgcgcgccggttcgtggggcccgacggcgtgggcctgtggttgcggacctggcggagatgcgcgttcgcttcgattgtaggccattccttttaggagctgagaaaggatccgtttttacagcattctcgacctgtgattcttggtgggggaaactagttatgtggataaaaatacagttagcaaaataaaaatgccaattttacatttccttaaatatctcattaataattagaaaactttggtcattgcaagaaatgcttaggctaaacttagaaggaaaggaatggtgaattagagaactttaaaacaagatacagctgaagaaaaggagagcaattacggggttttggagacttggctgctgatggaaacggtgcactatctaattttcatgtagaatgaaacagggtctgtagctagctaacatctagataagattcagtatcatttgacaggattctcaaaaacatacaatcacgagaaaatattaaaacctgcctgtaagtctaccaaagttagtttttcacgtacaaagagaagtgcctgcgcaaaaagtcacgtgaaacgagctctgggatctaatgcttgcagaggtaatttttaaaaagtag

SEQ ID NO: 2131 - DNA, 6000 bp, Homo sapiens
atttgttttatgaagacagcacagttttaataacaaacccagatggagacataagaaaggaacaaaggaatgaatgaacgccataggccaatctcactcacaaatataaatgcaaaaatcctgaatacaatatttgctagcaattagattccaggaatgtatcaaaagcatctaccaatattaatccaacaacacagtataggggaaaaaaaatcatgcattaatagatgctgatgaggcatatgaaattcagcaaccaatcataatgaaaacagtaagaaaactgctggcagagtgtggtggctcacgcctgtaataccagcactttgggaagctgaggcaggaggagcgcttgagctcaggagttcaagaccagtctggacaacatggtgaaacactgtctctacaaaaaatacaaaaaaattagctgggtgtggtggcgggcacccgtaatcccagctaagtgggagactgaggtgggaggatcccttgagcccaggaggtgaaggctgtagtgagccgagatggtgctgctgcactccagcctgggtgacagagtgagactgtctcaaaaaaagaaaaaaaggaaaactgcttaaatctaattcaggatatttctgaaaaccaaaggcaaatactgttttctaaacaatagaaaattaaatctatttaaattacaaccgataattcggcaggaatgcccttccataattatttttaagcacttacatgaaaacttttacatgaagacctatacaaaaagcaaacaaaacccccatgtgctatccattatccagcttcaacaattagcaactgaaggtcaataatgtttcatctatttccacaatcatcaatgccactgcctggatgattatgaagcaaatacgagatgtaacatttcatttatattccactacacatatctaaaaataagggctcctaaaaatgacaaaccattacacatagctagttctttaatgcaatcaaatatccaatcagtattcatattctctattctctcatttttttcatgtgaatcaagatccaagtaagatccagatattgcaatttcaccatgattatttaatactaccttggtgagtttactgaatataatgaaacaagaaaatcaaaagaaaacacttttttgctgattggactgaatacacagaaaatacaaatactcggctgggtgcggtagctcatgcctgtaatcccagcattttgggaggccaagacgggcatatcacgaggtcaaaagattgagaccatcctggccaacatggtgaaaccccgtctctaccaaaaatacaaaaattagccaggtgtggtggcgcctgcctgtaatcccagctacccaggaggctgaggcagaatcacttgaacccgggaggtggagggtgcagtgagctgagatcgcaccactgcactccagcctggcaacagagcaagactttgtctcaaaaaaaaaaaaaaaaagaaaatacaaatactctggttaaaaaaattctagaatacgataatttagtaaggtagctaaatataagatctcaagtaagtcaagtaccagcaacaaatatcaaggaatagaaatgggggcacatcatttacaacagaatttttaaaaatccaaacaagtagggaccaaactagaaaacaggtcctacataaatcaaatcatttttattttccccaaatgagtatgttatttagtccatttctaactggaatccctaacggtgtggcttttttcttaaaggattggataaaatgagctttaagttcacatggaaagattaaatgccaatgctgaggatagaaaagagcaggcacttaccttatcacctattacatgtatctgatttcaaacccacacagtgcaacatagaaataccatagagcacctctcccgcacctccacagaacccctcagcctcactgaaccctgtgcacacatatgggaaaatggagaaactatttgtcttaaactgacatttcaactttgctttgactttaccaagtttctcctgccatcttttttttttcctgtttttttttttctgaaacataacttggatccacaatgttttctctcataatttattaactaatgtgaaatggaaggtgaaagaggaattatgaacctctgaagcacatggttttcagtgagaaagccttgatccagcaacacaaactgccaagcactgtgattaacttaaacactgggtgcaaattggaccaaaaatgtagtcaaatgaaaattttgttccttcagatcgtgtttattccacatgccagaagttgtttaaagttctttaatcttgacccacagcttatttcttccacagaataaccccaatacacataaaaaaccaattttcgcaaaacaaaagatagaagatgaacaacatctggcgatgtagaacccggaaggtccatgatcttattcaaagcatctggattctttggattcggggaaggtccacgttcagtatacccacataacactcctaacagggactggggcagggataagtggcatgtatgactactaacagaacagacaatacaaatggccttacctcacctctgctgccaaatgagttttggtgtccccattcctccagacaaaaaaaaaaaaaaaaatacccacaacttcttcttttacagcagtttctgtatgctggtattggggataaaaaggggccctgaattacatttatgaatgatagagggaaaccctggcccctttccctaggtcaccttgctagtttaagagccagtcagaatgtaaatctgatctaattaaaacgctcttgttctttattcctggctgtggcactggtgagagaaatcaaggtggaagttgaggaaaaaaaatcaggacaacctttatagctaatgagatcaatgccaagattatacataacagtacacatcatgagttaggatgctgggtggtgcaaagaacccattaatgggagctatcaaaaatcactgaaaacaatgaggctcaaatcagaagtatcaagaatcagctttcatgacccctacaccatgatgtttttctttatgacggcagaactattttgaaacattaaatatatcggcaggcactgtgattcaaaaagtatttgagaacctactaggtgctagacaccaaccgaggcaatgagtatgggtgacaacatgtgccctgccctcacagcaccaatagtccactggacaaataccatctggaacatcaggtaaacacctaagcctgtctggaggaaatctaatttgggcggaatcccacaagcacagactaggtaaggagaaggcagttaaggtgggaagtagccagatttaagagtttgggcaatggccaaaggtgcagaagtttgaactacaagaagttcagtgtagttggttcgtgtgtttccgtggagagaggacaaggtctggtggcactgacaagaattagaccgaaaaggtaaaaaagcaagccaggtttgtctgggccagtaggccaggtcacagttgggactccactgagaccacggaagccacaggtttgctcctcatccccgggccaactcggcggcctccaaccctataccctaccccctgctgcctgtccgtgcctcgctggtgcagaccttcgtcgcctctcctcgccgaaggtacccgcagacagggcctagtcgctctcccctcgcttatccacggcatccagccgatgggcttggaggtttgggggctggccagtcctccacgcctcagggaggaaatggcaccgttagaaagacaagatggccacacaagctctaagtgtttgtcgggcctaaacctgtatcctccctccaagcaccaaacctcccgacctcgaccgcactcgacgccccgaggcccagcaccgacgacagtgcagaggaattcccgcagggtcaacaaggggtcaccggaatccccactcccgcgcccgggcctgcccgtgtcggagccactgtcgccggcactaggaccgcccgggacgggggagcccacgataagtgccgaagagcctgggctcggccgcccctcccccacaccgccccgccggcaccccagagccagccgaccaccgcccgagagtatgggacgagcggcgcgtcccccgcagctcctcgggagggccggcccacaacttgtgcggggtacaccggcgagacactcacccgccaaacagcccgagaacaggcgccgaccgaccgcgccgcggacccgcccagcgctcgcggtccgctcacagcccgccccagcccgccccgccccgcccagcgcgcaggcggattgcgtcaccgcgtcaccccgcccctttgccaactgcttcctggctcagtgcgacctggccttcttcccctcccccatgcggccggcttccgagtgcgcaagcccagagtcgtccgcgttgtccgcctctgcgcaagcgccgtgctcctcccacggcagttggccatatagaggctgggggtggggggggaggtcaagcgtagcctcttctcctttaccaagatggcggcttgtccctgtttcgccacagttcctaccttatgagctcggttttcttatgcttataagagtggaacaggtaatgagaatcttcgccttgcggtgggtaactggagtggggggaaggccgtttgttagaaggagacaagtgcccactgaggaggagagaggcggtcgcgggagggcaggtggtggcgggagtgcggagcgatcacggggagggggagccttcgcctctcctcctgtcctccaagaagatggcggcagcaccgagctggggcgccgagtacgactgggcgggggacggcgagcggccgcgcgaaactcgtctagcccaccaccgccgccgtctcgatgatcggggggcctctctgggattggctgcgcgcacgtcacgtggggccgacgggccctgcgcagaccatcgagtcgggcgtccctccccggggacgtggccttcctgtgcccgggctggggcccgccgccccgcgggggagggcggagctggcgcggcccctagctttctccttctggtgtggggcccgaggtgagacctggggagtgctccgcgagcccacgagcagcgacgtggctcggggacgggagggtgccgtgcctggctgcggcctgagcgggatgggcgcgggcggctccggcccgcgggttgtgccccggcccggggtgtcctttcctccctcccgcgtggcctggaggcactgcaactgttcgagactcacgtcaaggcttggcgcaaatacccctcgttcaggaagccttcctaggtttcccccgcttagaggaaacacttcctgagttcctaatggctgacccgcatggtgttgggaacctgagcctttctgacaccgtggcatgttgctagggtatttttgtgcgtagctcctttgaaaagtggttaggtgctcaaggctagctgctacatatcctctccattcgacttaaaaaatgagagggtcagacttgacatggtgtttggacgccatgtaaaatcgaaggaagtcgacttgggctttgcttattaaacagtgcctattatggtgaaattaaacggctgaaggaatgtggatgagtcgtaatcttaaggaacatgacgatttgcccctcagttttgcgttttatgtcctcagattcatagctacctataccctaagccctcaatcaatgacttcacatttatttggtgtctgcttaaggatagtcactttcttagcagctaacttccttaaaaccctattaagataggttaagtcacaattagggttttgtctaaggctcctggtagcggcacattgcataataagcttaatgttcatttagggaagcaaatctgggatgctgaaacactggatgaaacgtagtgcttaggtttatattttgattttttgacatgtaaaagtatccctaggctaaattcattaagtacacatgatattaggatgcttggcaaca

SEQ ID NO: 2132 - DNA, 6000 bp, Homo sapiens
ttcaccacaaaaaacttaaagtatttgaagtgatgaattatgttaacttgattttattatttattgtatccataaatcgtaacatcactttgtaccccctaaatatgtacaagtataatttgtcaatttacaatttaaaagataaaaacaaaaacaaaaattttagaggggggaaaaagaaaccttaagaaaattatgagtgccaatccagaaagtccaagagtagaattctagagagagagagagaaagcaaataggaagaaatcaaagcaataaatcaaaaaaatgcccagcgttgaagaacatgagttgcaaataaacaggaccaaagagtaggcaagacgatggatgaaaacagtctccaagggacatcactgttctgggagttctgaatttcacagaaagaaaagcctctgaggccagatgcaaagccttcactcccagcacttcgggagtctgaggcaggagaatcacttgaggccaggagttcaagatcagcctgggcaacatagagagctcatgtctacaaaaagtttttaaaattatccaggtgtggcggtgcatgcctgtagtcccaggtacttgggaggccgaggcaggagcatcactcaagcccaggagattgcagctgcagtgagctatgacagcgccaccgcactacagcctgagcaacagagcaagacgctgtgtctcaaaaaaaaacaaaagaaagaaagaagaaaaaaaagaaacaaaaaccttcaggtttcatggaggaaaacatagtcacacacaaaggctctaaaaatgttacgtatcaataaaagagaatcagaacggcttaagacttcaacaacactggaaacttagagaccgcggagcaaaatgatgtccaaattcctactcaggataagagcagaacgaggcactttcgtacatacaaattctgaaaacttcatctgccatgcacttctcaggcaactagtgaaggatgtgctccatcgaagtgagacagtcaaatcaagagaatgacataggttccagaaaagtgaggctccaacacaagagggagtgaggagagttacaggaagatttcaggcacagacaagcctgcagcagattggaggcgctgggagagatttattcaagataaaatgataggaatactaattttcttcaaaagaaaacggacaatttcttgaaagatttagataattgcttcagaatttggggttgaattgtagtgacaaaatatagaaaactgagcaagcagcaagcaaacaaaaacaaataagacttgtaataacccaggaaaacaaaaagttatccagaaaagtgaaaacaatcctattataccacttcgtccagctgtaaatggcaatatgtagtcataatataaacaatcaatactgaactaaccaaattaaggatatatcactttgggcagccatggatccgtttgcactgagaaggcagagggtgaaagaaagctaggaacttcctacctattctcagtgtcaagcgaagagacatcacatgaaacaggggtaggagacacaaatacagacgtcaagcaaatatgctctttagagttggaggcaaagatcaaggaaatctactaaggctgaagtagatactctgcaggggaggaaacatgattaggggaaggatgttggcacttctttcttacaagcctttctaggattatctgactctacaaatgacatgaagctgtaaccttgatttgaaataagattaatatgaatgctaataaaaagtagtaagggagagtatgtagtcaatgtattcttaccaaattaacaacaagtatcaacaagatgactaacacaaccacatgatgtccagacacgtctcagaacaaatgtctagctcatcttcaacggtattcgaggaacttcagtgtgcttggtaaaacaatagcctactagggatttcacttctaaaatgtctctgactttagaaataccaaaaaataacatgtaaccaagttttaaaatattatacacatgaaaaaaggttcttttcattattttcttggtttccagatgttgaacgttgtggtgcttttacaattgaagagaaaaagcattctgacacattatactggttggggttctctgcttttctacttggtcaaaaacctttacacgcattttggactttgtgtcatcataacttggcaattgggaaagccgcatgatatgcttctttcagaacttggttacttcttaccaaaagagggaaaagctttcgtatcaccatttgcctatgggatggatgcacaatgaacgggccataccaaataaaaatatcactttgtactccaaaaagcatgttctctgcttaagccctttctgtaagtttcagctgggacgcactaatggagaatccatatgacccacgaaggatcgtaagatatcccagtggacccggcacaatcatctcaaattctgttcaggtcagagtatcttagataaaactcactgaagggcatcaagtccttcagtacacagtctgagccaagccctctaccatttgccatggcaagagtataccaaattctaaacctgttgctcacgtatgccaccaactataaatgtcagcctcctctttcctagtcttcctgtccactcagcaccacctggaaaaactcttactcgtcttttaaaccgcagttcaaggaccacattctgtaggaagactttccaacaggtaaccactgcctatttcctatgtccacaccttacacatatttctatcattgcacttatcacaccataatgtaattactcttctacaaataagtctctcacactagaccacaagctgcctgaggaaaagaaaagtctatatcctctttttttgttggctttttgagacacagtctcactctgtcgcccaggctagagtgcagtgctacaatctcggctcactgcaacctccgcctcctgggttcaagcgattctcatgcctcagcctcttgagcagctgggattacaggcgcgcgccaccatgccaggctaatttttgtatttttagtagagacagggtttcaccatgttggtcaggctggtctcgaactcctgacctcaagtgtccacccgcctcgacctcccaaagtgctgggattacaagcgtgagccactgcacctggtcgaaaagactatatcctctcaacctttgtatctgcagaacccttaaccctacacagcaatttccagcaaatatttttttgaattgaaatgaagaagtgaggtcatgaggctgaagtcagacaactggaaggccaaaacaacaaaacctggaaaaatacgtatttactcaagaagaaattctcccaccaggccactgagaagttagctttgcccactggagaggacactgtaacagggattcaagtaagcctagtggcgctgagggacgtgatataggtcaactatatctttgaggtgctctccttacactcaatgcacttttacccgaatgacgttaatttgactcctgataagatgagctaagtcccttcaacagtgcttggcaccaagcaaaactaatagcagtaacaggaaagtttaatcctcatgatgaattatttaatggggtttcaaacgctgtccctgagacttgaggcagtaggctccagctccattttccccaagtctaaaacttgataggttgatgtttcagactcagagattcggtaatccaaatgatggaaataattcttacccaaacaccttttcaactatttttaaatactgttgccaagcatcctaatatcatgtgtacttaatgaatttagcctagggatacttttacatgtcaaaaaatcaaaatataaacctaagcactacgtttcatccagtgtttcagcatcccagatttgcttccctaaatgaacattaagcttattatgcaatgtgccgctaccaggagccttagacaaaaccctaattgtgacttaacctatcttaatagggttttaaggaagttagctgctaagaaagtgactatccttaagcagacaccaaataaatgtgaagtcattgattgagggcttagggtataggtagctatgaatctgaggacataaaacgcaaaactgaggggcaaatcgtcatgttccttaagattacgactcatccacattccttcagccgtttaatttcaccataataggcactgtttaataagcaaagcccaagtcgacttccttcgattttacatggcgtccaaacaccatgtcaagtctgaccctctcattttttaagtcgaatggagaggatatgtagcagctagccttgagcacctaaccacttttcaaaggagctacgcacaaaaataccctagcaacatgccacggtgtcagaaaggctcaggttcccaacaccatgcgggtcagccattaggaactcaggaagtgtttcctctaagcgggggaaacctaggaaggcttcctgaacgaggggtatttgcgccaagccttgacgtgagtctcgaacagttgcagtgcctccaggccacgcgggagggaggaaaggacaccccgggccggggcacaacccgcgggccggagccgcccgcgcccatcccgctcaggccgcagccaggcacggcaccctcccgtccccgagccacgtcgctgctcgtgggctcgcggagcactccccaggtctcacctcgggccccacaccagaaggagaaagctaggggccgcgccagctccgccctcccccgcggggcggcgggccccagcccgggcacaggaaggccacgtccccggggagggacgcccgactcgatggtctgcgcagggcccgtcggccccacgtgacgtgcgcgcagccaatcccagagaggccccccgatcatcgagacggcggcggtggtgggctagacgagtttcgcgcggccgctcgccgtcccccgcccagtcgtactcggcgccccagctcggtgctgccgccatcttcttggaggacaggaggagaggcgaaggctccccctccccgtgatcgctccgcactcccgccaccacctgccctcccgcgaccgcctctctcctcctcagtgggcacttgtctccttctaacaaacggccttccccccactccagttacccaccgcaaggcgaagattctcattacctgttccactcttataagcataagaaaaccgagctcataaggtaggaactgtggcgaaacagggacaagccgccatcttggtaaaggagaagaggctacgcttgacctccccccccacccccagcctctatatggccaactgccgtgggaggagcacggcgcttgcgcagaggcggacaacgcggacgactctgggcttgcgcactcggaagccggccgcatgggggaggggaagaaggccaggtcgcactgagccaggaagcagttggcaaaggggcggggtgacgcggtgacgcaatccgcctgcgcgctgggcggggcggggcgggctggggcgggctgtgagcggaccgcgagcgctgggcgggtccgcggcgcggtcggtcggcgcctgttctcgggctgtttggcgggtgagtgtctcgccggtgtaccccgcacaagttgtgggccggccctcccgaggagctgcgggggacgcgccgctcgtcccatactctcgggcggtggtcggctggctctggggtgccggcggggcggtgtgggggaggggcggccgagcccaggctcttcggcacttatcgtgggctcccccgtcccgggcggtcctagtgccggcgacagtggctccgacacgggcaggcccgggcgcgggagtggggattccggtgaccccttgttgaccctgcgggaattcctctgcactgtcgtcggtgctgggcctcggggcgtcgagtgcggtcgaggtcgggaggtttggtgcttggagggaggatacaggtttaggcccgacaaacacttagagcttgtgtggccatcttgtctttctaacggtgccatttcctccctgagg

SEQ ID NO: 2133 - DNA, 6000 bp, Homo sapiens
tataggtgcccgccaccacgcccagctaattttagtatttttagtagagatggggtctcaccatgctggccaggtgaaacttcctgacctcaggtgatcctcccaccctggtttcccaaagtgctgggattaccggcctgagccaccgtgcttggccgcaaaagctggttttctaaaacaaattcctcacaagcccaattcaggaaaaaatagcaaatatagaaaagtagctaaaataatgacagagaagactacatgtagcaaaatggccccaaatctgaaaatgcagaaaaaatgggcactgtaaattaccaatacagaaccaaaaactggaaaatctgactaaaacaagtatcactaagcagctgattaaagacataccaatgaaaaggaccaagacttgacgttagagttgaactccatctaaccttggacaagaccaaagtcatttaactattccaagcctctacagagaaaagggaaaacaatttgttttatgaagacagcacagttttaataacaaacccagatggagacataagaaaggaacaaaggaatgaatgaacgccataggccaatctcactcacaaatataaatgcaaaaatcctgaatacaatatttgctagcaattagattccaggaatgtatcaaaagcatctaccaatattaatccaacaacacagtataggggaaaaaaaatcatgcattaatagatgctgatgaggcatatgaaattcagcaaccaatcataatgaaaacagtaagaaaactgctggcagagtgtggtggctcacgcctgtaataccagcactttgggaagctgaggcaggaggagcgcttgagctcaggagttcaagaccagtctggacaacatggtgaaacactgtctctacaaaaaatacaaaaaaattagctgggtgtggtggcgggcacccgtaatcccagctaagtgggagactgaggtgggaggatcccttgagcccaggaggtgaaggctgtagtgagccgagatggtgctgctgcactccagcctgggtgacagagtgagactgtctcaaaaaaagaaaaaaaggaaaactgcttaaatctaattcaggatatttctgaaaaccaaaggcaaatactgttttctaaacaatagaaaattaaatctatttaaattacaaccgataattcggcaggaatgcccttccataattatttttaagcacttacatgaaaacttttacatgaagacctatacaaaaagcaaacaaaacccccatgtgctatccattatccagcttcaacaattagcaactgaaggtcaataatgtttcatctatttccacaatcatcaatgccactgcctggatgattatgaagcaaatacgagatgtaacatttcatttatattccactacacatatctaaaaataagggctcctaaaaatgacaaaccattacacatagctagttctttaatgcaatcaaatatccaatcagtattcatattctctattctctcatttttttcatgtgaatcaagatccaagtaagatccagatattgcaatttcaccatgattatttaatactaccttggtgagtttactgaatataatgaaacaagaaaatcaaaagaaaacacttttttgctgattggactgaatacacagaaaatacaaatactcggctgggtgcggtagctcatgcctgtaatcccagcattttgggaggccaagacgggcatatcacgaggtcaaaagattgagaccatcctggccaacatggtgaaaccccgtctctaccaaaaatacaaaaattagccaggtgtggtggcgcctgcctgtaatcccagctacccaggaggctgaggcagaatcacttgaacccgggaggtggagggtgcagtgagctgagatcgcaccactgcactccagcctggcaacagagcaagactttgtctcaaaaaaaaaaaaaaaaagaaaatacaaatactctggttaaaaaaattctagaatacgataatttagtaaggtagctaaatataagatctcaagtaagtcaagtaccagcaacaaatatcaaggaatagaaatgggggcacatcatttacaacagaatttttaaaaatccaaacaagtagggaccaaactagaaaacaggtcctacataaatcaaatcatttttattttccccaaatgagtatgttatttagtccatttctaactggaatccctaacggtgtggcttttttcttaaaggattggataaaatgagctttaagttcacatggaaagattaaatgccaatgctgaggatagaaaagagcaggcacttaccttatcacctattacatgtatctgatttcaaacccacacagtgcaacatagaaataccatagagcacctctcccgcacctccacagaacccctcagcctcactgaaccctgtgcacacatatgggaaaatggagaaactatttgtcttaaactgacatttcaactttgctttgactttaccaagtttctcctgccatcttttttttttcctgtttttttttttctgaaacataacttggatccacaatgttttctctcataatttattaactaatgtgaaatggaaggtgaaagaggaattatgaacctctgaagcacatggttttcagtgagaaagccttgatccagcaacacaaactgccaagcactgtgattaacttaaacactgggtgcaaattggaccaaaaatgtagtcaaatgaaaattttgttccttcagatcgtgtttattccacatgccagaagttgtttaaagttctttaatcttgacccacagcttatttcttccacagaataaccccaatacacataaaaaaccaattttcgcaaaacaaaagatagaagatgaacaacatctggcgatgtagaacccggaaggtccatgatcttattcaaagcatctggattctttggattcggggaaggtccacgttcagtatacccacataacactcctaacagggactggggcagggataagtggcatgtatgactactaacagaacagacaatacaaatggccttacctcacctctgctgccaaatgagttttggtgtccccattcctccagacaaaaaaaaaaaaaaaaatacccacaacttcttcttttacagcagtttctgtatgctggtattggggataaaaaggggccctgaattacatttatgaatgatagagggaaaccctggcccctttccctaggtcaccttgctagtttaagagccagtcagaatgtaaatctgatctaattaaaacgctcttgttctttattcctggctgtggcactggtgagagaaatcaaggtggaagttgaggaaaaaaaatcaggacaacctttatagctaatgagatcaatgccaagattatacataacagtacacatcatgagttaggatgctgggtggtgcaaagaacccattaatgggagctatcaaaaatcactgaaaacaatgaggctcaaatcagaagtatcaagaatcagctttcatgacccctacaccatgatgtttttctttatgacggcagaactattttgaaacattaaatatatcggcaggcactgtgattcaaaaagtatttgagaacctactaggtgctagacaccaaccgaggcaatgagtatgggtgacaacatgtgccctgccctcacagcaccaatagtccactggacaaataccatctggaacatcaggtaaacacctaagcctgtctggaggaaatctaatttgggcggaatcccacaagcacagactaggtaaggagaaggcagttaaggtgggaagtagccagatttaagagtttgggcaatggccaaaggtgcagaagtttgaactacaagaagttcagtgtagttggttcgtgtgtttccgtggagagaggacaaggtctggtggcactgacaagaattagaccgaaaaggtaaaaaagcaagccaggtttgtctgggccagtaggccaggtcacagttgggactccactgagaccacggaagccacaggtttgctcctcatccccgggccaactcggcggcctccaaccctataccctaccccctgctgcctgtccgtgcctcgctggtgcagaccttcgtcgcctctcctcgccgaaggtacccgcagacagggcctagtcgctctcccctcgcttatccacggcatccagccgatgggcttggaggtttgggggctggccagtcctccacgcctcagggaggaaatggcaccgttagaaagacaagatggccacacaagctctaagtgtttgtcgggcctaaacctgtatcctccctccaagcaccaaacctcccgacctcgaccgcactcgacgccccgaggcccagcaccgacgacagtgcagaggaattcccgcagggtcaacaaggggtcaccggaatccccactcccgcgcccgggcctgcccgtgtcggagccactgtcgccggcactaggaccgcccgggacgggggagcccacgataagtgccgaagagcctgggctcggccgcccctcccccacaccgccccgccggcaccccagagccagccgaccaccgcccgagagtatgggacgagcggcgcgtcccccgcagctcctcgggagggccggcccacaacttgtgcggggtacaccggcgagacactcacccgccaaacagcccgagaacaggcgccgaccgaccgcgccgcggacccgcccagcgctcgcggtccgctcacagcccgccccagcccgccccgccccgcccagcgcgcaggcggattgcgtcaccgcgtcaccccgcccctttgccaactgcttcctggctcagtgcgacctggccttcttcccctcccccatgcggccggcttccgagtgcgcaagcccagagtcgtccgcgttgtccgcctctgcgcaagcgccgtgctcctcccacggcagttggccatatagaggctgggggtggggggggaggtcaagcgtagcctcttctcctttaccaagatggcggcttgtccctgtttcgccacagttcctaccttatgagctcggttttcttatgcttataagagtggaacaggtaatgagaatcttcgccttgcggtgggtaactggagtggggggaaggccgtttgttagaaggagacaagtgcccactgaggaggagagaggcggtcgcgggagggcaggtggtggcgggagtgcggagcgatcacggggagggggagccttcgcctctcctcctgtcctccaagaagatggcggcagcaccgagctggggcgccgagtacgactgggcgggggacggcgagcggccgcgcgaaactcgtctagcccaccaccgccgccgtctcgatgatcggggggcctctctgggattggctgcgcgcacgtcacgtggggccgacgggccctgcgcagaccatcgagtcgggcgtccctccccggggacgtggccttcctgtgcccgggctggggcccgccgccccgcgggggagggcggagctggcgcggcccctagctttctccttctggtgtggggcccgaggtgagacctggggagtgctccgcgagcccacgagcagcgacgtggctcggggacgggagggtgccgtgcctggctgcggcctgagcgggatgggcgcgggcggctccggcccgcgggttgtgccccggcccggggtgtcctttcctccctcccgcgtggcctggaggcactgcaactgttcgagactcacgtcaaggcttggcgcaaatacccctcgttcaggaagccttcctaggtttcccccgcttagaggaaacacttcctgagttcctaatggctgacccgcatggtgttgggaacctgagcctttctgacaccgtggcatgttgctagggtatttttgtgcgtagctcctttgaaaagtggttaggtgctcaaggctagctgctacatatcctctccattcgacttaaaaaatgagagggtcagactt

SEQ ID NO: 2134 - DNA, 6000 bp, Homo sapiens
gtggcggtgcatgcctgtagtcccaggtacttgggaggccgaggcaggagcatcactcaagcccaggagattgcagctgcagtgagctatgacagcgccaccgcactacagcctgagcaacagagcaagacgctgtgtctcaaaaaaaaacaaaagaaagaaagaagaaaaaaaagaaacaaaaaccttcaggtttcatggaggaaaacatagtcacacacaaaggctctaaaaatgttacgtatcaataaaagagaatcagaacggcttaagacttcaacaacactggaaacttagagaccgcggagcaaaatgatgtccaaattcctactcaggataagagcagaacgaggcactttcgtacatacaaattctgaaaacttcatctgccatgcacttctcaggcaactagtgaaggatgtgctccatcgaagtgagacagtcaaatcaagagaatgacataggttccagaaaagtgaggctccaacacaagagggagtgaggagagttacaggaagatttcaggcacagacaagcctgcagcagattggaggcgctgggagagatttattcaagataaaatgataggaatactaattttcttcaaaagaaaacggacaatttcttgaaagatttagataattgcttcagaatttggggttgaattgtagtgacaaaatatagaaaactgagcaagcagcaagcaaacaaaaacaaataagacttgtaataacccaggaaaacaaaaagttatccagaaaagtgaaaacaatcctattataccacttcgtccagctgtaaatggcaatatgtagtcataatataaacaatcaatactgaactaaccaaattaaggatatatcactttgggcagccatggatccgtttgcactgagaaggcagagggtgaaagaaagctaggaacttcctacctattctcagtgtcaagcgaagagacatcacatgaaacaggggtaggagacacaaatacagacgtcaagcaaatatgctctttagagttggaggcaaagatcaaggaaatctactaaggctgaagtagatactctgcaggggaggaaacatgattaggggaaggatgttggcacttctttcttacaagcctttctaggattatctgactctacaaatgacatgaagctgtaaccttgatttgaaataagattaatatgaatgctaataaaaagtagtaagggagagtatgtagtcaatgtattcttaccaaattaacaacaagtatcaacaagatgactaacacaaccacatgatgtccagacacgtctcagaacaaatgtctagctcatcttcaacggtattcgaggaacttcagtgtgcttggtaaaacaatagcctactagggatttcacttctaaaatgtctctgactttagaaataccaaaaaataacatgtaaccaagttttaaaatattatacacatgaaaaaaggttcttttcattattttcttggtttccagatgttgaacgttgtggtgcttttacaattgaagagaaaaagcattctgacacattatactggttggggttctctgcttttctacttggtcaaaaacctttacacgcattttggactttgtgtcatcataacttggcaattgggaaagccgcatgatatgcttctttcagaacttggttacttcttaccaaaagagggaaaagctttcgtatcaccatttgcctatgggatggatgcacaatgaacgggccataccaaataaaaatatcactttgtactccaaaaagcatgttctctgcttaagccctttctgtaagtttcagctgggacgcactaatggagaatccatatgacccacgaaggatcgtaagatatcccagtggacccggcacaatcatctcaaattctgttcaggtcagagtatcttagataaaactcactgaagggcatcaagtccttcagtacacagtctgagccaagccctctaccatttgccatggcaagagtataccaaattctaaacctgttgctcacgtatgccaccaactataaatgtcagcctcctctttcctagtcttcctgtccactcagcaccacctggaaaaactcttactcgtcttttaaaccgcagttcaaggaccacattctgtaggaagactttccaacaggtaaccactgcctatttcctatgtccacaccttacacatatttctatcattgcacttatcacaccataatgtaattactcttctacaaataagtctctcacactagaccacaagctgcctgaggaaaagaaaagtctatatcctctttttttgttggctttttgagacacagtctcactctgtcgcccaggctagagtgcagtgctacaatctcggctcactgcaacctccgcctcctgggttcaagcgattctcatgcctcagcctcttgagcagctgggattacaggcgcgcgccaccatgccaggctaatttttgtatttttagtagagacagggtttcaccatgttggtcaggctggtctcgaactcctgacctcaagtgtccacccgcctcgacctcccaaagtgctgggattacaagcgtgagccactgcacctggtcgaaaagactatatcctctcaacctttgtatctgcagaacccttaaccctacacagcaatttccagcaaatatttttttgaattgaaatgaagaagtgaggtcatgaggctgaagtcagacaactggaaggccaaaacaacaaaacctggaaaaatacgtatttactcaagaagaaattctcccaccaggccactgagaagttagctttgcccactggagaggacactgtaacagggattcaagtaagcctagtggcgctgagggacgtgatataggtcaactatatctttgaggtgctctccttacactcaatgcacttttacccgaatgacgttaatttgactcctgataagatgagctaagtcccttcaacagtgcttggcaccaagcaaaactaatagcagtaacaggaaagtttaatcctcatgatgaattatttaatggggtttcaaacgctgtccctgagacttgaggcagtaggctccagctccattttccccaagtctaaaacttgataggttgatgtttcagactcagagattcggtaatccaaatgatggaaataattcttacccaaacaccttttcaactatttttaaatactgttgccaagcatcctaatatcatgtgtacttaatgaatttagcctagggatacttttacatgtcaaaaaatcaaaatataaacctaagcactacgtttcatccagtgtttcagcatcccagatttgcttccctaaatgaacattaagcttattatgcaatgtgccgctaccaggagccttagacaaaaccctaattgtgacttaacctatcttaatagggttttaaggaagttagctgctaagaaagtgactatccttaagcagacaccaaataaatgtgaagtcattgattgagggcttagggtataggtagctatgaatctgaggacataaaacgcaaaactgaggggcaaatcgtcatgttccttaagattacgactcatccacattccttcagccgtttaatttcaccataataggcactgtttaataagcaaagcccaagtcgacttccttcgattttacatggcgtccaaacaccatgtcaagtctgaccctctcattttttaagtcgaatggagaggatatgtagcagctagccttgagcacctaaccacttttcaaaggagctacgcacaaaaataccctagcaacatgccacggtgtcagaaaggctcaggttcccaacaccatgcgggtcagccattaggaactcaggaagtgtttcctctaagcgggggaaacctaggaaggcttcctgaacgaggggtatttgcgccaagccttgacgtgagtctcgaacagttgcagtgcctccaggccacgcgggagggaggaaaggacaccccgggccggggcacaacccgcgggccggagccgcccgcgcccatcccgctcaggccgcagccaggcacggcaccctcccgtccccgagccacgtcgctgctcgtgggctcgcggagcactccccaggtctcacctcgggccccacaccagaaggagaaagctaggggccgcgccagctccgccctcccccgcggggcggcgggccccagcccgggcacaggaaggccacgtccccggggagggacgcccgactcgatggtctgcgcagggcccgtcggccccacgtgacgtgcgcgcagccaatcccagagaggccccccgatcatcgagacggcggcggtggtgggctagacgagtttcgcgcggccgctcgccgtcccccgcccagtcgtactcggcgccccagctcggtgctgccgccatcttcttggaggacaggaggagaggcgaaggctccccctccccgtgatcgctccgcactcccgccaccacctgccctcccgcgaccgcctctctcctcctcagtgggcacttgtctccttctaacaaacggccttccccccactccagttacccaccgcaaggcgaagattctcattacctgttccactcttataagcataagaaaaccgagctcataaggtaggaactgtggcgaaacagggacaagccgccatcttggtaaaggagaagaggctacgcttgacctccccccccacccccagcctctatatggccaactgccgtgggaggagcacggcgcttgcgcagaggcggacaacgcggacgactctgggcttgcgcactcggaagccggccgcatgggggaggggaagaaggccaggtcgcactgagccaggaagcagttggcaaaggggcggggtgacgcggtgacgcaatccgcctgcgcgctgggcggggcggggcgggctggggcgggctgtgagcggaccgcgagcgctgggcgggtccgcggcgcggtcggtcggcgcctgttctcgggctgtttggcgggtgagtgtctcgccggtgtaccccgcacaagttgtgggccggccctcccgaggagctgcgggggacgcgccgctcgtcccatactctcgggcggtggtcggctggctctggggtgccggcggggcggtgtgggggaggggcggccgagcccaggctcttcggcacttatcgtgggctcccccgtcccgggcggtcctagtgccggcgacagtggctccgacacgggcaggcccgggcgcgggagtggggattccggtgaccccttgttgaccctgcgggaattcctctgcactgtcgtcggtgctgggcctcggggcgtcgagtgcggtcgaggtcgggaggtttggtgcttggagggaggatacaggtttaggcccgacaaacacttagagcttgtgtggccatcttgtctttctaacggtgccatttcctccctgaggcgtggaggactggccagcccccaaacctccaagcccatcggctggatgccgtggataagcgaggggagagcgactaggccctgtctgcgggtaccttcggcgaggagaggcgacgaaggtctgcaccagcgaggcacggacaggcagcagggggtagggtatagggttggaggccgccgagttggcccggggatgaggagcaaacctgtggcttccgtggtctcagtggagtcccaactgtgacctggcctactggcccagacaaacctggcttgcttttttaccttttcggtctaattcttgtcagtgccaccagaccttgtcctctctccacggaaacacacgaaccaactacactgaacttcttgtagttcaaacttctgcacctttggccattgcccaaactcttaaatctggctacttcccaccttaactgccttctccttacctagtctgtgcttgtgggattccgcccaaattagatttcctccagacaggcttaggtgtttacctgatgttccagatggtatttgtccagtggactattggtgc

SEQ ID NO: 2135 - DNA, 6000 bp, Homo sapiens
tttttatggtagatacatgacttcaaacattttttaaggtattgattcaaatttctctatgtctgctaaatcagatgtatttgttgtattactcagttcttctctgtccttgcacatactgtgtttactgaatctgtccggttctcagagaactctattaaagtttctcacttgaatttttttttttaagtttgtatttttcctagtccttgctttatgtgtttatctacagtgattatttgaatatacaggcttatgaatattacatcttccctataaattgtttcttttatcattatagcttgttatccctgttattctgcttatttttactttaattcccaccttggctgatagtagtgttgtctctcctccatgtttgcactagcctgctattttttaccttgtccctttattttcagcctctctttgttccttttgctttaagcatatacgttatagctggacggtttgttgtttttgttttttttttcccttggtttttcaggccaatctgtcttctcctttaagcagagaatttggttatttcacatttatactgataactgatattcttgaattttgtccccattgtcttgatttaggattacttctgattttgtttcttcttgttccttttccatatttttgctggtttgatgaagttgctgtttcctccatatttttctcttaatttggaagttctcattgttattttctttaatgattacctttttttttactttcataatcagatacttatctctgtattatttgaaaacgagatgccaactccttctgccaaaactgtctgtattacatctgacccttctctttccctttaggaagttctactcctccacactcacacttgctctcaattcttaggttttgctgaaattaaaggctcttgaaccttactgctactatcccttggttaaccaagccaaataacactggggatgcagggatctcatttcttccaaagtagctgggaacatttccagtcaaaagggaaacagaggacacagtattcaggaagttaagatttgggggaggggaatcgagaggcaaagtgagagaagctttttaataagtttctaagctccagagggaaccaaatttgacagcagtcatctttcttggggttgttactgaaggttagccaacagactccatgctttccaaagcttcagggtttctaaaatttgtttaaaaattccacatatctctggctgggcacagtggctcacacctgtaatcccagcaccttgggaggctgaggcgggcgggtcatgaggtcaggagatcgagaccatcctggctaacacagtgaaaccccatctctactaaaaattaaaaaaaaattagccgggcatggtggcgggcgcctgtagtcccagctactcgggaggctgaggcaggagaagggcgtgaacccaggaggtggaggttgcagtgagctgagatcacccactgtacttcagcccgggagacaatgcgagactccgtctcaaaaaaaaaaaaagaaaagagaaaaaaaaattccacatatctttaaaaatattgtcacatttttcagacactcagatgccttcagtactatttcctttcctcataaatgtagttcacattgctctctgtaccccagtgtcaaaatctagttctcaggtagctctaggaaactccagtgggtggcaaacatgttcaagttacagtgctctatgtaatgaagtcccttactccttgaaaggtttcaaagagagaggggaaatgacataattccagaggtcagggaagtatgtatccgtgtgtatcccatttgtgtccctagtgtctaacatatagtcagtactgaaaaaaaatttgaatattattgaaaatatggaatatgtgcgtacatatatatatacagttgcttttatcaacttaaaaatttttttaattttttaattttttgtagagatagggttttgctatgttgcccagattggtgttgaatttttggcttcaagcagtcctgcctctgcttcccaaactgctgggattacaggcgtcagccactgcacccagccaccatctaattttttttttttttttaatggagtctcactctgttgcccaggttggagtgcagtggcatgatctcggctcactgcaacctccgcctcccaggttcaagcgattctcctgtctcagccttctgagtagctgggatcacaggcacgcaccaccacgcctggctgaatcagtatttttagtagagacggggtttcaccatgttggccaggctggtcttgaactcctgacctcaagcgccaccatgcctggctgaatcagtatttttagtagagatggggtttcaccatgttggccaggctggtcttgaactcctgacctcaagtggtctgcctacctcggcctcccaaagtgctggaattacaggcgtgagcatcacgtctggcctaatttttttaatcgaatttatttttgtaatgatagatgcttgtcttattcctagggaaatatttgaagtaattgagatgctgtcacctaaaataatcaaaaggctcctgattcagttaaaagaattcatttaagtacagagtgtaagcgagctacaccaaagaatggtgattagcgctcccagggtggggaaaaatgaggattgtttatataggcaaaatggaggtgccaaacagaattataacattttcggaactaaggctcatttaaagatacaaatttgattggctactattgattacacttgaagggatttgtttaacttccttttgtaaagaagtaacagtcataaggatctctcatctcccagtcatttagtctagttttgaataaagaatagggggtctggttaatatatacatctaaacacaaaagtcagaaagaataaaagtagtgatgttacacgagccagctgtcagtgcttaacttttccctttggcctaatgcatttggaaggtcctgaaattgtattttctttttacattgcctatgtatgtgtaagtcttcttcaggtcagttcacgctgttaaatatacgtgcgtatacatacatactatgtatgtgcgtttatgtgtgtctgtgtgttttttttttaacagacgaagcttcacaaaagatgtctaaggtaagatcatacttcatgtatctacagcataaggagaaattgctttatgttttcagactgttgacagtcgggacttatatgattcattatttttaatacaactgatacatttgattcattaacacaaagagttctaatttagttgtctttttttttttttttttgagacgggagtcttgttctgtcaccaggctggagtgcagtggcatgatctcagctcactgcaacttctgcctcccacgttcaagcgattcccctggctcagcctccggagtagctgggactgcagacacgtgccaccacgctggctaattttttggattttagtaaattcggggtttcaccgtgttggccaggatggccttgatctgttgacctcgtgatccacccgctttggccccccgaagtgttgggattacaggtgtgagccaccgtgcctggcctaattgtcatcttaaaagcttggagctttctcttttttcaggcttctactttcttttctctacacacatcagtaacagtccttttggcccccttagttcattcccagcagaccagataatttagaattctgataatttattatgatgaaattgatggggctcttagacttgataaattggtttaaatcagcctttgcaagttagttcagagataaattagtgctaaagaacatattctgagaaaagcagaacttgtggttaacattgcaagattattatttctgttttttttttatctttgaatcctgtgggtgttcattactgtccaatgcaaaatcatcataccagtttttgcattttataccagtgttagcatggaacacagataagcaaaaaaaaaagtcattatttcaccactcaggaataaccactgttaatatgttacatatattctttttcacctgtgtgtgcatttgactatacatttacaaaatgtaatcctaaaggaaatactattttgtatcttgcctttttcaattaataaattgatttttaaaatttcttctcattttcagtatgccactgtctagattctggttacttctgctattcttgccttctcatatctctgtcctctctctcatcagatacccttctgtcaaggaatattgatgcttcagtgtagtcatctatgatcttctcattctgtcttttctttcttggtctttgacactagatactcaacatcccacccctaatttgcctgcctcacccttgatgaaactctgttctatagagctagaagcacagcaagagagatgcttttttcctcgatacttttcagaaatgcattgcacctaatacctgggagaagctattctttagccaagtttgttgaatgaaaccattcattcaaagtactgtcagctgtagcagtactttgtaagcttgactgattttcctggaactccatagtctctcaagtcgaaatttgaaattgcattaagatgtattaagcatgtatcttctatgtattgttaaattcctaaacagaatactgattaacaaaatgttaattttcagtcgcatacaactaaggagttatactagataagtttttctttttttaatgctcctagttgaatactactggttttctgatagaagtatgaccttctggaagtgtttatactttttaaaaaatttgtgaaaactgataacctatgtttgtttcatgtctaactgattatatcttaaaagcaactactaaggtgtttattagtttgtttgttttttaatcttatttagcaacagccaactcagtttataaatccagaaacacctggctatgttggatttgcaaacctccccaatcaagttcaccgaaaatcagtgaaaaaaggttttgagttcacactgatggtggtcggtaagaaattaatctatagtctccaacttactaaataaatatctcccctttccaatctctggagtatgataacgtgacctataaagaaagaggaaaatttggcagagtcaaataacttgagaatttgaacaaatatatgtgtattcattagaaaatttttctcaggagcaaaattatttttctgtcactttcttatttatatgtagtgaaagtttactcattgtgtcagctaggctccaaaatggcccccagtgattcttatctcctggtattcacaactttcttgtcccttcctgcattgaatagggttttacctgtgtagccagtaggacattgtggagatgaaagtgttgtcattttctaagactaggtcataaaaggcattatggccccccaccttgcctcttctcaaattactcactctggaggaagccagcccttcctgcattgaatagggttttacctgtgtagccagtaggacattgtggagatgaaagtgttgtcattttctaagactaggtcataaaaggcattatggccccccaccttgcctcttctcaaattactcactctggaggaagccagctgtcatgtcaagagaacactcaagcagccttacagggaagcccaccaagtaaggaaccaaggcctgccaatggctgtgtaagtgacccgtttcagaaatatcctccaggccaggcatggcggctcacacctgtaatcttagcactttgggaggccgaggcaggcaggagttgaagatcaggctgggcaacatggtgaaaccctgtctctacagaaaatatgaaaactagccaggcatggtggcatgtacctgtagttcctctcacctgagtccaggaggttgaggctgcagtaagctgagatcatgccactgcactcaagcctcaagcctgggtgaatgaaaccttgtctcaaaaaaaaaaaaaaaaaaaaaaaaaaaatccaggcattta

SEQ ID NO: 2136 - DNA, 6000 bp, Homo sapiens
tacaatggaatattgccaagcactacaaagaaacgaactactcgtagatgcaacaacatgcatcagtctcagagctttgttgagcaaaagcagccagacacaaaacaggccatgttgtatgatgccatttaaaagttttagaataagcaaagctgatacatagtgacaaagtagattggtgtttgcctgcggtggggactggagagggtagacttcacagttacacaaagcaactctagggttatgaaaataatctttatcttgagtggagtttgattatctgagtatctacttttgtcaaaactgtacagtttaaatgggtgtattttagtatttgtaaatcgtgcctcaaagtggctttaaaataaaacaggtagggggttgagggtgagtagtgaaaagtaaaactagaaagccacaagaatcctcaacttttaaattgtagtattaatagctcaagaaaaatgggtgtatcaggaaaaccctaacacacctaattagtaaatgagagactattgaagaggaaaggcagtttttaaaattttgtcagacttctaaagaaacaggtaaaggggcattgcaccaccgtttattaaaaggatgacttaatgggataacaggcatttagtcaaatttttacactcatatttaggcatgttcaacacattgttttgttcttttcatgtgtgaaaattgcagttcacttaaaatgcagtcctaattttgtatgtctgcatgtttctttttgttttgttttgttttttgagatggagtctcgctcagtcgcccacgctggagtgcagtggtgcgatctcggctcactgcaagctccgcctcccgggttcacgccattctcctgcctcccgagtagctgggactacaggcgcccgccaccacgcccggctaattttttgtatttttagtagagacggggtttcaccatgttagccaggatggtcttgaactcctgacctcatgatccgcctgcctcggcctcccaaagtgctgggattacaggcgtgggccaccgcgcccggctgtgcgtctgcacattgcaaattcacttatttgttcttgattttcccagaattgttttattctgtaagggacagggtctcactctgtcacctaggctgaagtgcagtggcatgatcatagcctgctgtaatctctaactcctgggctcaagcaatccttctgccctagcctcccaagtagctgggactctaggtacaagccacaacacctggctaaggttttggggttttttttactttgttttggttttttgggagatgggggtctcactattttgcccaggcggggtcttgaattcttagcctcaagtgatcctccagccttggtctgctaaagtgctgggattataggtgtgagccactatgcccagccagaaataatttttcaaaagagatgtgtactccttcctcatgctttgcagaacttaacagagggtggtttagggtacccagaggacagtccagcaccagtagtaccaagatcagaagcagttctccatgcagaattgagacctagatgatcatctgcaatgaagcagtgggatttgtgcttccttcaaatgtaaaatttaatttttggtattttgcatcttttttgaagttaaatttcaaatattcagaatatgtagtcacagtagttcaagagagattctcacctcattgaaagcttacatggatatgtgtcacctgaattagtcgtgtgaactcaacaaagtgagcgggaaagttgcccgacatatgacagttgccagtgctgggaaacggggatggatttaaagcaggaagaagacaaggtggcagaagggggaggttgcagagtgagggtgtgcatgtgagcccaccagaccacaggccctgtcctgctcacacgtttctgcagctcgggaagcacaagggttgttgacactatgggatagatatgttcagttttctgaaaatgtggtgagtttagtgactagcagaactgataattgaaaacctgctttgcattctatttgtcaaaaataaaaaccaacctctaaagtacattcctcacatttgtgaacagttatgtttctaattatatgatgttcaagttctgtagtctcatagacctggattcaaatcttggccctgctctggatagtactctgaccttgggcaaattagagtttctttgagtaccctcaaagatcatactgcaaacatagtagtactgtaggtactaaacacagaatgatgtttgtgaggtacttagcccagtaccaggccttatgtaaacacttaaccgattgaatggtgtcatatgaataaggtcatgacaaggtttttctttttatttaaaggtgaatcaggtctaggaaaatcgactctcataaacagcctattcctaactgatctgtacccagaaagagtcatacctggagcagcaggtaaaaacattcttatgttactgtaagtgtaattctacatgaaagatgctgaagactgcctaattaatattttatgtcttagctgtgtgttttgtttgttcttgttcagctttgaacacaaggaaaacacttttatggggtaggtgtgctgcaccgaggtccttggatttgggttgtagactttctttgacacgtatccatggatccatcctctcttgagtttgtctgtaaaatgtaataagtagtttctgcctatattaaatatttgatggaaggattaagtgagaatgttttacatcaaaaatgctgtgtaactagaagattactaggatagatgttcgaattcatctactgtcagaaagttccagcacaggacaccagcatccacaaatgactgttgaatgaaataggcacacatagtgagagcctaagacttgggctgctgcaagaatatgtagccctttcagaatatttttgaattcagtttttaaatgaattcgtaaattgctttctttttcccaggaacagaaattataatttttaacatttgtgtttttaaccttccccagtagcacaataatcttagctttaaccttcccctttctgacttctctgggatctttttttcttaatccccatggtatctttggagaacctacctctgtagagaggcagtagactctgaagtcacctgtcgtaagaacgtgagctttcctcttcacatgctgcttatattccctattaagtttgtttcttttctagaaaaaattgaaagaactgtccagattgaggcttcaactgttgaaattgaagagcgaggggtcaagctacgcctgacagtggtagatacccctggctatggtgacgctatcaactgcagagattggtatgctcccccatgcccagggatctgcatttgtttacttaatatacttcataaatttatagatagtgttaatgagtgattattaagtttgggattgctgtatataataaaacacctagacaatttaaagcgtgttaaatgttgactttttaaataaggaattttatagagagtaatttttttctggtactctactgtaatttgagatcgcaaagccagtcatccatagactgctagtataaatgaaacacctggatttgagccgtggttggtgaccgagatactgtagtacatcctttctatgtggaaggaagtgaaacctgttagagagtgggttgagtcgtagtgtctgtaaatgactgctcattggcatcattttcacaaataaggaaatgaagaagtagaagatagagcagtctgtcacctgtaccgtgcaaagaatgccacttttgttgtacaaactccctcctggttctattcctgtcaacataaagcatcaggtttccaccactagatgaaaaggggaaggttctgttatctttctcctacatttaggaatttctcccttcttacatgtgaaagtgctgtactgtttcccagctcagttaaatgctgtttcccagctcagataaacctgttcttgacccatgttctctaccaccctgttcctctgccccttttcacagtcacgttcctgaaaagaattggcagccctggctgggtgcgatggctcatgcctgtaatcccagcactttgggaggctgaggtgggctgatcacaaggtcaggagttcgagaccagcctggccaacatggtgaaaccctgtctctactaaaaatacaaaaattagccgggcgtggtggcgtgtgcctataatcccagctacttgggaggctgaggcaggagaatcgcttgaaccctggaagcagaggttgcagtgagccgagatcacgccactgcactccagcctgggcaacagtgcaagactcagtctcaaaaaaaaaaagaacgaattggcagccctgtctacactggccctctctcaggtgcatcataacctattccattcaggcttttgactctcagcacttaggggcagttatgcttggcatagtttccaaaaacttccatttgccaaatctaaaagtcagtcttctgttctcatcttgaaaatgaattattaaattatgtatatttgggcggaggcacttgttttccctttgaagtcagggaccccctgttttataccctatgattattgttaatgtttctgtttctctcagttttaagacaattatctcctatattgatgagcaatttgagaggtacctgcatgacgagagcggcttgaacaggcggcacatcattgataatagggtgcattgttgcttttactttatttcaccttttggacatgggtaagtaattgtttatcgtggagaaatgctttactacatgggtttgtaagttttacccaaactgtgtattttaatataagaattaagataatttgagagagaagagttttgtatgtattttttttaaataagtgacaattctaaaattaattttagacttaagcccttagatgtggcgtttatgaaggcaatacacaacaaggtgaatattgtgcctgtcattgcaaaagctgacactctcaccctgaaggaacgggagcggctgaagaaaagggtgagtgaggctggcgtcctgccctccctctgggtgcgactcgggggcatggggatgaagaaaggagtgtgttcccacgctcagtctgctcaggtgtcgggaggcagggcgggagaatttttcctgcattttagtggtggttttcaaggagaacctgatggttacaaattttaatttttgccttcatgaaggtatcaaatttctattctttaaattctccttatatttaaaatgccctcgatgagtagcagttggttacacacaagtaccttccatgggagttaaatgactcaaatatagaaatgtgatctctccatgaagtttgttattttacctaaattctttactgcaaatgacccatacaaggatgtatctaagtagactggttctctgttctgtttggaaacatagcagttgtcagccagcgaagcgcctctcacccgccagcagctcctgtggtgtcccagttttagtgcctcttccgtgtatgtctgtaaagcctctttattgattctctgctatatatttttaaattgcttactttgttctgattatatgctccttaagaaagtccaaatagtttatatatgctaaactctaaaaatacaaatccctaactgaacataccggtacgtgcataaaaatacaaatccctaaatgaacataccgatctgtgcgtgtaatcacagttgctggggcagggtagggggatacagcagggggttcaggcaggaggatcacttgagcccagaagttggaggccaacctcagcaacatagcaatacgctgtctctaaaaaaatatatatatatattttatatatataatatataattaataaatatatataatatatattacatatatattatatctatattatttatattacatatgtaatatatattatatttatattatttatataatatattatatatattatattatttatatgtaatatatttatatt

SEQ ID NO: 2137 - DNA, 6000 bp, Homo sapiens
gagttaaatgactcaaatatagaaatgtgatctctccatgaagtttgttattttacctaaattctttactgcaaatgacccatacaaggatgtatctaagtagactggttctctgttctgtttggaaacatagcagttgtcagccagcgaagcgcctctcacccgccagcagctcctgtggtgtcccagttttagtgcctcttccgtgtatgtctgtaaagcctctttattgattctctgctatatatttttaaattgcttactttgttctgattatatgctccttaagaaagtccaaatagtttatatatgctaaactctaaaaatacaaatccctaactgaacataccggtacgtgcataaaaatacaaatccctaaatgaacataccgatctgtgcgtgtaatcacagttgctggggcagggtagggggatacagcagggggttcaggcaggaggatcacttgagcccagaagttggaggccaacctcagcaacatagcaatacgctgtctctaaaaaaatatatatatatattttatatatataatatataattaataaatatatataatatatattacatatatattatatctatattatttatattacatatgtaatatatattatatttatattatttatataatatattatatatattatattatttatatgtaatatatttatattgtttatatatattatatttatattatttatatataatacatattatatttatattatttatatataatatatataataaatatataatatatataaaaatatatatatttaatatatctataatatatattatatatattatatataatatatataattgtacatatatttattatatatattatatatataatatatattataaatataatatataaatatatttataaatatatataaatattatatttatacattatatttatatacatattatatatacatttttatatattatatatatataaatataatatacatatattttttaaaataaaagagtttctaggccgagtgtggtggctcacgcctgtaatccctgcactttggaaggctgaggcaggcacatcaccagaggtcaggaggtcgagaccagcctggccaacatggcaaaactccgtctctaaaaaattacaaaagttagccgggcgtggtggcgggcatctgtagtcccagccactcaggaggctgaagcaaaagaatcgcttcaacccaggaggcagaggttgtttgcagtccagcctgggtgacagagcaagactccgtctcaagaaaaaaaaaaaagaatttctgtaattacccacagaaagaacaactgttaagtatatatccttctagaacatagcttatgtttttggttttgcagaatgaaatcacatagtaatactattctgccatttgatttttctatttaaaaatatttggaagcatcctcatatatatactgtatcctaattcttcctggatgcacagcattccaccatatgaatatactctaacttgtccagtttcctgctgatgaatatttggcttactttttgttttactctggccccttttcttctttgaccaaatttactgtttctttgccccttgctcgctgcttttgctagtgataccctctgcctggaacagtcttccctcagatacctgtgtggggaactccctcactgagcccaacgctgcacacaagatttcacatctccatcccctgctctgctggtagcactccccccacactgcataaagtatttctctagcgtgttttttggcttctcctgacccctgaccccaggtcctgagatcaggaatctgctttgttcacttatgtattcccagagttccgaataatgtctggcacataatagatttgttgcataattgttgtaatgaacactggtgtacatctatcttttcacaattgtgtgagccaaacgaattcttaggaaataagtatacatttaaatttttgaaggatgactaaatttgctctaaagtaagtttgtaacaatttacatttccaaagtgtactcttctctccaccccctaaaactgtcctggttatgttgccagtttttgtaatgtgtttcctgtctgagaaattgtatctcatttgaatttgcctttccttgattgccgatgtgagtatctgtgctggtgttgatgccggttggtgtattctctcaggttgcagggacttggctcttgcttttttattgacttaacacatatacttatttttagatgttgactatcacgttgcagatgatttcacctggtttgactttcattttttcacatttttcttggtgcttttttccaaagcaatttttaagcagcatgtagtcatgtttggcagccttttcctaaattgtctcaagtgcctgccagttttttagaaagtatttgaacctttgaagaacccctggaagcgtagacgtttttatgctaataaatactttagtaattcctacttaagggaacttcaccttttgtactctgctatattaaatttctttgaggtagaaatgggggtggtgtcagggttagaatgctgtaattctaatctctaatcctgtatgcgaaacatttagtgctggattacaacatctgagatgaatcgaaatacttcgagcttttatcccttccttcttgggcctcattaatcacttctcttcctccagtttctccttgatgcctaccagtttgttcattctgccctatctacaagaacctcttgcctcctgccagcctctactagcttcttgccttcaccagcctttcttctagtcagacacttactggtagctgttatctgccctccccatgatcctgttcactcaggcttcctgtcatccacctgcaattgctctctcatgggcttggccaacagttcagttctcagatgtgggccccacctgtggggtttgtgtgattggcaattctacttctgaaacttcccttccttggctgctgaaccactgtgtttgcttttctatctgctgttttttaccaccttccttcctgatccctgaaggtcagtattccttagtattattttgatcacattatttctgtggcttctgatttgcccttccaggtatcttatttcttgttgtgaaccacatttacccacaggagtcctcttttgaccactgatggactcctgtccttccagctcccctgtctctttaaatggtcccacaattcttgaaatcatccagactgagaaatgtgtaaattattttttactcatcacttctgactcctctgctcacttttaaatagcttactaactgtttccgaactcttctctcctccaaagtgtaagctccatctttatgaggccagcataggacaaaagatgaggttagcatggatggatagtagaccaggaaaggggccgtaagatgaggacaggtgagcaagttcatgcttcttattgctcagtttctcccagagataagatggttcctcccatttaggaataaggatttatgaaaagactgaaggtcgagttacagagtaaaggatgtagagaggagggccttttctggagttctgaattagtgcagacattgtactaagaccaaatctctgaccattcaaggccctttttaggtcacattaaggctttccattcttaaaaaccagaaagcaaatccagtgcacagtttgaggtcgggatattttctgctcacgttgctcttgttctctcttccctgaatggctcaggtactgaggtgagaccaaacaaaactgtggcctgcctggtgcctgtgagaatgcccaccatgcaatgagcatttgagtgctagggttttaattgattgactgatgaatgcattcgtatttcaacttcagcccagttctttctcccctcaagccccatcccccacactactgcctgcttgataggtccgattgtgggatttcactgctgactgctggctgcctgttgaatgaaatacagatccccaggtcgctagcctggtgttgatggaactctccactttgtaattccaatttttgtttccttatccaactggatgtcttagattccaaccttttgaatttcttattctcaaaatgcaccccatgtgtcctctctgtgcctttgacgaggttttgtttttttttctttctttcttcctttttttccatctggggtacttctcccttctctctgcttttaagactcctgcctgttctccagggtcttctcatgcctgtagcttctctgtggcaattacccttcttgaggctgattgtggtgtgatttccattttagctgttgtgctggggctatcgttagtcttcctgctgctttgtacattgagggtagtggtgcattattgctaatgttatttttattctgtacagaggatcctcaaaattcaagtataaatacctttctagcagttttgtaaattttttttttttttttttttttttgagacggagtcttgctccgtcacccaggctgaagtgcagtggtctcagctcactgcaagctccgcctcccgggttcacgccattctcctgcctcagcctccccagcagctgggactacaggcgtccactgccacgcttagctaatttttttgtatttttagtagagacagggtttcaccatgttagccaggatggtctccatctcctgaccttgtgatccacctgcctcggcgtcccaaagtgctgggattacagacgtgagccaccacacccggccgcagttttataaatttatttgacagtaactttcgtcatcagtttgattattgacatttgtatgatttccaatatatttcttacaagatgagctagaattggctacaataacatacgcagtttgctaaaattgatcctggttttgtcattctctcagattctggatgaaattgaagaacataacatcaaaatctatcacttacctgatgcagaatcagatgaagatgaagattttaaagagcagactagacttctcaaggtaagaactggcttcagatccacaacataaataactcctgtttactgttgtccatgttgaggtgagagagattgcctgggtatgttcagttacgagagtatttttgctttcaatatattttaagacctcatgcagtggctcatgcctataatcccagcactttgagaggccaaggcagatggatcagttgaggccaggagttccagaccatcctggccaacatggtgaaatctcatctccatcaaaaatacaaaaattaggtggatgtggtggtgcacacctgtagtcccagccactcgggaggctaaggcaggagaatcacttgaacccaggaggcagaggttgcagtgagccgagatcgcgcctctgcactctagcctggcgacagagcaagactctgtctcaaaaaaaaaaaaaatttgatacagctatcacctaaagcttagaaattttattgtaggtttaatttgttttcgtacaatttgtcccatgtagaaagtatctgacacttttcaagaaaatgttacatacccccagctttccaattcagttttgtagtcaacagcaatgtgttaagtctgtgctaatgttctcgtgttgccagtgaactctggggttccctgtgtggagcctgtctactctgtgtgtctctttctaggctagcatcccattctctgtggttggatccaatcagttgattgaagccaaaggaaagaaggtcagaggccgcctctacccctggggtgttgtggaagtggagaacccagagcacaatgactttctgaagctgagaaccatgctcatgtaagacatttggtgtgttccttctggcagaatttggcgtgaagaatatggatttcagacggggtgtacacttggcccccaagatagttgcagccagcagcttcattgccgccctcagtgtttctcacatcgcagaagtggtgtggggctgttgcagattggtgctgagaa

SEQ ID NO: 2138 - DNA, 6000 bp, Homo sapiens
gacttcaaagaatgactgatgtggataaatcagtgttttgattagctgaaagtcgctacatatttgccgcatgtctcacttagtttagcaatttgtagtgagttaaaataagtaagcatgttaccatccaagctgtgtcaaacacaatttaatggttgtgtaagaagttaagcgcactcagcccctccagggctgcatccttgtggctatcctgatccccattattgaggggggtgtagaggctgaagacagggtttggggactttactttagtgtcagttgtgtgtttctcacaatgaggtagagtgagccactccttggctatctcaatccatttccctggatcctgaatcaataggaacgtgttacaatgtttgctcattcttgcctgcttttaagtattttgaataagctaggcaattaaaaaaaattttttaagagtgcttcataagatgaatggaaggttaagttgctgactaatattcttggatccagaatattagtccttcactttatggtcttgtacatagcttaagctaaccaactcttttttctcatatgagagtaatatataaattttgagttataggaggcatgaatattttcattacattttccgtaagtccttttagaagagtgtcttctatttcagacattgttgacctgaaaatctcttaaaatctgtctgccatcctgtggtagtgatggcctcacacaggggtggcagtgcctctagcagaaatccccctgagagactcagtcgagacctgtgtttgtatatcatttattggggaagaaagggagagctacacctcactagacatttccacggccatactcattatcctgaaatcccagcagctttatgtacaatttaccaagtaattttaattactgctatttcttctatgtacttgatgggtggttttttttctcatgagaatgtcatgtgcatgatgccaccttggtgcattcctcttctctttcagcacccacatgcaggatctccaggaggtgacccaggaccttcattatgaaaacttccgttctgagagactcaagagaggcggcaggtcatcacactgtgcccctttctctgtattgtgtcaccctgagccacaatgttcctcctcctctatgtgttcagctcagccttcttgaccattaagcaacatggtttggtttcctactcaaaagttattataaaagagttgttaatttaatcaaattatgctcttttagcctttttaagaaaaagtacatttaatgatatgcacgtaaaaactttaggccaggcacggtggctcatgcctgtaatcccagcaccttgggagaccaaggcaaggtagattgcctgagcgcaggagttttgagaccatgagattacatggtgaagtcccatctctacaaaaatttaaaaaaaaaaaaattaatttagccgggcatggtggcacacacctataatcccagctactcgggaggctgagttgggaggagcagttgagcctgggaggtgcagtgagccataattgcaccactgcactttatcctgggcaataaaacaagaccctgtctcaaaaaacaaacaaaaactttagatggaaaggccagaggcttgtgtcgagttctccttcaaaagcatcactctgtacgtgaggacaaacttgttgccattaggaaactgcagcacctgagttaagggtgaggccaggatgagtggcatccaagcagccagtggccgttgaagcagcagcttcgatcctcgcaaagtcctgcagccatcctcactcaccttttctttttaaccattctaatatgtttttatataagttttctgggaggccaaggcaagtggatcacttgaacccagtagtttgagaccggccctggcaacatagggagacctcgcctctataaaaattttttttaaattagccagatgtggtggtgcatgcctgtggtcccagctactagggggaggattccttgagcccagtaggtccaggctgcagtgagctatggtcgcaccaccacgctccagactgggcaacagagtgagaccctgtctcaacaacaaaagtttcctgtgttgtaattcattaaaattctcacattctaataatttgatggatttctagatacatatgttgtacacattgaagtctaattatgagtttggaaatgagacattaagaaagattttagaggcagcaagaaaattccaccctctggaagctgagtaggcgctggccctgagatggagattagtgtgctttgcagagcacagttctcaggtgtgcttggggagcttaccctttgcccctcgttcactcacgcagatcctgctccttaaatgtggtgactacattcgcattaataaagaataacatctcaaagcaaattcttcagataatacctatttttgagtgggtaacagcaagtgttgtcgctcaagcttagagtaagaaaagtctcttgaatgttccatttcatgttgttcgaactttttaaaatcattctgttccctttttattcattatatctttaattagaaaaatgataggctgggcgtggtggctcatgcctgtattcccagcactttgggaggccaaggtgggcggatcacttgaggttcaacaccagcctggccaacgtggcaaaaccccatctctactaaacacaaaaaaaattagctgggcgtggtagcacgtgcctgtaatgccagttacccaggaggctaaggtgggagaattgcttgaacctaggaggtggaggttgcagtgagccaagatcatgccactacactccagcccgtgcgacagagtgagacaccatctcaatataaaaagagaaatgataaatacatgtcattttaaattttaaagtagaattttttgggggggtagcaaataactatttgttgcagtgttatgattctgatttctttcgattcttaggaaagtggagaatgaggacatgaataaagaccagatcttgctggaaaaagaagctgaggtaagtaggaaagtactattggttggttggttggttggttgttttgtttgttttgagacagagttttgcaccattgcccaggctggagtgcagtggcgtgatctcggctcactgcaacctctgcctcccgggttcaagtgattctcctgcctcagcctcccgagtagctgggactacaggtgcccgccaccatgcctggctagttgtttttgtatttttagtagagacggggtttcatcatgttggccaggctggtctcgaactcctaacctcaggtgatctgcccaccttggcctcccaaagtgctgggattacaggtgtgagccaccgtgcccagccaaaaagtactattcttgtgactgaaggtgttttgtttacatccgtagatatcattggtaattaacttaaagtttatagttttttttttaatttgttgaggaggatacatataactactttattactatatatacacatctatatataataataaacatggatatttacatagcatacatgatgcttcatatatttagctgaaagactttggagacaatttagtaatgtcactgatatttgtaagtagatcataaatatggaaatatgctctgttgtaaaggtggcattcagatctgctggagttttggaaggcaaacacattattcagtaaacaataggatcataatgggctagccttttggaaacaaaaagaaaatacttctttggtcaaattaattcaatattgatcaaatatttaaatgttaaaaataaccacaaagtcacctgaagaaaatttaaatgttttataatactttcctggaggcatttctgaacacatacaaatcataatgataaggataaagatgaattaacatttactatttttggccaggcactgtgggttacacttatagtcccagcactttaggaggccaaggtgggagaatcacttcatgccaggagtttaagaccagctagggcaacagagtgagacccccctcgttctctagaaaaaaattaaaaaataattagccatgcatgtcggcatgcacctgtagtcccagctactcgggaggctgaggcagaaggatcccctgagcccaggagttcaaggatgcagtgagctatgattgtgccactgcagtctagcctaggtgaaagagcaagatcccatccctttaaaaaaaaaaaaatatatatatatgtatatgtatgtatatatattatttttattgtgaggccttcattgccctccagaaaagctgattcattcccattcccctttactttgcatttctcactgtcatcagtctctttccctccttttaggttagaaaacttctcatattggccgggcgcggtggctcacgcttgtaatcccagcactttgggaggcggaggcgggtggatcacgaggtcaggagtttgagaccagcctgaccaatgtggtgaaaccccgtctctactgaaaatacaaaaatcagctgggcgtggtggtgtgtgcctgtaatcccagctactcaggaggctgaggcaggagaatcgcttgaacccgggaggcggaggtagcagtgagccgagattgcgccactgcactccagcctaggagacagagtgagactctgtcttaagaaaatttatcatattgtcttatctttctttggttattgtttctgtttggcttgcatattcgtatcatttacttgattttctctttagctgttgctttttttattgattggtaaaaagtctttatgtaataactcctgtcatattttgggaaggtgtagaagttgaaattttaggaatcacagaacacccagaaataatgttcaaagacagcaaaccttgaaaacctataatgtgtgtgtgtgttcacagctccgccgcatgcaagagatgattgcaaggatgcaggcgcagatgcagatgcagatgcagggcggggatggcgatggcggggctctcgggcaccacgtgtaaggtgatgtgcacatatcaagaagtcagaggtaggccctgttgtcccttagcctggaagacaggcagttactaacattgtgtcagcttaaatatgacaggttcctccttaagcctcattaatattttgcattttgaagtaactccatcactaatcttaaacaaggagagattgctcctgaaaaacagaagccactactttgccacctactttctagtaaagatttttcatatttttgtctcttcttttttttttaaataatttcaacttttattttattggggtacatttgcaggttattttctaagcttgcaaataccaacattagaaggaaattatgtattaaagcacttttattagttgtattattggaaatttgttaattgttaaaacatctctttaaagggaataaaaacgtgttattaaaacagcttgtacagattaaaagtagagatggcacaaggaagaagaattatgtgaggtagataagggttccctggatggtgactgctgacctcctgttcctcagatagctttgtcccgactgatggtcattagtgaatagatctgtctggcatggtgtatgctggtctgcctgcttgaaaagaatctgcagactccagagactcaggaccaggaaaaggcagatgcccactcccctgtatcttatgtatcttatggacaggcaggctctctgaactgtccaggtggccactcccatcacttgccagaggaaaagcatgaaaggtaaagttaagtaatgacctaagagtccaaagaagagggtaggtcacatggagctggggtaaaggcaaacaaacctcatacaagagatctgattagagcttgaaagagagtttgagttggccaagatctgaggatgaaacgctgggaatttggtagaaggtctctactacaattcagggacctcattctggaagcatgagtgtgttcatgaaaacagggaggggacttgagccttcaacgacatacggcagggtggg

SEQ ID NO: 2139 - DNA, 6000 bp, Homo sapiens
tcagataatacctatttttgagtgggtaacagcaagtgttgtcgctcaagcttagagtaagaaaagtctcttgaatgttccatttcatgttgttcgaactttttaaaatcattctgttccctttttattcattatatctttaattagaaaaatgataggctgggcgtggtggctcatgcctgtattcccagcactttgggaggccaaggtgggcggatcacttgaggttcaacaccagcctggccaacgtggcaaaaccccatctctactaaacacaaaaaaaattagctgggcgtggtagcacgtgcctgtaatgccagttacccaggaggctaaggtgggagaattgcttgaacctaggaggtggaggttgcagtgagccaagatcatgccactacactccagcccgtgcgacagagtgagacaccatctcaatataaaaagagaaatgataaatacatgtcattttaaattttaaagtagaattttttgggggggtagcaaataactatttgttgcagtgttatgattctgatttctttcgattcttaggaaagtggagaatgaggacatgaataaagaccagatcttgctggaaaaagaagctgaggtaagtaggaaagtactattggttggttggttggttggttgttttgtttgttttgagacagagttttgcaccattgcccaggctggagtgcagtggcgtgatctcggctcactgcaacctctgcctcccgggttcaagtgattctcctgcctcagcctcccgagtagctgggactacaggtgcccgccaccatgcctggctagttgtttttgtatttttagtagagacggggtttcatcatgttggccaggctggtctcgaactcctaacctcaggtgatctgcccaccttggcctcccaaagtgctgggattacaggtgtgagccaccgtgcccagccaaaaagtactattcttgtgactgaaggtgttttgtttacatccgtagatatcattggtaattaacttaaagtttatagttttttttttaatttgttgaggaggatacatataactactttattactatatatacacatctatatataataataaacatggatatttacatagcatacatgatgcttcatatatttagctgaaagactttggagacaatttagtaatgtcactgatatttgtaagtagatcataaatatggaaatatgctctgttgtaaaggtggcattcagatctgctggagttttggaaggcaaacacattattcagtaaacaataggatcataatgggctagccttttggaaacaaaaagaaaatacttctttggtcaaattaattcaatattgatcaaatatttaaatgttaaaaataaccacaaagtcacctgaagaaaatttaaatgttttataatactttcctggaggcatttctgaacacatacaaatcataatgataaggataaagatgaattaacatttactatttttggccaggcactgtgggttacacttatagtcccagcactttaggaggccaaggtgggagaatcacttcatgccaggagtttaagaccagctagggcaacagagtgagacccccctcgttctctagaaaaaaattaaaaaataattagccatgcatgtcggcatgcacctgtagtcccagctactcgggaggctgaggcagaaggatcccctgagcccaggagttcaaggatgcagtgagctatgattgtgccactgcagtctagcctaggtgaaagagcaagatcccatccctttaaaaaaaaaaaaatatatatatatgtatatgtatgtatatatattatttttattgtgaggccttcattgccctccagaaaagctgattcattcccattcccctttactttgcatttctcactgtcatcagtctctttccctccttttaggttagaaaacttctcatattggccgggcgcggtggctcacgcttgtaatcccagcactttgggaggcggaggcgggtggatcacgaggtcaggagtttgagaccagcctgaccaatgtggtgaaaccccgtctctactgaaaatacaaaaatcagctgggcgtggtggtgtgtgcctgtaatcccagctactcaggaggctgaggcaggagaatcgcttgaacccgggaggcggaggtagcagtgagccgagattgcgccactgcactccagcctaggagacagagtgagactctgtcttaagaaaatttatcatattgtcttatctttctttggttattgtttctgtttggcttgcatattcgtatcatttacttgattttctctttagctgttgctttttttattgattggtaaaaagtctttatgtaataactcctgtcatattttgggaaggtgtagaagttgaaattttaggaatcacagaacacccagaaataatgttcaaagacagcaaaccttgaaaacctataatgtgtgtgtgtgttcacagctccgccgcatgcaagagatgattgcaaggatgcaggcgcagatgcagatgcagatgcagggcggggatggcgatggcggggctctcgggcaccacgtgtaaggtgatgtgcacatatcaagaagtcagaggtaggccctgttgtcccttagcctggaagacaggcagttactaacattgtgtcagcttaaatatgacaggttcctccttaagcctcattaatattttgcattttgaagtaactccatcactaatcttaaacaaggagagattgctcctgaaaaacagaagccactactttgccacctactttctagtaaagatttttcatatttttgtctcttcttttttttttaaataatttcaacttttattttattggggtacatttgcaggttattttctaagcttgcaaataccaacattagaaggaaattatgtattaaagcacttttattagttgtattattggaaatttgttaattgttaaaacatctctttaaagggaataaaaacgtgttattaaaacagcttgtacagattaaaagtagagatggcacaaggaagaagaattatgtgaggtagataagggttccctggatggtgactgctgacctcctgttcctcagatagctttgtcccgactgatggtcattagtgaatagatctgtctggcatggtgtatgctggtctgcctgcttgaaaagaatctgcagactccagagactcaggaccaggaaaaggcagatgcccactcccctgtatcttatgtatcttatggacaggcaggctctctgaactgtccaggtggccactcccatcacttgccagaggaaaagcatgaaaggtaaagttaagtaatgacctaagagtccaaagaagagggtaggtcacatggagctggggtaaaggcaaacaaacctcatacaagagatctgattagagcttgaaagagagtttgagttggccaagatctgaggatgaaacgctgggaatttggtagaaggtctctactacaattcagggacctcattctggaagcatgagtgtgttcatgaaaacagggaggggacttgagccttcaacgacatacggcagggtgggttaggcagaaggcagggagtcttgaggcctccacagcatgtggacaggtggctgaggaaggacccagagtgacttgctggagccttagtcaccaaacgctcttgcagcttagtgggaaaggtgttcattgtaaaatacggtatttacacaaaatgcacaaaaatacgtatgtacagtttaataagttactgtaaggaaaacatccatgtcacccccaactgagtccaagttggttgctttagtttcatcatcacagtgacaccttagaatagtcctgagggtatgtgcttagttcacactttactgatgaggaaattgttgccgctccgagagtttaaaagtatttgctgatggtgccatgacttttaaacgatggcctgctgactctagaggctggtcctgcataaccagttaatggcatgtgactggggaagtgagggtacagtggaaagagacaaggatgcctcagcgatgcagctcatttgaagcaggaagcagtgacaggtgtttgcttattttctctgagcttcattttcaacctttatggaatgaaaattttacttttagatcgataaaattttatttctgtatactttctagttttgcagcatttccagtttccaggagcctcatgaatggctttttggtttagttaactttgtggtcatgtaagccctgccttttgctcagtttatgacctttgttaaggagaaaagtagaactgttaataattaacgcagcagacattgcctcactcccacttaagtgtgttttgttttcttttttctagaaaacactttcctggataaaaaagaaaacattccagatgcatgatccagctgtgtgttttcaatccttgggagggtgccatccacattttaacagtacctgtgcctgagaatttaatttttaaaagactttgatgtgtttttgtatgaagtacttttaacgtatgtatttcattgctgtgtcacactctgtgttttgtgaggtgaatgtcttccttttctttctccctaaccactaatgttagaattgatttccaagaatcggcatgtatacttaatactgaatttctttgatttaactgacttaacaactgactaaccattgatgagcactcctgatttttatctagaacattcagatttaccataatgttccttagtggtagaggtgtgtgcctagtgatgtagaaagatacactgacttggtgcaaggccatctgcttaccacatcacaccacttggagatctttgcttccttgcttttatgtttgtacacaacacctaaaaccagttttgctgctataattctatactgttgattcgtctgcgattttatctgttaaccaaataaaacataatagaatttcctaatgagatatatctttatacttaaacagcttttttagaggtgagttttaaagaagtctcttaattctgatgctaggttgtttttaaaaccactatgcaaagaactcaccacaagccaccttttgtagtgttctccactaatactggttatcctgtgctacagagaaaatcaaagcagtcataagctccagttttcgtattgcaaataagactcttacctacaaaatgagattcagtgaactaatttggtttttactcaaccaaattaaaaatttttttaaggaaaattagcagttggtctattcagaatcaaacctttttatattttatactgcactttagtgtattttctgtcactgtaggtatagaagatctgcctcccctgtggaaattggggtctgttggtgggcgtgcccctgaagcctggcttgggttgaaaagtgttcccgccctaaggccttggtgccctgaacctctgatgcctaccgggttctcctgatttgagtttcctttaaatactccctttttgagtaattttctgatgggaggaaagtagcagtcatcatctttttgtgtgcaggctgtctcatttatttttagccattgtcgtttcattcattttgtgtaatataaaccgtgtgtcatgtcaaagtgaaagacatttcaaatctgtagcataggctagtgggcaggtccgcacagtcgaagccacacctggtctgttttctgtgcactgtagccttagtgtcacctttcttcttgtgtctccttatggtacactccagcggttgccttttttatcatttctactgaagttgggaaattcaaccccagaaattgacagatgaaaggagacaatggttgtgtagggagatggagaaaatgcttaatctgaggatgagacagggttttttcatttttgtgggggctagaaaaaacataaaatgaggcagttaaataataatagttaatgaaggtgtgctacagaaaataatctggtgttcttgctaactttgcccttcactgttg

SEQ ID NO: 2140 - DNA, 6000 bp, Homo sapiens
aaccctaatccgatagggctggtaccctcatgagaaaaggaagaggtaccagagcattctctttgctatgtgcaactctaaaagacagcccgtaccaggcagcaatctgtcgggcaccttaatcttggacttccagccaataaatgcctattgcttcagttccccagtctaaggtagtctgtcgtgacagccccagcccactgacggtgagagactttattccctgcgtggtggaagttgcagcacactaagaaacagggactagcaaaagagctttcctgctccttcagtttttttgtttttgttttttttttttgagacagtgtctcactctgtcacccaggctgcagtgcagtggcatgatctcagctcactgcaacctccacctcccaggttcaagtgattctcctgtctcaacctcccaagtagctgggattacaggcatgtgccaccacacccagctaatttttgtatttttagtagagacggtgtttcaccatgttgtctaggctggtcttgaactcctgacctcaaatgattcacccacctcggcctcccaaagtgctgggattacaggtgtcagccacaacacccaggtccttttttttaaatggaaaatctcaaacacaagaaagcagataacctggctgggtgcgctggctcacgcctgtaatcccagcgctttgggaggctgaggcaggtggactcacctgaggtcaggagttcaagaccagcctggccaacatggtgaaatcctgtctctactaaaaatacaaaaaattagccgggtgttgtggcgggcgcctgtaaatcccagctacttgggaggctgaggcaggagaatcgtctgaacctaggaggtggatgttgcagcgagctgagatcacaccactggactccagcctgggtaacagaccgaggctgtctgggaaaaaaagaaaaaaaaaaaaagcaagcagagaacctaatgaacccacgaacccatgtgttcacctgcatctttctgcaattatcagcctgtggccaactccatttcacctgtatctctgaccacacagacccagcatcccaccatttcccctataaagtggatgtactcacctatcaggcctccagagtctcgtggagtgactcttgctcccattgctcctggacagacagtgctggaaatcaggcctgaggctgtcagtggcagtacgaaggacactggatgctcagccacgcagaccctcctatgcccacgccagggctgaggtcagcaggctggggtgtggcagtcatcctttgatcacgcaggaacaccaagagaactgctaggatgtggaccaacctgatgtcactgagtcacgggagcagctcctgcctgcctaacactggacttcatgtaatgtcagatgattaaatatcttaatgctgtgagccacaggaggctggctggtattctgctacctgtgctaaaaggtatcctaagagaggtacaccatgctggaataggcaaaagcaaacctgtttcttgtatcttagtaacacacttcaaggtgcttatgtgcttgagcaattcctgcagtcaaatgggccctccaccccccagtacacaaggcccagccagccagattccctccatcttcaccctcctcccccgtcccaggggagccaggaaagccatgcatccaccaaggcggatgcgctgtgtccctctgcatcagcctgctgagtcctcctggacctgatgagagacagtaccgcagccttgcccagccccgggaaggtggtcttccttcctacaatccccttcatcctctggaaggtggtcttccttcctacaatccccttcatcctctggaaggtggtcttccttactacaatccccttcatcctctggaaggtggtcttccttactacaatccccttcatcctctggaaggcaacaagatggaattttataaggagacatcaatcagaaaaaaggatattacttttattacttatctatgtaagggaatagtaagtactattcttagtacttgtaagcgttcgctaggttgtgctgtggtaacaaaggatcccgaagtctcagtgactcgaaatcacgatggtttacttcttgctggtgctgcccatcagctacaacggctgtacttcatgggcctttgttacaggatctggggtgaaaaaccagccctcactgtgcacatgctgtgttcatgctgggggcagaaggggagggaccaaaccacaaaacaccctttaaagcttctgcctgaacagggcacatgacagcagactactttacattaccatttggaagtctcaccactaagcttgacgtaaaggaagaaagggtaggccaggtgcagtggttcacgtctgtaatcccagcacttagggaggctgacgtgggcggatcacccgaggtcaggaatttgagaccggcctggcaaacatggtgaaaacccatctctactaatacaaaaattagctgggcgtggtggcaggtgcctgtaatctcagctacttgggaggttgatgcaggagaataggttgaacccgggaagtggaggttgcagtgagccaagatcatgccattgcactccactctgggccacaagacagaaactccgtctcaaaaaaaaaattaaattaaaaaataaattggccgggcgcagtggctcacgcctgtaatctcagcactttgggaggctgagatgggcggatcatgaggtcaggagatcgagaccatcctggctaacacggtgaaaccccgtctctactaaaaaatacaaaaaaaattagccgggcatgatggtgggcacctgtagtcccagctagtggggaggctgaggcaggagaatgggatgaactcgggaggtggagcttgcagtgagccaagattgcgccactgcactccagcctgggcaacagagcaagactccatctcaaaaaaataaaataaaaatacaaaaattagccgggcgtggtggtgggcgcctgtaatcccagctactcaggaggctgaggcaggagaatagcttgaacccgggaggtggagggtgcagtgagctgagatcgcgccactgcactccagcctgggggacagagcaggactccgtctcaaataaaataaaagcaataaaagtaaattaaaaaggaagaaagggcataactggtaataacaatataacccatatccttccagaaccccaaactgaattggggaggcttcagtctggaaaacataaagctactctaggtatgcaatgataatataatcgcgagcttacacaaatgctgggagtaaagtccgggaaattgttgccaatgacctcagcccaaagcactgaagtgggtggtggtctcaagagctcatggggaaaaaaccaatgcaaactcaacacttagaaagctaccagcaatttcttggtctacatcagaggcaggtggttctgaaaacagaacagctttgaatttcatctatatttctggctgagggtgcctcccaagaataatcgcctcgaaaggtaagagtgcctcgtctggtagactgtaatccagggctacacagatgattctgggaaatgcagttcctaccatttcttctgctaagcagagaaagtgatgtctagctgacaactgacaatatggcacatatagatagtagtattttagatatctaaaataacaaaaagtctcacctgagaaatgtccaggcagcctgatatccctaagataacagcaaacactactgagcgctttctagataccggggacacttcgcgggactttttccacctctctatggcagagacagtttttcctattatcatcatgacccacatttcagaggagttggaggcatggaaagaggaaacaacttgcccgttccctctccgtgctataatttgtatacatcatcttttaaaacggacttttcggccaggcgcggtggctcacgcctgtaatcccagcactctgggaggccgaggcgggcagatcacgaggtcagatcaagaccatcctggctaacacggtgaaaccccgtctctactaaaaatacaaaaaattagccgggcgtcgtggcggccgcctgcagtcccagctactcgggaggctgaggcaggagaatcgcttgaacccgggaggcggaggttgcagtgagcagagatcgcgccaccgcactccagcctgggtgacagagcgagactctgtctcaaacaaacaaaaacaacaaaaacacacacacggactttccagagccctgcagttttgcgcttcagggacaacagtgaacatttatcgatcccatggttctcctacaattgccacgtggccagcgtctacacagccccccatcctgcccctgctgtcaaacacagcgtttccagaacgcagtcgtgctgggctccaggtgagctttgggaggagccccggctgagcccctgcactgggccccgcgcttcgggaagcatctcgctcgttcgtctcgcgcgccgcgtgaccggagccctcacgctggcagcgggcaccgcagggccctgagagtcgggcccgctgcgcgcagccaggggccaacgagagccgacgctgggcgggcagcgtccgggagcccctccgaccctgcgctcccctcgtccgcgccctgaccccgcgtctccggccgtccagcccgcgccgcgtcacctcccctcccggagcgaagggccctgctcgcccgaggacggaggcccgcacgggacacggggccccagtttccgccccggaagcccaggacacggctccagtggcggcgcggcccagggcgcaggcgcgggtgtcggtcccaccgcgcgtcgtcctcgccccggccccggccaatcccttcgaatttggccgaggccgggaaatactagctaatcacggcgcgcgctgttgacgccggccaatgggagctccggaaggctgcgtggagacgccagcggcgggcggtggacagtcatggcggcccggcgcggggctctcatagtgctggagggcgtggaccgcgccgggaagagcacgcagagccgcaagctggtggaagcgctgtgcgccgcgggccaccgcgccgaactgctccggttcccgggtgggtgcgcgcggcggggggtgcgccgcggccttcggtgcctctgccttcccaggggctctttgctccgcttcgttgtctgcggctggcgtgctgtgaactgtgcggtttttattttgaaagacgggctttccctgtgtcgcccaggctggagtgcagtggcgccatctcggcccacggcagcctggacctcccgggctcaagcgatcctcccgcctcagcctcccgggtagccgggaacataggcgcgcgccaccgcgcccggtccacgctgcgtgtctttaagtgcggggtatggtgatgactgacgtgtaaacccgcgcgaaaccgtggtgtctcccccaaaagtctcctccagctcttttgtaatccatgtctcgtttttgtgggtttttctggtgttgtgttttgtttgatggctgttcgcgctttcaggggttttatagcatatatttaaaagttttcaagtgaagcattgaccttaatctttggccacccagtccacaaattttataaatgctttctttgaagtctctactttctacccgagttcttttttcctaaagcatttttcatcccagcttgtttgcagattgctgttattgctcagagaaattcctttggcttccgcagaagatccaagcctgtctagagatttagtaaagtaaaattcaacgtgagacttgagtccgggagaaattcagtccaaactatattgtaatatagagggaaagcctgatctcacttgcattttgtgtgtttctctttttttctagaaagatcaactgaaatcggcaaacttctgagttcctacttgcaaaagaaaagtgacgtggaggatcactcggtgcacctgcttttttctgcaaatcgctgggaacaagtgtaaaaaccattgc

SEQ ID NO: 2141 - DNA, 6000 bp, Homo sapiens
gtccaggagttcaagaccagcctgggcaacaatagtgagactccatcgctacaaaaaattttacaaaaattagccaggtgtgttaacgtgcctatagttgcagctacttgggaggctgaggtgggaagatcacttgaacccgggaggtcgaggctgcagtaagctgtgattgcgcactgcactcagcctgcatgacacagagaccctgtctaaaaaaagaaaagagagaaagagagtgagaaaacagaaaaggcaaaccacagcctaggagaaaatatgtataaaagacacattttataaaggactgttatctaaagcatacaaagaattcttaaaactcaaaaataagaaatcaaccaacccccttaaaaagtgggccaaggctgggcgtaatggctcatgcctatattcccaacactttgggaggcggaggcaggctcatcacttgagcccaggaatttgagtccaacctgggaaacatggtgaaaccacatttcctcaaaaaatacaaaattggccgggcatggtggctcgtgcctgtaatcccagcactttgggaggctaaagcaggtggatcacctgaggtcaggagttcaagaccagcctggccaacatgacgaaaccccatcactaactaaaaaatagaaaaattagccgggcgtggtggtgggcacctgtgatcacagctacttgagaggctgaggcaggagaatcgcttgaacctgcgaggcgtaggttgcagtgagccaagatcgccccattgcactccagtctgggcgacaagaatgaaactgtctcgaggaaaacaaaaaagaaatacaaaacttagcatggtggcatgcacctgtagtcccagctacttgggaggctaaggcaggaggatcgcttgagcctgggaagtagaggctgcagtgagccaagaccgtgccactgtactctagcctggttgagaccctgtcccaaaaaaaagagtgggccaaagcactcaacagatcccttacgaaaccagatacacagatggcaaacaagcatatgaaaagatactccacatcatatgtcagcagggaaatgcaaactagaacaatgagatgccacacacacctatcagaatggcaaacatccaaacactgacaacaccaaatgctggtgagggtctggagcaatagcaacccttgttcactgctggtgagaatgcaagatgctgcagccactttggaagacagttcaccacaagcttgtccaacccaaggcccgcaggctgcatgcagcccaacacaaatttgttaagctttctcaaaacgttacgagatttttttttttaagctcatcagcaattgttagtgtattttatgcgtggcccaagacatttcttccaatgtggcccagggaagccaaaagactggatacccatggtttagcagttcttcacaaaaattaatagtcttaccacatattaaagcagtggtgctccctggcatttacccaaaagaagtgaaagcttatgaccacacaaaatcctgcaccaggatgtttataacagatttataactgccaaaacttggaagcaacaaagatgtcctttagtaggtaatgaactatggtacatccaaacaagggactattaattagggcaaaaaagacatgaactattggtcgggcatggtggctcatgcctgtaatcccagcactgtgggaggccgacgtgggaggatcacttgaggtcaggagttcaagaccaccctggccaacatggtgaaaccctgtctctactaaaacataaaaattagctgtgcatggtcgtacgcgcctgtaatcccagctactcaggaggctgaggcaggagaaatgcttgaacccgggaggcggcggttgcagtgagccgagactgagccactgcactccaacctgagcaacacaacgagactcttgtctcaaaaaaaaccaaaacaaaacaacaaaaaaaaactatcaagccacagttagacatagaggaaacttaaatatctattagggaaacaagtaacctgtaggagaatagatggacacaagagacgtagccctgggtacctgggataagattattatctaaaaagtaaaatcaggattattcttcattttaaattgggcatatacgtgtttcatcacttttctacaaagccacaaaaagcaaaatcagaagaacaattgcctccataaattctagatgtgttaaaaagattattaaaaatggtctcattttcatttaagacttggagtggggacagcctttccaagcaagacacaaagctaagccggaggagagtaatgcagtgtttcatgtaacacggatgatgaggaaccactgaagattcaccagcagggaactggctacacgtaccgtggttctagagacaatgcgacgacaattaaagagaatgagaagggcagagttaggggatctgtaagtgcagaaatctgtaaggcagagttagaaagaaagctgccaaataatttgtatggtatgacctcatttatgttaaaaaacaaaattctaactatagtagtttctacatatgtatataaatgtaaataaaaacattgaaagaacacacatcaacattaagtgttgaatgaagaggaaacctactacaatgatgtaaaacaaaaaaaggtggtaggagagttcatataaactcagttactaatgtatcaatattggttatcaattttaacaaatgtaacataacacagcacataaataatggggaaggggggaaggcaggggtagtatgtagggagcgctctacatactctactttttgatcagtttttctatatacctaaagctatctttaaaacattaagtctatgaggccaggggtttgagaccagcctgggcgtgatatggtgagaccttgactctacattaaaaaaaaaaaaaaaaattagccgggcttggtagcatgcccctatggccctaagctactcaggatgctgaggtgggaggactgcttgagcctaggaagttgaggctgcagtgagccatgatcgggtgccactgcactccagcctgggccacagagcaataccttgtcttaaaaataaaaaaaaaagggccaggtacggtggctcacacctgcgtaatcccagaactttgggaggccgaggcgagtggatcacaaggtcaagagagaccatcctggccaacatggtgaaaccctgtctctactaaaaatacaaaaattaaatttaaaaataaagtaaattaaaattgcaaaaattagctgagcatgctggggcgcgcctgtagtcccagctactcgggaggctgacgcaggagaatcgcttgaacctgggaggcggaggttgcagtgagccgagatcacacctctgcctggcgacagagcggaactccgtctaaaaaaacccgaaaaactgaagtctattagttatggggtgtggggagcaggaggacgaaacagcattcattagcgccctttgggaactagggcgcttcaccacctctgcccacaggactgctaaacagaagaacatcaggcccagcactactgtcactgtcattcagaatcgagtgctgcgttcactgaatctcaggaggaaggaaagtggcaagggcagagggagcagtgtgcaatggtttttacacttgttcccagcgatttgcagaaaaaagcaggtgcaccgagtgatcctccacgtcacttttcttttgcaagtaggaactcagaagtttgccgatttcagttgatctttctagaaaaaaagagaaacacacaaaatgcaagtgagatcaggctttccctctatattacaatatagtttggactgaatttctcccggactcaagtctcacgttgaattttactttactaaatctctagacaggcttggatcttctgcggaagccaaaggaatttctctgagcaataacagcaatctgcaaacaagctgggatgaaaaatgctttaggaaaaaagaactcgggtagaaagtagagacttcaaagaaagcatttataaaatttgtggactgggtggccaaagattaaggtcaatgcttcacttgaaaacttttaaatatatgctataaaacccctgaaagcgcgaacagccatcaaacaaaacacaacaccagaaaaacccacaaaaacgagacatggattacaaaagagctggaggagacttttgggggagacaccacggtttcgcgcgggtttacacgtcagtcatcaccataccccgcacttaaagacacgcagcgtggaccgggcgcggtggcgcgcgcctatgttcccggctacccgggaggctgaggcgggaggatcgcttgagcccgggaggtccaggctgccgtgggccgagatggcgccactgcactccagcctgggcgacacagggaaagcccgtctttcaaaataaaaaccgcacagttcacagcacgccagccgcagacaacgaagcggagcaaagagcccctgggaaggcagaggcaccgaaggccgcggcgcaccccccgccgcgcgcacccacccgggaaccggagcagttcggcgcggtggcccgcggcgcacagcgcttccaccagcttgcggctctgcgtgctcttcccggcgcggtccacgccctccagcactatgagagccccgcgccgggccgccatgactgtccaccgcccgccgctggcgtctccacgcagccttccggagctcccattggccggcgtcaacagcgcgcgccgtgattagctagtatttcccggcctcggccaaattcgaagggattggccggggccggggcgaggacgacgcgcggtgggaccgacacccgcgcctgcgccctgggccgcgccgccactggagccgtgtcctgggcttccggggcggaaactggggccccgtgtcccgtgcgggcctccgtcctcgggcgagcagggcccttcgctccgggaggggaggtgacgcggcgcgggctggacggccggagacgcggggtcagggcgcggacgaggggagcgcagggtcggaggggctcccggacgctgcccgcccagcgtcggctctcgttggcccctggctgcgcgcagcgggcccgactctcagggccctgcggtgcccgctgccagcgtgagggctccggtcacgcggcgcgcgagacgaacgagcgagatgcttcccgaagcgcggggcccagtgcaggggctcagccggggctcctcccaaagctcacctggagcccagcacgactgcgttctggaaacgctgtgtttgacagcaggggcaggatggggggctgtgtagacgctggccacgtggcaattgtaggagaaccatgggatcgataaatgttcactgttgtccctgaagcgcaaaactgcagggctctggaaagtccgtgtgtgtgtttttgttgtttttgtttgtttgagacagagtctcgctctgtcacccaggctggagtgcggtggcgcgatctctgctcactgcaacctccgcctcccgggttcaagcgattctcctgcctcagcctcccgagtagctgggactgcaggcggccgccacgacgcccggctaattttttgtatttttagtagagacggggtttcaccgtgttagccaggatggtcttgatctgacctcgtgatctgcccgcctcggcctcccagagtgctgggattacaggcgtgagccaccgcgcctggccgaaaagtccgttttaaaagatgatgtatacaaattatagcacggagagggaacgggcaagttgtttcctctttccatgcctccaactcctctgaaatgtgggtcatgatgataataggaaaaactgtctctgccatagagaggtggaaaaagtcccgcgaagtgtccccggtatctagaaagcgctcagtagtgtttgctgttatcttagggatatcaggctgcctggacatttctcaggtgagactttttgttattttagatatctaaaatactactatctatatgtgccatattgtcag

SEQ ID NO: 2142 - DNA, 6000 bp, Homo sapiens
caaaaagaagacatttaagattcagggaagagggtcccacactgaagaggggtgaaaggagatcccaggaaaacctcagggcaacaagtgtgcagttggcatggaaacaatcaggactgtggcctccaggacagagggctctgcggaaagaaagcacacacagaactgtcagggtagacagcctgacagaccacaaggaaaagcccagctggggagacaagggtcgaatgcagaaaacaaagccaacaaacagggccatgagtaactctaagaaatacacaaagttattccaaagaggtcatataagcacagcaggtggcatggctcagtgttaaagtacctacacagctgcccaatggaagtcccatcactggtctcaccacaaattctaacaacctacagccaggagatgggggagccaggtgagggcatgtgagggtgtgggggccactggagaagtacagctgcctgtgccatatacgtctgaacaacgtctaaaactgacgagagataaaataagaaacagcaacaaaaacatgttgtttagaaacagggagtttaagggccgggcgcggtggctcatgcctgtaatcccagcactttgggaggcctaggcaggcggatcatgaggtcagtagatcaagaccatcctggctaacatggtgaacatggtgaaaccctgtctctactaaaaatacaaaaaattagctgggtgtggtggcatgtgactgtagtcccagctactcgggaggctgaggcaggagaatcacttgaacccgggaggtggaggttgcagtgagccaagatcgtgccactgcactctagcctgggcaacagagtgagactctgtctcaaaaaaaaaaaaaaaaaaaaagaaaaaaacagagttagggccaggcgaggtggctcacgcttgtaatcccagcactttgggaggctgaggcgggcagatcatgaggtgaggagatcaagaccatcctggctaacacggtgaaaccccgtctctactaaaaatacaaaaaaaaaattagccaggcgtggtggcgggcacctgtagtcccagctactcaggaggctgaggcaagagaatggtgtgaacccaggaggcagagcttgcagtgagctgagatcacgtcactgcactccggactgggcgacaaagcaagactccgtctcaaaaaaaaagaaacggagttaaatatcaaacggccaaaaagtactaccaaacttttaaaacaatgcacgcactacacactttgaaaattgaaaatatttaaaagaaaaaattggcaataaatattttgattggaaagggtgatggttataaaaacatgatataaagatgtgtaagaacccaagaaacaatgtggcttcaaaagtatcaacacctactgcaagacactgagtgatacccacggcccagggctaggccaatgccccactaacctgggtcccctcaaaaccctctgcccccagccttcaggagctgctggctcccacctgtcagaactcagttctggttgtatggagaggtctgaacccaccttccgtcctctggtccagctctcgcatcagctggaagttcctctgaagttcgcagggaaggttctcgatacctgaaacgcaaaaacacagaagccatgtacctctcagcagcaagacaaaaattcacctccaaaggttttctgtcttttttttttgagatggagtttcactcttgttgcccaggctggagtgcagtggtgcgatcttggctcactgcaacctacacctcccaggttcaagtgattctcacgcctccgcctcctgagtagctgggattacaggcacatgccaccatgcccggctagtttttgtatttttagttgagacggggtttcacaaggttggccaggcttgtctcgaactcctgacctcaggtgatccgcccacctcggcctctcaaagtgctgggattacaggtgtgagccaccaggactggccaaaagttttatacttcaagtctacaagcccactctgtattctgtctctgtcagggtttgcggagcggaaggactgtgatctcatttttagatgcaggtaccaaacagtgctgacaagaggctgtgtgcacacttcggaagctgtcagaagtcaaagaagggagagggaaacttggaaaccaacagcacaggcaggggaggccaactgaccccaccctctaggctgccccccctcagtgagcagcatcttccaaggctcaagccaaaatcccctgggtcctccttgatcttcccctactttacccagaaatccagtgcattgagcagtgtagccacgctgcccacgcgactttatgcaaggatagaaatgtttcctctctcggatgggcgtggtggctcatacctgtaatcccagcactttgggagatcaagacaggcaaatcagttgaggtcaggagttcaagaccagcctggccaacatggtgaaaccctgtctctactaaaaatacaaaaattatccaggcgtggtggtgcacagctacagtcccagctactcgagaggctagggcatgagaattgcttgaacctgggaggtggaggttgcagtgtgctgagatcataccctccaacctgggcaacagggtgagactccatttcaaaaaaaatcaaaaaaagaaaaagaaaagaaatgttctctctgagctgcccaagacagtggtggccatagggagctactgagcactggaaatgggactaacgccattcaatttttaattttacttaaatagtccctgtggctagcgcaaccattccccacagtctgccaggaggacccccgtgctgctttcgcgtctgctttgttaccccctagaccaggccaacctccgccccctgcacagctgacacaggctcctaaggggggctgcctcctccagtcttggccaccctcccatctgctgttcacagttaccaggcaatcattttaaacctaactctatcttatgcatctgatgcttccagccccagtgttttcccagctcccctagaggacagaggcacagcctcccggctggcacagcctcccagacacacacaaagtcaaccctccttgggaggccagcccactggctgggcaccaggatagagaaggcctcccctccagcgtgctccccagcttgactcttctacccagggaaccccccactactcagacccccaagagacagcggagcacatgggcagaatcgggcgtccctctagggcagcggtctccagctccaggccacggctcactcgccactgtctcagcccctgggcgggtgccaggccgaagaccatgaggatccccagtgcagcgcccccacaagggccctccagagccacccggcacaaccccaaacaccgcgaccccaaagctgtgcccatcccgggccgacgtcaggggtcccgcgtggggtctgcccctctacgagcgggagaccctgagcaggctgctcggcagcgctggaccttccctggtgtgtaaagtgagggaaagcaccgtccgctcagccgctgggggcgccgacctgctgccacctggaaacagcacagcccgcccaccagggccgactcggcaccgccctccccgcctccgcgccgcagtccccagtgccggggagagacgccccgcggcccgcacgccctccccagccgcggtcacacaagaggccggcgcacacgggcgcacagccaggcggaggcccagaccccggagcccccaaggcccggagccccgcagcgggcgccagctcctcctgcagacgggacagggacgggcgggacctggcggggccggggccggagctgggggcggagatgaggcggggcctgggtaggggcgggacctaatatgtgggcggggtcgaggccgcaagccccgcccagcatcgccaggccccgccccgccgtgacgcacctggaattggcgcgacccagccggcgggaccccccgcgcccgccccccgcgccctcccctcccttgcggccctgccccgccccgtccgcgcgccccccgtcgcgcccggccgcgcccgccgccctcccgagcccacggggtctgcatgcggtgcccggcgcgcggggggctgcggcacggaggactccgcgtgggcggcgggcgcggggcccgtggggcgcgcttactgtccagatagtgctccaagtacatggcggtcgccatcttcgtccgcggccgcgctcggggtctgcgcgggcgggcggtgccgcgggaggcgggggcggggcggtgccagcgcgctcactattcatgagtcgcgcgcgctgattggtcgcgcccgggggcggggtcggacacgcctttcagcttccggcgggcggcgggctgcggggcccgggcggaggttgtggcagcggcgtcgggcagcgagcaggacccagggccgcagcggatcggaggccgaggaggagcaggggttcccggccccaccgcccggcgtgcggcccagggcacccaggtgggcgtctcccctccgcacctgtcagcgacccctgggccaccaaacgcaaacacgtggtcccggggacctcacgcccgtcctgacggcgcccacgcgacccctgctcccggccgggtcccggacaggccgccacgaggccctcccttcccgaaggctccttgggacctgtctggctcagcgcctttcccccggaccccgagcccccggggcctcagcccggcctgagccgagggccggcaccgcgtggcccgggcgagctgcccctccctcagggcctgggccctggcgcccttcccccgccaacgccgccccttccctccgaggaaagcggccgccccgcccagcaccagtgagggcactggctcctttgctgccacctctcgaggcaggcaggacccgcaccatctggatgccttggccgaaaaggcacgtgcggcagtatgatatagttaataagatggcgtgcaaaggtgtgccgtaagatgcatgcaaaaatactggagaaggccggcgcgctggcgcacgcctgtaatcccatcactttgggaggccgaggcgggcggatcacttgagggcaggaatttgagaccagcctggccaacgtgttgaaaccccgactctactaaaaatacaaaaaaaaaaaaaaattagccaagcgtggtggcgcacgcctgtagtcccagctactccggaggctgagcccgggaggcggaggttgtagtgagctgagatcgcgtctgcactccagcctgggcgacagagcaagactctgtcttcaaaaaaaaaaaagaaaattttaagaaaaaaaaaatactggagaaacataattaaaatatgtttcagactcggcacggtggctcacgcctgtaatcccaacactttgggaggccgaggcgggcggatcacttgagggcaggaatttgagaccagcctggccaacgtggcgaaatcatgtctctactaaaaatacaaaaattacccgggcgtggtggcgggcgcctgtactcccagctactcggagactgaggcaggaaaattacttgaacttgggagagggaggttgcagtgagaagagatcatgtaactgcactgcagcttgggtgacaagagcaagactccgtctcaaaataataataatacaaaaactagccgggcatggtggcaagtacctgtaatcccagatactcgggaggctgaaacaggagaatcgcttgagcttgggaggcggaggttgcagtgagccgagattgcaccactgcactccagcctggccagcagagcaagattccatctcaaaaataaaataaaatagggcaggcgcggtggctcactcctgtaattccagcactttgggaggccaaggcgggaggatcacgaggtcaggagattgagaccatcctgcctaacacggtgaaaccccatctctactaaaactacaaaaaaattagctgggcatggtggcgggcgcctgtaatcccagctactcgggcggccgaggc

SEQ ID NO: 2143 - DNA, 6000 bp, Homo sapiens
gtctgtaatcccagcacttggggaggctgaggctggaggagtgcttgaacccaggagttggagaccagcctgggcaacatagataccccaactctacagaaaaaaaattaaaaattagccaggtgtcatggtgtgtgcttgtagtcccagatattgagggctgaggcaacaggtcctttgaacccaggaggtcgaggctgcatgagccatgattgtgccactgcacttcagcctgggtgacagagcaagaccctgactctaaaaataataataaccaaggctgggtgtggtggcttatgcctctcatcccagcactttgggaggccgaggcgggcagatcacaaggtcaagagatagagaccatcctggccaatgtggcgaaaccttgtctctactaaaaatacaaaaattagctgggcatggtggcaggcacctgtaatcccagctgcttgggaggaagaggcaggagaatcgctttaacccaggaggcggaggttgcagtgagccgagattgcgccacggcactccagcttgggtgacagagagacagactccgtttcaaaataataataataatataataatcaaaaattggaagtaaccaagatgctctttaataagtacatgggtggccaggggctgtggctcatgcctgtaatcctagcactttgggaggccggggcaggcggaacacaaggccaggagatcaagaccatcctggctaacacggtgaaaccccatgtgtactaaaaatacaaagaattagacaggcgtggtgtcgggcgcctgtagtcccagctactcgggaggctgaggcaggagaatggcatgaacccgggaggcggagcttgcagtgagccgagatcctgccactgcactccagcctgggtgacagagcgagactctgtctcaaaaaaaaaaaaaaaaaaagtacatgggtaaactgtggaacatccggacgttggaatatttttcaaattaaacatgaactagctattaagccacggaaaggcacgctgggaccttaaatgcatattgctgagtgaaagaagccattctgaaaaggctcatactgtatgattccaattacatgacattctggaaaaagcaaactggaaacagtaaaatgatcagtggttgccaggggcctcgggagggggagagggatgaatcgggaagcgcaggggatttttagggccacaaaactatgctgtatgacatgtaatggggggtagctgacattatacatttgtcaaaacctataagaatgcacaaggcactgggcgtggtggctcacgcccgtaatcccaacactttggaaggctgatgccagtggatcacctaagtttaggagtttgaaaccagcctggccaacagggtgaaaccccatctctgcttaaaatacaaaacttagccaggcgtggtggtgcctgcctgtaatcccagctacttgggaggctgaggcaggagaatggctggaacccagaaggcggaggttgtagtaagccaagattgcaccattgcactccatcctgggcgaagaagccaggctccatctcaaaaaaaaaaaaaaaaaagcacaaggcagaatgaacccttatggaaataatgatggactttggttaataataatgtatcgggcccgccgtggtggctcacgcctgtaatcccagcactttgggaggccaaggcaggaggatcatgaggtcaggtgatcaagaccatcctggctaacacggtgaaacccccgtctctactgaaaatacaaaaaattagccgggcatggtggcgggcacctgtagttccagctactcaggaggctgaggcgggagaatggcgtggatccgggaggtggagcttgcagtgagccgagcccagctaatttgaggtctcaaaaaaaaaaaaagtatcaatattgtttcatcgattgtaacaaatgtatcacattaatgcaaaatgtttataatagaggagtgtgtgtgtgtgtgtgtgtgtgtgtgtgtgtgtgtgtgtgtggaggagtatatgagaagtctactttctcttcaacttttcaataaacctaaaactgatggaaaaatagtctataattaaatgaggccagtaaggatgcactcaaactgctaacattaggactgaaagctgaacaaggcaatcacagtcctgccccctggggaggtgggaagctaaaagttcctgtattgtttaatttttttgtttttgagacagagtcttgctcttgttgcccaggctggaatgcaatggcatgattttggctcaccgcagcctctgcctcctgggttcaagtgattctcctgcctcaccttcccaagtagctgggattacaggcagctaccaccacaaccagctacttttgtatttttaatagagatggggtttctctgtattggtcaggctggtctcgaactcccgacctcaggtgatccacccaccttggcctcccaaagtgctgggattacaggcgtgagccaccaccccagctgaatttttttttggggggggaggggtttgctcttgtagcccaggctggagtgcaatggcatgacctcagctgactgcatcctctgcctcctaggttcaaatgattctcctgcctcaggctcccgagcagctgagattgcaggcccatgcccaccacgcctggctaattttgtatttttagtagagactgggtttctccatgttggtcaggctggtctcaaactcctgacctcaggtgatccacccacctcatccttccaaagtgctgggattacaggcgtgagccaccatgcctggcctgaatttttataatgaacataatagtggcaaaaacattgtttctggttttcaatatttgactggggtttagggaagagtccaccaagggggacatagcttgtttttttaggtgggggtctccgtcacccaggcaagagtacagtggtttgatcatggctcactgcagcctagacctcctgggctcaagccatcctcccgcctcagcctctcatggtgatcatacggatttgagtcacagcagctggcttaatatctttaaaaatgcattttaaataatgaaagtactgctcctttgatcagcttatgctaatttgtgtgaccagcaacgttgcatctcggaagtcaaggatgtggctgggggtggggcggggggttctggggcctacacgttacatctagtggtcatcagttcttggggctcggggagcctttgggacgtcctcttgagatcacagggagtggagacaggactgggaagtgacacacctcacccatgaaagacctgccagagatgagtttgatccccagcttgggggcgtccagtggtgaagtgggaagaggagtgacatgggtactggtgagcactgcatgatgatgctacacagtttggaggcagagaagaatcaccccaaagactaatatttaaacactttaaattattttattttatattttaagatggagtctcgctctgtcacccaggctggagtgcagtggcacgatctcggctcactgcaacctccacgtaccaggttcaagtgattctccttcctcagcctcctgggtagctgggattacaggcaccagccattatgcccggctaagttttttttttttttttttttttttgggacggagtgttgctctgtcgcccaggctggagtgcaatggcacgatctcggctcaccgcaagctcagcctcccgggttcacgccattctcctgcctcggccgcccgagtagctgggattacaggcgcccgccaccatgcccagctaatttttttgtagttttagtagagatggggtttcaccgtgttaggcaggatggtctcaatctcctgacctcgtgatcctcccgccttggcctcccaaagtgctggaattacaggagtgagccaccgcgcctgccctattttattttatttttgagatggaatcttgctctgctggccaggctggagtgcagtggtgcaatctcggctcactgcaacctccgcctcccaagctcaagcgattctcctgtttcagcctcccgagtatctgggattacaggtacttgccaccatgcccggctagtttttgtattattattattttgagacggagtcttgctcttgtcacccaagctgcagtgcagttacatgatctcttctcactgcaacctccctctcccaagttcaagtaattttcctgcctcagtctccgagtagctgggagtacaggcgcccgccaccacgcccgggtaatttttgtatttttagtagagacatgatttcgccacgttggccaggctggtctcaaattcctgccctcaagtgatccgcccgcctcggcctcccaaagtgttgggattacaggcgtgagccaccgtgccgagtctgaaacatattttaattatgtttctccagtattttttttttcttaaaattttcttttttttttttgaagacagagtcttgctctgtcgcccaggctggagtgcagacgcgatctcagctcactacaacctccgcctcccgggctcagcctccggagtagctgggactacaggcgtgcgccaccacgcttggctaatttttttttttttttgtatttttagtagagtcggggtttcaacacgttggccaggctggtctcaaattcctgccctcaagtgatccgcccgcctcggcctcccaaagtgatgggattacaggcgtgcgccagcgcgccggccttctccagtatttttgcatgcatcttacggcacacctttgcacgccatcttattaactatatcatactgccgcacgtgccttttcggccaaggcatccagatggtgcgggtcctgcctgcctcgagaggtggcagcaaaggagccagtgccctcactggtgctgggcggggcggccgctttcctcggagggaaggggcggcgttggcgggggaagggcgccagggcccaggccctgagggaggggcagctcgcccgggccacgcggtgccggccctcggctcaggccgggctgaggccccgggggctcggggtccgggggaaaggcgctgagccagacaggtcccaaggagccttcgggaagggagggcctcgtggcggcctgtccgggacccggccgggagcaggggtcgcgtgggcgccgtcaggacgggcgtgaggtccccgggaccacgtgtttgcgtttggtggcccaggggtcgctgacaggtgcggaggggagacgcccacctgggtgccctgggccgcacgccgggcggtggggccgggaacccctgctcctcctcggcctccgatccgctgcggccctgggtcctgctcgctgcccgacgccgctgccacaacctccgcccgggccccgcagcccgccgcccgccggaagctgaaaggcgtgtccgaccccgcccccgggcgcgaccaatcagcgcgcgcgactcatgaatagtgagcgcgctggcaccgccccgcccccgcctcccgcggcaccgcccgcccgcgcagaccccgagcgcggccgcggacgaagatggcgaccgccatgtacttggagcactatctggacagtaagcgcgccccacgggccccgcgcccgccgcccacgcggagtcctccgtgccgcagccccccgcgcgccgggcaccgcatgcagaccccgtgggctcgggagggcggcgggcgcggccgggcgcgacggggggcgcgcggacggggcggggcagggccgcaagggaggggagggcgcggggggcgggcgcggggggtcccgccggctgggtcgcgccaattccaggtgcgtcacggcggggcggggcctggcgatgctgggcggggcttgcggcctcgaccccgcccacatattaggtcccgcccctacccaggccccgcctcatctccgcccccagctccggccccggccccgccaggtcccgcccgtccctgtcccgtctgcaggaggagctggcgcccgctgcggggctccgggcc

SEQ ID NO: 2144 - DNA, 6000 bp, Homo sapiens
aacaaaaaaaaaatagatcacacatataaaggaccaagaatccaaacggcaccagattttctgcagcaacgtggaagctaggagacaaggcagcaatgtcgccaacttcctgagtgaaaacaattgtcaacctaggattctatacccaaccaaactatcagctgagtatgaggctagaacaaacacattttcagacatgcaatgttacaagaaaatctaccttcctttttttcttttttttttttttttttgagatggagtttcgctcttgttgcccagggtggagtgcaatggtgcgatctccaggtgcaacctccgcctccaggttcaagtgattctcctgcctcagcctcccaattagctgggattataggcgtgcgccaccacacccggctaattttgtatttttagtagagacggggtttctccatgtcgatcaggctggtctcgaactcctgacctcaggtgatctgcccacctcagcctcccaaagtgctgggattacaggcatgagccaccgtgcctggccaagaaaatctaccttcctatgtgcctttttttcaggaacctaccaaaggaaaggctctatcaaaacaggagagcaagggcaaaaagaagacatttaagattcagggaagagggtcccacactgaagaggggtgaaaggagatcccaggaaaacctcagggcaacaagtgtgcagttggcatggaaacaatcaggactgtggcctccaggacagagggctctgcggaaagaaagcacacacagaactgtcagggtagacagcctgacagaccacaaggaaaagcccagctggggagacaagggtcgaatgcagaaaacaaagccaacaaacagggccatgagtaactctaagaaatacacaaagttattccaaagaggtcatataagcacagcaggtggcatggctcagtgttaaagtacctacacagctgcccaatggaagtcccatcactggtctcaccacaaattctaacaacctacagccaggagatgggggagccaggtgagggcatgtgagggtgtgggggccactggagaagtacagctgcctgtgccatatacgtctgaacaacgtctaaaactgacgagagataaaataagaaacagcaacaaaaacatgttgtttagaaacagggagtttaagggccgggcgcggtggctcatgcctgtaatcccagcactttgggaggcctaggcaggcggatcatgaggtcagtagatcaagaccatcctggctaacatggtgaacatggtgaaaccctgtctctactaaaaatacaaaaaattagctgggtgtggtggcatgtgactgtagtcccagctactcgggaggctgaggcaggagaatcacttgaacccgggaggtggaggttgcagtgagccaagatcgtgccactgcactctagcctgggcaacagagtgagactctgtctcaaaaaaaaaaaaaaaaaaaaagaaaaaaacagagttagggccaggcgaggtggctcacgcttgtaatcccagcactttgggaggctgaggcgggcagatcatgaggtgaggagatcaagaccatcctggctaacacggtgaaaccccgtctctactaaaaatacaaaaaaaaaattagccaggcgtggtggcgggcacctgtagtcccagctactcaggaggctgaggcaagagaatggtgtgaacccaggaggcagagcttgcagtgagctgagatcacgtcactgcactccggactgggcgacaaagcaagactccgtctcaaaaaaaaagaaacggagttaaatatcaaacggccaaaaagtactaccaaacttttaaaacaatgcacgcactacacactttgaaaattgaaaatatttaaaagaaaaaattggcaataaatattttgattggaaagggtgatggttataaaaacatgatataaagatgtgtaagaacccaagaaacaatgtggcttcaaaagtatcaacacctactgcaagacactgagtgatacccacggcccagggctaggccaatgccccactaacctgggtcccctcaaaaccctctgcccccagccttcaggagctgctggctcccacctgtcagaactcagttctggttgtatggagaggtctgaacccaccttccgtcctctggtccagctctcgcatcagctggaagttcctctgaagttcgcagggaaggttctcgatacctgaaacgcaaaaacacagaagccatgtacctctcagcagcaagacaaaaattcacctccaaaggttttctgtcttttttttttgagatggagtttcactcttgttgcccaggctggagtgcagtggtgcgatcttggctcactgcaacctacacctcccaggttcaagtgattctcacgcctccgcctcctgagtagctgggattacaggcacatgccaccatgcccggctagtttttgtatttttagttgagacggggtttcacaaggttggccaggcttgtctcgaactcctgacctcaggtgatccgcccacctcggcctctcaaagtgctgggattacaggtgtgagccaccaggactggccaaaagttttatacttcaagtctacaagcccactctgtattctgtctctgtcagggtttgcggagcggaaggactgtgatctcatttttagatgcaggtaccaaacagtgctgacaagaggctgtgtgcacacttcggaagctgtcagaagtcaaagaagggagagggaaacttggaaaccaacagcacaggcaggggaggccaactgaccccaccctctaggctgccccccctcagtgagcagcatcttccaaggctcaagccaaaatcccctgggtcctccttgatcttcccctactttacccagaaatccagtgcattgagcagtgtagccacgctgcccacgcgactttatgcaaggatagaaatgtttcctctctcggatgggcgtggtggctcatacctgtaatcccagcactttgggagatcaagacaggcaaatcagttgaggtcaggagttcaagaccagcctggccaacatggtgaaaccctgtctctactaaaaatacaaaaattatccaggcgtggtggtgcacagctacagtcccagctactcgagaggctagggcatgagaattgcttgaacctgggaggtggaggttgcagtgtgctgagatcataccctccaacctgggcaacagggtgagactccatttcaaaaaaaatcaaaaaaagaaaaagaaaagaaatgttctctctgagctgcccaagacagtggtggccatagggagctactgagcactggaaatgggactaacgccattcaatttttaattttacttaaatagtccctgtggctagcgcaaccattccccacagtctgccaggaggacccccgtgctgctttcgcgtctgctttgttaccccctagaccaggccaacctccgccccctgcacagctgacacaggctcctaaggggggctgcctcctccagtcttggccaccctcccatctgctgttcacagttaccaggcaatcattttaaacctaactctatcttatgcatctgatgcttccagccccagtgttttcccagctcccctagaggacagaggcacagcctcccggctggcacagcctcccagacacacacaaagtcaaccctccttgggaggccagcccactggctgggcaccaggatagagaaggcctcccctccagcgtgctccccagcttgactcttctacccagggaaccccccactactcagacccccaagagacagcggagcacatgggcagaatcgggcgtccctctagggcagcggtctccagctccaggccacggctcactcgccactgtctcagcccctgggcgggtgccaggccgaagaccatgaggatccccagtgcagcgcccccacaagggccctccagagccacccggcacaaccccaaacaccgcgaccccaaagctgtgcccatcccgggccgacgtcaggggtcccgcgtggggtctgcccctctacgagcgggagaccctgagcaggctgctcggcagcgctggaccttccctggtgtgtaaagtgagggaaagcaccgtccgctcagccgctgggggcgccgacctgctgccacctggaaacagcacagcccgcccaccagggccgactcggcaccgccctccccgcctccgcgccgcagtccccagtgccggggagagacgccccgcggcccgcacgccctccccagccgcggtcacacaagaggccggcgcacacgggcgcacagccaggcggaggcccagaccccggagcccccaaggcccggagccccgcagcgggcgccagctcctcctgcagacgggacagggacgggcgggacctggcggggccggggccggagctgggggcggagatgaggcggggcctgggtaggggcgggacctaatatgtgggcggggtcgaggccgcaagccccgcccagcatcgccaggccccgccccgccgtgacgcacctggaattggcgcgacccagccggcgggaccccccgcgcccgccccccgcgccctcccctcccttgcggccctgccccgccccgtccgcgcgccccccgtcgcgcccggccgcgcccgccgccctcccgagcccacggggtctgcatgcggtgcccggcgcgcggggggctgcggcacggaggactccgcgtgggcggcgggcgcggggcccgtggggcgcgcttactgtccagatagtgctccaagtacatggcggtcgccatcttcgtccgcggccgcgctcggggtctgcgcgggcgggcggtgccgcgggaggcgggggcggggcggtgccagcgcgctcactattcatgagtcgcgcgcgctgattggtcgcgcccgggggcggggtcggacacgcctttcagcttccggcgggcggcgggctgcggggcccgggcggaggttgtggcagcggcgtcgggcagcgagcaggacccagggccgcagcggatcggaggccgaggaggagcaggggttcccggccccaccgcccggcgtgcggcccagggcacccaggtgggcgtctcccctccgcacctgtcagcgacccctgggccaccaaacgcaaacacgtggtcccggggacctcacgcccgtcctgacggcgcccacgcgacccctgctcccggccgggtcccggacaggccgccacgaggccctcccttcccgaaggctccttgggacctgtctggctcagcgcctttcccccggaccccgagcccccggggcctcagcccggcctgagccgagggccggcaccgcgtggcccgggcgagctgcccctccctcagggcctgggccctggcgcccttcccccgccaacgccgccccttccctccgaggaaagcggccgccccgcccagcaccagtgagggcactggctcctttgctgccacctctcgaggcaggcaggacccgcaccatctggatgccttggccgaaaaggcacgtgcggcagtatgatatagttaataagatggcgtgcaaaggtgtgccgtaagatgcatgcaaaaatactggagaaggccggcgcgctggcgcacgcctgtaatcccatcactttgggaggccgaggcgggcggatcacttgagggcaggaatttgagaccagcctggccaacgtgttgaaaccccgactctactaaaaatacaaaaaaaaaaaaaaattagccaagcgtggtggcgcacgcctgtagtcccagctactccggaggctgagcccgggaggcggaggttgtagtgagctgagatcgcgtctgcactccagcctgggcgacagagcaagactctgtcttcaaaaaaaaaaaagaaaattttaagaaaaaaaaaatactggagaaacataattaaaatatgtttcagactcggcacggtggctcacgcctgtaatcccaacactttgggaggccg

SEQ ID NO: 2145 - DNA, 6000 bp, Homo sapiens
ataatcaaaaattggaagtaaccaagatgctctttaataagtacatgggtggccaggggctgtggctcatgcctgtaatcctagcactttgggaggccggggcaggcggaacacaaggccaggagatcaagaccatcctggctaacacggtgaaaccccatgtgtactaaaaatacaaagaattagacaggcgtggtgtcgggcgcctgtagtcccagctactcgggaggctgaggcaggagaatggcatgaacccgggaggcggagcttgcagtgagccgagatcctgccactgcactccagcctgggtgacagagcgagactctgtctcaaaaaaaaaaaaaaaaaaagtacatgggtaaactgtggaacatccggacgttggaatatttttcaaattaaacatgaactagctattaagccacggaaaggcacgctgggaccttaaatgcatattgctgagtgaaagaagccattctgaaaaggctcatactgtatgattccaattacatgacattctggaaaaagcaaactggaaacagtaaaatgatcagtggttgccaggggcctcgggagggggagagggatgaatcgggaagcgcaggggatttttagggccacaaaactatgctgtatgacatgtaatggggggtagctgacattatacatttgtcaaaacctataagaatgcacaaggcactgggcgtggtggctcacgcccgtaatcccaacactttggaaggctgatgccagtggatcacctaagtttaggagtttgaaaccagcctggccaacagggtgaaaccccatctctgcttaaaatacaaaacttagccaggcgtggtggtgcctgcctgtaatcccagctacttgggaggctgaggcaggagaatggctggaacccagaaggcggaggttgtagtaagccaagattgcaccattgcactccatcctgggcgaagaagccaggctccatctcaaaaaaaaaaaaaaaaaagcacaaggcagaatgaacccttatggaaataatgatggactttggttaataataatgtatcgggcccgccgtggtggctcacgcctgtaatcccagcactttgggaggccaaggcaggaggatcatgaggtcaggtgatcaagaccatcctggctaacacggtgaaacccccgtctctactgaaaatacaaaaaattagccgggcatggtggcgggcacctgtagttccagctactcaggaggctgaggcgggagaatggcgtggatccgggaggtggagcttgcagtgagccgagcccagctaatttgaggtctcaaaaaaaaaaaaagtatcaatattgtttcatcgattgtaacaaatgtatcacattaatgcaaaatgtttataatagaggagtgtgtgtgtgtgtgtgtgtgtgtgtgtgtgtgtgtgtgtgtggaggagtatatgagaagtctactttctcttcaacttttcaataaacctaaaactgatggaaaaatagtctataattaaatgaggccagtaaggatgcactcaaactgctaacattaggactgaaagctgaacaaggcaatcacagtcctgccccctggggaggtgggaagctaaaagttcctgtattgtttaatttttttgtttttgagacagagtcttgctcttgttgcccaggctggaatgcaatggcatgattttggctcaccgcagcctctgcctcctgggttcaagtgattctcctgcctcaccttcccaagtagctgggattacaggcagctaccaccacaaccagctacttttgtatttttaatagagatggggtttctctgtattggtcaggctggtctcgaactcccgacctcaggtgatccacccaccttggcctcccaaagtgctgggattacaggcgtgagccaccaccccagctgaatttttttttggggggggaggggtttgctcttgtagcccaggctggagtgcaatggcatgacctcagctgactgcatcctctgcctcctaggttcaaatgattctcctgcctcaggctcccgagcagctgagattgcaggcccatgcccaccacgcctggctaattttgtatttttagtagagactgggtttctccatgttggtcaggctggtctcaaactcctgacctcaggtgatccacccacctcatccttccaaagtgctgggattacaggcgtgagccaccatgcctggcctgaatttttataatgaacataatagtggcaaaaacattgtttctggttttcaatatttgactggggtttagggaagagtccaccaagggggacatagcttgtttttttaggtgggggtctccgtcacccaggcaagagtacagtggtttgatcatggctcactgcagcctagacctcctgggctcaagccatcctcccgcctcagcctctcatggtgatcatacggatttgagtcacagcagctggcttaatatctttaaaaatgcattttaaataatgaaagtactgctcctttgatcagcttatgctaatttgtgtgaccagcaacgttgcatctcggaagtcaaggatgtggctgggggtggggcggggggttctggggcctacacgttacatctagtggtcatcagttcttggggctcggggagcctttgggacgtcctcttgagatcacagggagtggagacaggactgggaagtgacacacctcacccatgaaagacctgccagagatgagtttgatccccagcttgggggcgtccagtggtgaagtgggaagaggagtgacatgggtactggtgagcactgcatgatgatgctacacagtttggaggcagagaagaatcaccccaaagactaatatttaaacactttaaattattttattttatattttaagatggagtctcgctctgtcacccaggctggagtgcagtggcacgatctcggctcactgcaacctccacgtaccaggttcaagtgattctccttcctcagcctcctgggtagctgggattacaggcaccagccattatgcccggctaagttttttttttttttttttttttttgggacggagtgttgctctgtcgcccaggctggagtgcaatggcacgatctcggctcaccgcaagctcagcctcccgggttcacgccattctcctgcctcggccgcccgagtagctgggattacaggcgcccgccaccatgcccagctaatttttttgtagttttagtagagatggggtttcaccgtgttaggcaggatggtctcaatctcctgacctcgtgatcctcccgccttggcctcccaaagtgctggaattacaggagtgagccaccgcgcctgccctattttattttatttttgagatggaatcttgctctgctggccaggctggagtgcagtggtgcaatctcggctcactgcaacctccgcctcccaagctcaagcgattctcctgtttcagcctcccgagtatctgggattacaggtacttgccaccatgcccggctagtttttgtattattattattttgagacggagtcttgctcttgtcacccaagctgcagtgcagttacatgatctcttctcactgcaacctccctctcccaagttcaagtaattttcctgcctcagtctccgagtagctgggagtacaggcgcccgccaccacgcccgggtaatttttgtatttttagtagagacatgatttcgccacgttggccaggctggtctcaaattcctgccctcaagtgatccgcccgcctcggcctcccaaagtgttgggattacaggcgtgagccaccgtgccgagtctgaaacatattttaattatgtttctccagtattttttttttcttaaaattttcttttttttttttgaagacagagtcttgctctgtcgcccaggctggagtgcagacgcgatctcagctcactacaacctccgcctcccgggctcagcctccggagtagctgggactacaggcgtgcgccaccacgcttggctaatttttttttttttttgtatttttagtagagtcggggtttcaacacgttggccaggctggtctcaaattcctgccctcaagtgatccgcccgcctcggcctcccaaagtgatgggattacaggcgtgcgccagcgcgccggccttctccagtatttttgcatgcatcttacggcacacctttgcacgccatcttattaactatatcatactgccgcacgtgccttttcggccaaggcatccagatggtgcgggtcctgcctgcctcgagaggtggcagcaaaggagccagtgccctcactggtgctgggcggggcggccgctttcctcggagggaaggggcggcgttggcgggggaagggcgccagggcccaggccctgagggaggggcagctcgcccgggccacgcggtgccggccctcggctcaggccgggctgaggccccgggggctcggggtccgggggaaaggcgctgagccagacaggtcccaaggagccttcgggaagggagggcctcgtggcggcctgtccgggacccggccgggagcaggggtcgcgtgggcgccgtcaggacgggcgtgaggtccccgggaccacgtgtttgcgtttggtggcccaggggtcgctgacaggtgcggaggggagacgcccacctgggtgccctgggccgcacgccgggcggtggggccgggaacccctgctcctcctcggcctccgatccgctgcggccctgggtcctgctcgctgcccgacgccgctgccacaacctccgcccgggccccgcagcccgccgcccgccggaagctgaaaggcgtgtccgaccccgcccccgggcgcgaccaatcagcgcgcgcgactcatgaatagtgagcgcgctggcaccgccccgcccccgcctcccgcggcaccgcccgcccgcgcagaccccgagcgcggccgcggacgaagatggcgaccgccatgtacttggagcactatctggacagtaagcgcgccccacgggccccgcgcccgccgcccacgcggagtcctccgtgccgcagccccccgcgcgccgggcaccgcatgcagaccccgtgggctcgggagggcggcgggcgcggccgggcgcgacggggggcgcgcggacggggcggggcagggccgcaagggaggggagggcgcggggggcgggcgcggggggtcccgccggctgggtcgcgccaattccaggtgcgtcacggcggggcggggcctggcgatgctgggcggggcttgcggcctcgaccccgcccacatattaggtcccgcccctacccaggccccgcctcatctccgcccccagctccggccccggccccgccaggtcccgcccgtccctgtcccgtctgcaggaggagctggcgcccgctgcggggctccgggccttgggggctccggggtctgggcctccgcctggctgtgcgcccgtgtgcgccggcctcttgtgtgaccgcggctggggagggcgtgcgggccgcggggcgtctctccccggcactggggactgcggcgcggaggcggggagggcggtgccgagtcggccctggtgggcgggctgtgctgtttccaggtggcagcaggtcggcgcccccagcggctgagcggacggtgctttccctcactttacacaccagggaaggtccagcgctgccgagcagcctgctcagggtctcccgctcgtagaggggcagaccccacgcgggacccctgacgtcggcccgggatgggcacagctttggggtcgcggtgtttggggttgtgccgggtggctctggagggcccttgtgggggcgctgcactggggatcctcatggtcttcggcctggcacccgcccaggggctgagacagtggcgagtgagccgtggcctggagctggagaccgctgccctagagggacgcccgattctgcccatgtgctccgctgtctcttgggggtctgagtagtggggggttccctgggtaga

SEQ ID NO: 2146 - DNA, 6000 bp, Homo sapiens
ctgagtagctgggactacaggcacgtgccaccacgccctgctaatttttgtatttttagtagagatggggttttgccatgttggccaagctggtcttgaactcctgacctcaggtgatctgcctgcctcagcctcccaaagtgttgggattacaggcgtgagccaccgcacctgacagaaaaagaggtctggtggaccctcagttccacatggctggggaggcctcacaatcatggcgggagacgaaaggcttatcttacatggcagcagacaatagaaaatgagagccaagtgaaaggggtttccccttaaaaaaaccatcagatctcgtgagacttattcactaccacgagaaaagtatgggggaaccacccccaagactcagcatcattttgggaaacaggtgtaaaatgtcagtgttgtgcccagagacaggtgtgtgaaattgaattctgaaggggtatgcagtgattggagagtggtttgcggagcttgctggctgggggtctggggaggaccctgtgccttaccttgggtggttgctcaggaagctcagtggccagtgctggggctcaagttgacttccaaggaagacgtgtgagaatgctgcagttgctttcttttttttttgtttgagacggagtctcactctgttgcccaggctggagtgcagtggtgcaatctctgctcactgcaagctccgcctcccaggttcacgccattctcctgcctgtgtcccgagtagctgggactacaggcgcccaccaccatgcccggctaattgtttgtatttttagtagtgacagggtttcaccgtgttagccaggatggtctcgatctcctgacctcgtgatccgcctgcctcggcctcccaaagtgctgggattacaggcgtgagccaccacgcccggccgctgcagttgctttctaaaggagtactgtgcttgctctggaagggcaagacttaccgtgttgcacttgccttttggaagctgctggagtcagcttaggctctgtattagtccattcttgtattgctataaagaacgacctgagactgtgtaatttataaagaaatgaggtttaattgactcacagttctgcaggctgtacaggaagcgtggtgcggaggcctcaggaaacttacatcatggcagaaggcggaggggaagcaagcacgttttaccacggcagaccaggagagaaagggagcaaaggggaaaggtgccacacttttaaacaagcaggtctcctgagagttcacttacctccacaagaacagcaaggggaaatctgcgcccatgagccagtcacctcctaccaggcccctcccccaacattggggattatgggcggggacacaaatccaaaccatatcaggctgttatcacaataccacagactgggaggcttaagaaaaatgtcttatatttctggagattggaagtccaagattaaggcgctggggttgtctggtgcctgtccagggctcttcccttgggttgtgaacactgccttctcatgtgtgcctacgaaactgactgggagagggagctctctggtgtctcttattttacggatgcctgtcctgtcggatcaggaccccacccttgtgactgactttaaccttaattacttcttcagaagttccatctccaaatacggccatattgggggttacagcttctgcatacgaattctgggggacacaaacataacaggagctgatgggtctcaagatgttgccttgaggagtgcattaacagaacccgggaagagcttggtcatcacgaggtacagtcggcctctcacccaccgtccaggtgaaaaccaatccgtagactggagtcctcgctggaagaggaggctgagatgctgggggaaggccccacaacgccgaaaccagcacctgccatctcgctggaagaggaggctgagatgctgggggaaggcctcacaatgcggaaaccagcacctgccatctcgctggaagaggaggctgagatgctgggtgagggccccacaacgctgaaaccagcacatgccgtattttcctccaagcattctctgagggtacatgtgggctttgctagggtgactatgccctgggaaaaagaaaaatcagttgttattattttctgagacagttttttttttttttttttgagacagaatctcactctgtcgccaggctggagtgcagtggcgtgatctcagcttactgcaacctctgcctcccaggttcaagccattctcttgcctcagtctcccaagtagctgggattataggcaccgaccaccatgcccagctaatttttgtattgttggtagagacagggtttcaccatgttggccaggttggtgtagggaccagccccacagggtcggtgggtctctccccatgtgcggagacgagagagtacagaaataaagacacaagacagagataaaagaaaaggcagctgggcctgggggaccactaccattaagttgcggagaccggtagtggccccgaatgccaggctgcactgatatttattggatacaagacaaagggtcaggataaggagagtgagccatctccaatgataggtaaggtcatgtgggtcacgtgtccactggacaggggcccttccctgcctggcagccgaggcagagagagagaggagacagagagacagcttacgccattatttctgcttattagagacttttagtactttcactaattttgctactgctatctagaaggcagagccaggtgtacaggatggaacatgaaggcggactaggagcgtgaccactgaagcacagcatcacggggagacggttaggcctccggataactgcgggcgagcctgactgatgtcaggtcctccacaagaggtggaggagtacagtcgtctctaaactcccccggggaaagggagactcccttttccggtctgctaagtagcgggtggtgtttcttgacacttttcgctaccgctagaccacggtccgctaggtaacgggtgtcttcccagacgctggcgtcaccgctagaccaaggagccctctggtggccctgtctgggcataacagaaggctcgcactcttctggtcactcctcactatgtcccctcagctcctatctctgtatggcctggtttttcctaggttatgattgtagagcgaggattattataatattggaataaagagtaattgctaccaactaatgattaatgatattcatatataatcatatctaagatctatatctggtataactattcttattttattatactggaacagctcgtgtcttcggtctcttgcctcggcacctgggtggcttgccgcccacagttggtatcgaactcctgacctcaggtgatccacctgcctcagcctcccaaagtgctggtattatgggcgtgagccaccgtgcctggtcagaaaaatcagttattttaggggatggtatgggtggtaatctttatgggttttgaatcattcctaatcccaggggtccaagatgccactggcctgctagtcaaagggagggcgtgtggaggtcaggtggtaagggggtccacagacctcatctgtggtcgtctttccagttcctgaatgtgtaattgcaacagttacccttgacaatgggcaaactcccacactcatctgcagagcaagggccagccaggtaggaagggccaggtggatgtctcctttccagggttgtatgaatgattcacctgggaagaaggtgagtggcctctggggatgtggttaaggaggacaggaatgactccttgcaactgctgctccagagcctcatcaccaggacaaatccagctcgccggttttctgtgtgactaccaggacccatctgctgtcacgggcgtagcctccacctcttgcacagctccgcagtcctgcctcgggccaagtgtggtctcctgctctctgccctcatctgctcagagattggcatcctctgcacccgctagggttctatggaattgggtgagctgaagtaacaagtgctttgggaggccgacgcgggcggatcgcttgagtccaggagttcgagaccagcctgggcagcacatgagacctcatctctacaaaaatacaacaacaacaaaaaattagccgggtgtggtggtgcacgcccgtagtcccagctacttgggtggccgaggtgggaggatggtttgagctcgggaggcagaggttgcagtgagctgagatcaaccccagaactccagcctgggcaacagagctagaccctgtctcaaaaaaacacaaaacaagtgctggcgatgcctcaggcaggggatcccaggccgggaggctcctcgggacagcagttactgcgtcaggagggcaggagctccccaggtgtgcaaagggtttgagggcacggagggctgaacaggcagaagggacagggaggcaagaaaacacctgcaggaggcagctgccccctaagctaaggctggggacccaggaggggtggtccgtgcaggagctggggaggccgctggggaaaggggcgccccctgggctcggcctcggaggagcgggccggcccccaggtccctcggccgagcccacgtcccgggcctcgttctggagaaccctccagctgctgcttgggcgtcttgggctgcgctcagcctagtcccttctctacctggagggatgcgcccgacagccggcgcgccggaggccctcaggaaacgcaggacgaggcggtggccgtcgagcctccggtgccagtcggggcggggcttggacggcggggcggggactgtaggcgcgcagggctgggcctggagggcaggcggggcggggcccgttaggcgcgcggggcggggcttcggccgctgggcggagccgtcaatgcgcaggcgcggcgtcgccccgcccactccggctcggcggctctgggcctgcggcgggcgctgcgggttggagctcgggacgtgatcgtgggtgcgtgcgcgcggccgcgcggagcgctgggctgagggtcccggtctgcggttcagccgcgggtcggggtggcggggcgcgatctcgggcgccgtcagccagtcggtgcctgtggggggagggggacggcgctgcagctcgtcacgtgaccgcgtggaacacgcgcgcgcgtccgcgggatcccctcggggggcgagctcggaggaacggggtcctgggcaaggtcccggcgaggccgccccgagcctgcgcgtcgctaagtccaggcctgctgcgtggggcttcgcgcgctcgcggggttgcggcccgggcagggggagggcccgggtgctcggagccttcccttcgctgccctcctgccccctccctgcttctgcaagcgtgtttcaatttgtacaacgtgcataaaacatgaaattacccttggccacttccaggcgcgcagccagcggctccctgcccttcccctccgggccctgagtaccggccccccaccaaggaggagcccgaggtctccgtcccggcggcgatgctgccccgtcggcctctggcgtggcccgcgtggctgttgcggggtgctccgggagccgcgggttcttggggtcggccggttggccccctggcccgcagaggctgctgctccgccccggggacccccgaggtgccgctgacccgggagcgctaccccgtgcggcgcttgccgttctccacggtgtctaagcaggacctggccgcctttgagcgcatcgtgcccggcggggtcgtcacggacccggaagcgctgcaggctcccaacgtggactggttgcggacgctgcgaggtgggtgaggcttgggaagctgcggcgtttccgcgtccctgctccgctgcgccttcccgtggaggcttcaaagcgggctgagaacaacctggatgggggtgccagcccctggctgcgctgagaggggcgtgtgcaccgccacaggctgctggaatgaatgaccacgaacgagtcgcttagaacaacccaagtt

SEQ ID NO: 2147 - DNA, 6000 bp, Homo sapiens
gttgcccacccacttgtggtgaggtcggctcggtcccacggtaacgggatgtctgcaggcttccctcctgccacgccaccacacttcctttcgtgatgtgtgtgcacctcacaagcagacgcttgagactatgtggacatcctgttgctcctcaagcttcacccattaacatctttgattatcctagaccaaatcagttactaggatggttgccaactggtgattttcctaaatccatctgtccacctacacttccttttatttcttttgaaacagggtctcactccgtcacccagtctggagtacagtgacacaatcacagctcactgcagcctcaacctcctgagctcaagcgatcctcctgcttcagcctcccaagcagctgggactacaggtgcctgccaccatgcccggctaattttgatatttttagtagaaacagggtttcaccatgttccccagtctgatcttgaactcatggcctcaagcaatccacccacctcagcctccctaagggctgtggttacaggcatgagtcgccgcgcccggcctcttagctgactctgccacgagggagggctttcccttcgctctcactgacgtgtttatgtagctgcttattcacagtgatgtgggctctcggcttctcactttattcactgggctataagtcttggccgccttatttgctgaatgcctggatgtgaccagtgggagccctctgagctagttcgccggtgttgctaaccactgctgccccaagtgagcaggcgtctttctgcctttgggtttccttgagacgactttcccaggtgatgggggctgcagagaggcagcaggtgcagtcacgggagcctgtcacctcttcgtggagctctgagaaccaggctgtggtgtccaccttgcttttctgatcagaaagccacttatgtctctttcatcaaatgagcaatttttgcagaggggcctgctgggcacctgggcctcggcccgacacttcagtgcggcacctgagggaaccctggcacctgcgctcactgcgtccctgtcccgagtgggctcaggagccccaggactcatggcaaagctttcgactcggacacacttgtgacgcgcctgtggcagggttctcaacacaaacatgagtaccccccaagaatgcaggccaggccgcgttccagacacagaatgagcacagaatttcccactcctgtgatgtttaccttctaacgggaaagatgaaaaggagggctccctcccggtggtccagtgttaacgatgggagccccacaaagacggagggggccatgggggcaaggccgccagaggtgacacaggggcccagcctgttttcacaccgcgaagctcccaccttcctgccagtgcaggcgtgctcactaaacgtctgcagcatccatcctgagcaaatggtctagatttttgaatatgatgcttaatgagttttcagaagtctagacaagctctctctccaaaagcaagccacatgaagggataattcacctaaaattcaacaactaagcctcacatcagcaaacacctactgagcagacattcaggaccaaacctgtggactcaaacatgagtgaaattcagcctcgccctcaccaaactcggggcagcaggacgcagaggaaggcgccctcccacaggcacacacagacaccgaggggcggccctgcagcaggacagggtgtccatggccacggattcccaaaaaggtgctgaccagagagcggggacccagggggacagccagttcttgcccagtcaggctcaggcaaggcagaggagaggaagagcgtggtcacccctcaatctcagttacagcttcctccccgctcctgcatgccccggggaggtcccttgcccatgagggcagcagcggcatagcccagggtgctggcctccgagcaggctgggagcacgggaacccaagcattgtgctcaaggctcacgctaggttcctgccccacttacccgcacggtgttcctgaggcagtggctccaagtcccattttgtagggcaggcactgagggtcatctgcctagggccacccagacagcagtgctgagccaggactggggcccgacttagccaagcccagggtgggcgtccatcctcacctgcctccggggacaacattcgtgagcccacaggccctgggccatggtgtgcactcagggcagcagcttgagatcgccccagaggggtccttacttcgggagcagggtgagggtgggggcccttccactcaagagagctcctacacagtgaccattggtccagcgatttccagtgactcccagcctttctgcagggaaagagctgcttccattatctgagcctagaccccagttcaacttgctaactttctgaactgttttaacatacgctgcactcccagattacacggtctggaaactttctgagtgttcttaataatttcaatcttctacaagggccaacaaaaaaaagataaaaacaattccagatcttcccaatgacagcacaccctatgttcagccccaggacctggtgccagttccacaggtttaaatatatcattttgttgtaaattaagagtcaaccaattctcttctacctcgctttactattttagcacacagacacatgccaccatacccggctaatttttaattttctgtagagatagagtttcaccatgttgctcaggctggtcttgaactcctgggctcaagcgatctcccacagaactgggttacaggcgtgtaacccagctgtagtcccagctactcaggaggctgagacaggaaaatcgcttgaccccaggaagtggaggttgcagtaaggggagatcgtgccactgcactccaccctgagtgacagggcaagactccatctcaaaaaaataaaaaaagagaaaactgggcactgttaccaaaaggaagtgccagccccagaggctgagaagtccctcattcgtgcacagacttgtatgccactgggcagaagtgcagtgggaggagaggagcaggcattgttggccaggagccctgcatcttacctaatgggctccaaaaagatacgtctgcttcccaatgccccaagacctgtgaatgggaccttatttgaaaaaatggggctgggcatggtggctcatgcctgtaatcccagcactttgggaggccgaggcaggcggatcacgatgtcaggagattgagaccatcctggctaacacgataaaaccctgtctctactaaaaatacaaaaagaatgagccgggcgtggtggcgggcgcctgtagtcccagctactcgggaggcggaggcaggagaatggcgtgaagccaggaggcggagcttgcagtaagccgagatcacgccactgcactccagcctgggcaacagagcgagactccgtctcaaaaaaacaaaaagaaaaaacggtccagctaagtgcagtggctcatgcctgtcatctcagcactttgggaggccaatgtgagtggatcacccgaagtcaggagttcgagaccagcgtggtcaacatggtgaaaccccgtctctactaaaaatacaaaaattagccgggcatggtggcgggcacctgtaatcccagttacttgggaggctgaattgcttacacccaggaggggaaggtcgcagtgagccaagattgcaccattgcactccagcctgggcaaaaagagtgagacttcatctccaaaaaaaaaaaaaacggataaacggtctttgcagatgtaattaagttgacagtactgagatacgatcatcctggattagggtgggccctcaatccaatgagaagtgtctttataagacaactggagaagagtcacagagaagaaaaacctgtatgaaaaacagaggcagagactggagtaatttggtacctggggccaccaggagctagagctacaagaggcaggaaggagcctcctctggaggctttggagggagcgcagccctgtgataccctgatttcacacttttggcctccagagcttagagaacaaacttgtggggtttggtggggaggggaattctgttttgttttagagatgtagtcttgctctgttgcccaggctggaatgcagtggtgagatcatagtccactaaaactggaactcctgggctggagtaacttttttactttttgttttttcaatcctgggccggctacttttatttatttatttttatttttagaggtgagtggggcgggggttctggctatgttgcccaggctggtcttgaactcctggcttcagcctccagggcagctgagattacaggcagagccactgcgccaggcaaacttgggttgttggcagggcggggtggctcacgcctgtaatcccagcaatttgggaagccgaggcggacggatcacgaggtcaagagatcgagaccatcctggccaacatggtgaaaccctgtctctactaaaaatacaaaaattagcggaacgtggtggcgggcgcctgtagtcgcagctactagggaggctgaggcaggcaaatcgcttgaacccgggaggcagaggtggcagtgagccgacgtcgcgccactgcactccggcctggcgacagagtgaaactccgtgactgcactccagcctggcgacagagtgagactccgtcttaaaaaaaagaaaaaacaaaacaacaacaacaacaaaacttgggttgttctaagcgactcgttcgtggtcattcattccagcagcctgtggcggtgcacacgcccctctcagcgcagccaggggctggcacccccatccaggttgttctcagcccgctttgaagcctccacgggaaggcgcagcggagcagggacgcggaaacgccgcagcttcccaagcctcacccacctcgcagcgtccgcaaccagtccacgttgggagcctgcagcgcttccgggtccgtgacgaccccgccgggcacgatgcgctcaaaggcggccaggtcctgcttagacaccgtggagaacggcaagcgccgcacggggtagcgctcccgggtcagcggcacctcgggggtccccggggcggagcagcagcctctgcgggccagggggccaaccggccgaccccaagaacccgcggctcccggagcaccccgcaacagccacgcgggccacgccagaggccgacggggcagcatcgccgccgggacggagacctcgggctcctccttggtggggggccggtactcagggcccggaggggaagggcagggagccgctggctgcgcgcctggaagtggccaagggtaatttcatgttttatgcacgttgtacaaattgaaacacgcttgcagaagcagggagggggcaggagggcagcgaagggaaggctccgagcacccgggccctccccctgcccgggccgcaaccccgcgagcgcgcgaagccccacgcagcaggcctggacttagcgacgcgcaggctcggggcggcctcgccgggaccttgcccaggaccccgttcctccgagctcgccccccgaggggatcccgcggacgcgcgcgcgtgttccacgcggtcacgtgacgagctgcagcgccgtccccctccccccacaggcaccgactggctgacggcgcccgagatcgcgccccgccaccccgacccgcggctgaaccgcagaccgggaccctcagcccagcgctccgcgcggccgcgcgcacgcacccacgatcacgtcccgagctccaacccgcagcgcccgccgcaggcccagagccgccgagccggagtgggcggggcgacgccgcgcctgcgcattgacggctccgcccagcggccgaagccccgccccgcgcgcctaacgggccccgccccgcctgccctccaggcccagccctgcgcgcctacagtccccgccccgccgtccaagccccgccccgactggcaccggaggctcgacggccaccgcctcgtcctgcgtttcctgagggcctccggcgcgccggc

SEQ ID NO: 2148 - DNA, 6000 bp, Homo sapiens
ctgcctgggcctcccaaagtgctgggattacaggcgtgagccaccgcacctggcctaatttttgtattttttgtagagacagagtttcaccatgttgcccaggctggtctcgaactcctgagctcaagcgagtcttcctccttagcctcccaaagtgctgggattataggcatgagccaccacccacacttcttttactctaggaaacttgttcagaagtccatttgctatgatctcaacatgtagtctttcaataatgagcccctaccaagcaggcatccccacctgactgcccgttctccttaaaggttgcatgtattgcacagtgcaaaggaatcacctcccctattgaagacaataactcaacgaacatacatctgtgtgtacttttatcatctccttaagagaaatgctgagaagtgggatattagggtcaggggccaactttggtcttgaaccaaagttctgggagcaaggttctgggagcctgggagagaggtaaatgatttagtccttgtccttcaatagtccagtcagcttgagatgagattcaagaaagggaaaaggagatttcaatacttaatgctactgggtgtggtggctcatgcctgtaatcccagcacttttggagactgaggctggtggatcgcttaagcccaggagttcaagaccagcctggggaacatgacaaaacccagtctctccaaaaaatacaaaaatgtgccaagcatagtgggatgcgcctgtagtcacagctacttgggaggctgaggtgggaggattgcttgaactcaggagacagatgttgcagtgagccgagatttaacactgccctccagcctgggtgacggagagacttggactcaaaacaaaaacagaaaacaaactaaatgctgtgcctcccatcagttcctccctaggaattcatcttgtagatagcacacagacacataagggcatacttactgcatcgttgtaaaagctaatatcctaaatgttcagcattaggggcttgagtaaatatatattgttatggtactaatatggatccatctccaagtaagaagaagaaaggtatagaacagtggtttttatttttatttatttatttatttttgagacagaatctcactttgtcacccaggctggagtgcagtggcacgatcttggctcactgcaacctccgcctcctggattcaggtgattctcctgcctcagactcccaagtagctgggattacaggcacatgccaccatgcctggctaatttttgtatttttagtagagacagggtttcaccatgttgcccaggctgatcttgaactcctgacttcaggtgatccacctaccttggcctcccaaagtactgggattacaggtgtgagccagcatgccagcctagaacaatgttcatatgctgtttgtatattctttaaaatacagacggatttacgcttgtaaagatatagacctgcagccactaaccctaagtggccattgaactattaatttatttattttatgtttagaatcaaagtctcactctgttgcccaggctggagtgcagtggtggaattatggctcactgcagactcaaactcctgggctcaagctatcctcctacctcagcctccagagtcacttggattttttgtttgtttgtctgtttttgagacggagtcttgctcttttcgcccaggctggagtgcaatggcatgatctaggctcactgcaacctccgcctcccaggttcaagcgattctcctgcctcagcctcccgagtagctgggatttcaggtcggtgccaccaggccaaactaatgtatgtatttttagtagagacaggttttcaccatgtcggccaggctggtctcaaactcctgaccttgtgatccacctgcctcggcctcccaaagtgctgggattacaggtgtgagccaccgtgcccagcgagtcacttggattataggcaggggccaccacaccgggctaagtttttaaaaaatgttttgtagagacaaggtttcaccatattgcccaggctggtcttgaattactagcctcaggcaattgtcctgcagcaggctctggagttgctgggattataggtgtgagccacagtgccagcactattgagccctttaaatgttgcaagtacaaattgagatgtgctgggggtgtaaaatgcatactagtttgaagacttgatatccaaaaatgtaaaatatctcattaatttatattgataacatgtcgaataatattttgaatacattacattgaataaaatattacagtaatttcatgtttcttttttactgttttaaatgtggctactagaatattttaaattatgtatgtgggccaggcgcagtggctcacgcctgtaatcctagcactttgggaggccgaggtgggtggatcacctgaggtcaggagttcgagaccagcctggccaatatggcaaaaccctgtctctactgaaaatacaaaattggccaggaatggtggcgggcacctgtaatcccaggtactcgagaggctgaggcaggaaaatcgcttgaacccaggaggcagaggttgcagtgagccgagatcatgccactgcactccagcctgggcgacagggcgagactccatctcaaacaaacaaacaaaaaaacccagaacccctctgtggtcttgcccacctcccccctcactggcccagaggtgacctgactgtgggatttctgtttttttttttttggttttagagaattttattttattttattttatttttttattttattattattatactttaagttttagggtacatgtgcacaatgtgcaggttagttacatatgtatacatgtgccatgctggtgtgctacacccattaactcgtcatttagcattaggtatatctcctaatgctatccctcccccctccccccaccccacaacagtccccagagtgtgatgttccccttcctgtgtccatgtgttctcattgttcaattcccacctatgagtagaatatgcggtgtttggttttttgttcttgcgatagtttactgagaatgattatttccaatttcatccatgtccctacaaaggacatgaactcatcattttttatggctgcatagtattccatggtgtatatgtgccacattttcttaatccagtctatcattgttggacatttgggttggttccaagtctttgctattgtgaatagtgccgcaataaacatacatgtgcatgtgtctttatagcagcatgatttataatcctttgggtatatacccagtaatgggatggctgggtcaaatggtatttctagttctagatccctgaggaatcgccacactgacttccacaagggttgaactagtttacagtcccaccagcggtgtaaaagtgttcctatttctccacatcctctccagcacctgttgtttcctgactttttaatgattgccattctaactggtgtgagatggtatctcattgtggttttgatttgcatttctctgatggccagtgatgatgagcattttttcatgtgttttttgactgtgggatttcaagggattcaatagtataatgcctgccctgccacatacaccctgtgcagatgtatattggctgggtggggggtgggggggatacctgttgtgtttattttgaaaatgcaaatctcggggcagttttttttttctggtttttgggctgggtggctttacaaggacacttcccccttccctcctggcactaagggcagtcacatcctcactggaagtagtggctggaggtccagggcataacccctgacccagggaggatgaaccggaaattcagtcttgcagagccctctgcacagcacaggagctgggcaaaatttggagaaaaggaaaggtcacgttcccaccttggccacccctctcaggtggggctggggtcttcccctacccttcagatgcattggcccacccagccccccatcaccaggccctcccttttgccacccccatccaatgcaccttgggtctgggtggctgggactgcacgagaaggggtactcctgccttgctgagctgcagcccgccccccgcaccaccacccgcccagccagaggccacttctaacctggggagacaggatgcgaaagctgctcactacccaccggcttttgggtgcagccttcaggcctcttgttccaggaggcctggaaaacgagcggggctggaaggcatttagataattggaagatgggccgggcacagtggctcgtgcgtgtaatcccagcactttgggaggcctaggtgggtggatcacgaggtcaggagttcgagaccagcctggccaatatggtgaaacccccgtctctactaaaaatacaaacattagctgggcgtggtggcgcgctcctgtagtctcagctactcgggaggctgaggcagaagaatcgctggaacccgggtggcggaggttgtagtgagcagagatggccactgcactccagccgggttgacagagggagactccatcccaaaaaaaacaaaacaaaacaaaaagaaagataattggaagctgctccgcttaaaacgaatgacaaattcagcctccctggtctggtcatcaaagaaacaccaattaaataatatggtgccattggcaccaagttagccaaatcatcaatgggcgtgatacttaattcgcctctctggttgctgacaccctcctcgacccccagccgcggaaatccattcctagttccaccgtttagagcctctcctggggctgccgcgaaaattgggccggttggggtaacatctaacctggggtcccgcgaaagagcccatcagttccgcttgggggccccactgccctcccacctcctacgctgggcgcttctcctgcgaatgacgttttgctgctgctcagcgcagccagtcgcggaggcggggaggctgcgcggtcagaggcgcctggagcgagcgaatcctggcccaccgcctgcccaaccgcgtgaccttgattgagttaatgaacttcacgcctcagcgtccaggtctgtaaaatggggtgtctaacgcagaccgtacagcccagctgggtttagcaaacttccgggagccagttggagcctctccccatccctagcggtgatcccaggtgacgacatgccgcggggggtcctgcggaggccaccctagggcgttgctgctgcctttgggagtgtggagctccaaaccatgtcgcgagaggcggattttgggaggccgggatcctcgcgccagggggatgtgcgagggtgtgggataaatcttaattcctccggcccacccaaagcctggaaatccagcctccgcgcctcttgccctgcgggccccgccctcagtcccgccctcatctaacccgctaccccattggtggcgtccggcggcgcggctgctgttatttttcgaatatataaggaggtggaagtggcagctgcaactagaggcttccctggctggtgcctgagcccggcgtccctcgccccccgccctccccgcatccctctcctccctcgcgcctggccctgtggctcttcctccctccctccttccccccccccccacccctcgcccgctgcctccctcggcccagccagctgtgccggcgtttgttggctgccctgcgcccggccctccagccagccttctgccggccccgccgcgatggaggtgccccagccggagcccgcgccaggctcggctctcagtccagcaggcgtgtgcggtggcgcccagcgtccgggccacctcccgggcctcctgctgggatctcatggcctcctggggtccccggtgcgggcggccgcttcctcgccggtcaccaccctcacccagaccatgcacgacctcgccgggctcggcaggtaggacaccccaaggaggctgcatatgggggtgagaggctaggtctggagtcctgggcctcctggagaactgggcatggtag

SEQ ID NO: 2149 - DNA, 6000 bp, Homo sapiens
gcatagtgggatgcgcctgtagtcacagctacttgggaggctgaggtgggaggattgcttgaactcaggagacagatgttgcagtgagccgagatttaacactgccctccagcctgggtgacggagagacttggactcaaaacaaaaacagaaaacaaactaaatgctgtgcctcccatcagttcctccctaggaattcatcttgtagatagcacacagacacataagggcatacttactgcatcgttgtaaaagctaatatcctaaatgttcagcattaggggcttgagtaaatatatattgttatggtactaatatggatccatctccaagtaagaagaagaaaggtatagaacagtggtttttatttttatttatttatttatttttgagacagaatctcactttgtcacccaggctggagtgcagtggcacgatcttggctcactgcaacctccgcctcctggattcaggtgattctcctgcctcagactcccaagtagctgggattacaggcacatgccaccatgcctggctaatttttgtatttttagtagagacagggtttcaccatgttgcccaggctgatcttgaactcctgacttcaggtgatccacctaccttggcctcccaaagtactgggattacaggtgtgagccagcatgccagcctagaacaatgttcatatgctgtttgtatattctttaaaatacagacggatttacgcttgtaaagatatagacctgcagccactaaccctaagtggccattgaactattaatttatttattttatgtttagaatcaaagtctcactctgttgcccaggctggagtgcagtggtggaattatggctcactgcagactcaaactcctgggctcaagctatcctcctacctcagcctccagagtcacttggattttttgtttgtttgtctgtttttgagacggagtcttgctcttttcgcccaggctggagtgcaatggcatgatctaggctcactgcaacctccgcctcccaggttcaagcgattctcctgcctcagcctcccgagtagctgggatttcaggtcggtgccaccaggccaaactaatgtatgtatttttagtagagacaggttttcaccatgtcggccaggctggtctcaaactcctgaccttgtgatccacctgcctcggcctcccaaagtgctgggattacaggtgtgagccaccgtgcccagcgagtcacttggattataggcaggggccaccacaccgggctaagtttttaaaaaatgttttgtagagacaaggtttcaccatattgcccaggctggtcttgaattactagcctcaggcaattgtcctgcagcaggctctggagttgctgggattataggtgtgagccacagtgccagcactattgagccctttaaatgttgcaagtacaaattgagatgtgctgggggtgtaaaatgcatactagtttgaagacttgatatccaaaaatgtaaaatatctcattaatttatattgataacatgtcgaataatattttgaatacattacattgaataaaatattacagtaatttcatgtttcttttttactgttttaaatgtggctactagaatattttaaattatgtatgtgggccaggcgcagtggctcacgcctgtaatcctagcactttgggaggccgaggtgggtggatcacctgaggtcaggagttcgagaccagcctggccaatatggcaaaaccctgtctctactgaaaatacaaaattggccaggaatggtggcgggcacctgtaatcccaggtactcgagaggctgaggcaggaaaatcgcttgaacccaggaggcagaggttgcagtgagccgagatcatgccactgcactccagcctgggcgacagggcgagactccatctcaaacaaacaaacaaaaaaacccagaacccctctgtggtcttgcccacctcccccctcactggcccagaggtgacctgactgtgggatttctgtttttttttttttggttttagagaattttattttattttattttatttttttattttattattattatactttaagttttagggtacatgtgcacaatgtgcaggttagttacatatgtatacatgtgccatgctggtgtgctacacccattaactcgtcatttagcattaggtatatctcctaatgctatccctcccccctccccccaccccacaacagtccccagagtgtgatgttccccttcctgtgtccatgtgttctcattgttcaattcccacctatgagtagaatatgcggtgtttggttttttgttcttgcgatagtttactgagaatgattatttccaatttcatccatgtccctacaaaggacatgaactcatcattttttatggctgcatagtattccatggtgtatatgtgccacattttcttaatccagtctatcattgttggacatttgggttggttccaagtctttgctattgtgaatagtgccgcaataaacatacatgtgcatgtgtctttatagcagcatgatttataatcctttgggtatatacccagtaatgggatggctgggtcaaatggtatttctagttctagatccctgaggaatcgccacactgacttccacaagggttgaactagtttacagtcccaccagcggtgtaaaagtgttcctatttctccacatcctctccagcacctgttgtttcctgactttttaatgattgccattctaactggtgtgagatggtatctcattgtggttttgatttgcatttctctgatggccagtgatgatgagcattttttcatgtgttttttgactgtgggatttcaagggattcaatagtataatgcctgccctgccacatacaccctgtgcagatgtatattggctgggtggggggtgggggggatacctgttgtgtttattttgaaaatgcaaatctcggggcagttttttttttctggtttttgggctgggtggctttacaaggacacttcccccttccctcctggcactaagggcagtcacatcctcactggaagtagtggctggaggtccagggcataacccctgacccagggaggatgaaccggaaattcagtcttgcagagccctctgcacagcacaggagctgggcaaaatttggagaaaaggaaaggtcacgttcccaccttggccacccctctcaggtggggctggggtcttcccctacccttcagatgcattggcccacccagccccccatcaccaggccctcccttttgccacccccatccaatgcaccttgggtctgggtggctgggactgcacgagaaggggtactcctgccttgctgagctgcagcccgccccccgcaccaccacccgcccagccagaggccacttctaacctggggagacaggatgcgaaagctgctcactacccaccggcttttgggtgcagccttcaggcctcttgttccaggaggcctggaaaacgagcggggctggaaggcatttagataattggaagatgggccgggcacagtggctcgtgcgtgtaatcccagcactttgggaggcctaggtgggtggatcacgaggtcaggagttcgagaccagcctggccaatatggtgaaacccccgtctctactaaaaatacaaacattagctgggcgtggtggcgcgctcctgtagtctcagctactcgggaggctgaggcagaagaatcgctggaacccgggtggcggaggttgtagtgagcagagatggccactgcactccagccgggttgacagagggagactccatcccaaaaaaaacaaaacaaaacaaaaagaaagataattggaagctgctccgcttaaaacgaatgacaaattcagcctccctggtctggtcatcaaagaaacaccaattaaataatatggtgccattggcaccaagttagccaaatcatcaatgggcgtgatacttaattcgcctctctggttgctgacaccctcctcgacccccagccgcggaaatccattcctagttccaccgtttagagcctctcctggggctgccgcgaaaattgggccggttggggtaacatctaacctggggtcccgcgaaagagcccatcagttccgcttgggggccccactgccctcccacctcctacgctgggcgcttctcctgcgaatgacgttttgctgctgctcagcgcagccagtcgcggaggcggggaggctgcgcggtcagaggcgcctggagcgagcgaatcctggcccaccgcctgcccaaccgcgtgaccttgattgagttaatgaacttcacgcctcagcgtccaggtctgtaaaatggggtgtctaacgcagaccgtacagcccagctgggtttagcaaacttccgggagccagttggagcctctccccatccctagcggtgatcccaggtgacgacatgccgcggggggtcctgcggaggccaccctagggcgttgctgctgcctttgggagtgtggagctccaaaccatgtcgcgagaggcggattttgggaggccgggatcctcgcgccagggggatgtgcgagggtgtgggataaatcttaattcctccggcccacccaaagcctggaaatccagcctccgcgcctcttgccctgcgggccccgccctcagtcccgccctcatctaacccgctaccccattggtggcgtccggcggcgcggctgctgttatttttcgaatatataaggaggtggaagtggcagctgcaactagaggcttccctggctggtgcctgagcccggcgtccctcgccccccgccctccccgcatccctctcctccctcgcgcctggccctgtggctcttcctccctccctccttccccccccccccacccctcgcccgctgcctccctcggcccagccagctgtgccggcgtttgttggctgccctgcgcccggccctccagccagccttctgccggccccgccgcgatggaggtgccccagccggagcccgcgccaggctcggctctcagtccagcaggcgtgtgcggtggcgcccagcgtccgggccacctcccgggcctcctgctgggatctcatggcctcctggggtccccggtgcgggcggccgcttcctcgccggtcaccaccctcacccagaccatgcacgacctcgccgggctcggcaggtaggacaccccaaggaggctgcatatgggggtgagaggctaggtctggagtcctgggcctcctggagaactgggcatggtagtcgaatccaggaggtggagtccggggaggcatcctgagcagtggagaggtacgcccttgttccctcctaggggcccaggacatgggaagtgagacctgggctgtgccccccacacctccaggtgacctgctctcagtctgcacaagcctctccaaatcttctttcccctcactccctcctccctcattgtgcctccaccacgctgcctccgtaatctctgcccggatagccaccattttgccccaggatgggaatctcaagcctggagagggaacttaagggtggcagagccgtggagcactcacacatccatgcccctgctccctccaccccagttctgcccccagaattaagacaattaattaaacactgatcctgctccctaagtctgcaaggggagagctgggttgttccagtaggagaacctggtcttggtccatccttcaggaagggtcctggaaaggtgggggtctgacagtttaggggaaggctctctggggcggctctgctagaccaccaacccttaggctggcctccagccaggcagccttgctcacaccctgggctcaccttgccctgctcctgagaggacctttcctaaaccagtcaacgaagagaagacgctttagggcctctgtagaatgaaccttccttgacctgagaagagggggccctcagggccattgctttcccggtgtagtgtttcgctcagttcttttctcagcaa

SEQ ID NO: 2150 - DNA, 6000 bp, Homo sapiens
tatctttcagaacggaactgcaacctctcagttctagccaacatcttttcgtaaaagctaagtatctcttatagaaagtacagtcactgtaaaatcttcctttaaacttagacaaggtgtgcatgtgtgtgcaaacattaaaaaagtttagacaaaagtatgcataagacaaatagttacctgatgtattgccaaacccatgcaagccaaggttttctcaggtgcatctcttagttcagttgctatatctggtatcaagttagttacttcaccaccttctgtcagttctttaaaatctaccaaaatacttccctttctttctatttcatcctataaaatataaaagtatgaaaacaataattgcttttctgtagtcaattaccattaactgagcattctattatagactttgagaaagcatacaatgtttatatgtgataatggtaagtatgacataagtataagctttgtgccaagcatggttctgatattttaaatatattaatgtattactgcctcttaacaatcctttgaggtaggtatttatacctctatctccaaatgaaagaaaactgaggcacagagaagtaattaatcaaagtccatactgcaggtaagtggcagaactgaggtctgaaccaaggaagtctgactccagtgcctacgatcataatcacaagtacctcgaatacattggtaagatggcacatgactggtagctttgctgtagaggaatcttaccttgtcatacaaatcaatatgccttgtgaaaaatttttcaaatgcttgaatcttctcaatcaaaggagagctatcgctgtaaactaatccaacaaatatggcattagcacaaataatcacacaggtacatgcacatttttcatgagacaaaagcagcactatatacatggtagatgatttttttctaattgctttgtattttgattacattcatataagaactagtatagaatgtaaacttaagattctaaaacaaatttaggtttgcataatgtgaaatgcagacagaaactctctctctctaaaagccccactatctgggaaactttgttttgcatctttgacacctaataggacatgttagttcagataatttagacaataagcttaaactaaaaattataataaagccaaagccagacacataaactaagctcttactctgacagagctgaagacaatcacaatcacagtctttcctgagatcaggagacagaccaacacttgaccctggtggcaaaactgaaaagcctttttttttttaacactctaaagttctacattttcaaatatgtctctcacagaagaacagtacaataaagtagtttggaagcacagatggtgaaggctaaggcacctcttgaactccatctttaggactgtccaaagatcacttatagtgttctgagctatctgctaggggagcaatgggagtgctggtggctaatacatcctaaaggaacaaaagatcattcatgaaacagattctattgatggaaaaaaacgaacagatttccaataaagaaaacatttgtaaagtactctattcattcacaaaatgactactgcatgcctggtatggggcagggagggtcctggacctcaaacgtctagttttcctaaaaaaaaaaagtatgcggctgggtgcggtggctcacgtctggaatcctagcactttgggaggccgaggcgggcggataacgaggtcaggagatcaagaccatcctagctaacacggtgaaaccccgtctctactaaaaacagaaaaaattagccgggcgtggtggcgggtgcctgtagtcccagctactcgggaggctgaggcaggagaatggcgtgaacctgggaggcagagcttgcagtgagccaagatcgcgccactgcacttcagcctgggcaacagagcaagactccatctcaaaaaaaaataaaaagtatgcacacacacacacacacacacacacacacacacccctcatgagacataagaaacaaatgggtattttaacagcacaaaaaagacagttccctgcacctatacagactgatgtaggttaattggtattcctaattatcaaagggagattccttacctgtgtttctacacaaagctgtatttgttattgtcccttgatttcaggcccactgttctacttcctgctctgcgatgctataattcagatctgtaccctacatgtctcagattctctttaaattctgccaattgaaggcactttagagacgggaaggtggcaggaagagaaaggaatttattcttgtttccaactcttttcagcatctctgcagctgcagaagataacgatagtgctagcctccagttccaagcaccactgagtcatgccccctcagttaccagtggcaaccagcttcatttgccttagtggtctaagcacagctctgtaaggtagccttcagaagtccaagcatagctttgtagggtgcccctcaaaagtcaaaataacagctatgctgtgacctctccaacctttgaattcccacattctggtaacctcagaacttcttttagtctcttagccataaggatggttgctgcttcctgaattactactttctggggagttacctcaatatttcctttctgctctttcagtcttccatttttgtatccaatttcttgtattaagtcccctttttgaaatacctagtatggtttctgctttcctgactgatataaagtctaaaatgcttttgaaacataaacatcatttaattgtttgggtgaactaagattaaagcaggtatatgttagtaaatgaattacagtaatacaagatgtagcatccaaagacaagttaagaaaatatgatttatggtgcttttttgtactttttaaaccctaccttcagagaaataaagcttccagcctttatatggtatgaatcgatccaatgttgactgcattgactgtggggtctttgttgaaagcaaaaactgtggggtttgttctgaaaaaaataaaatactaggttagtagaaacagagtgaacatttttccaatatgcttctctttccaaatgagactctcattaatagagtatccaaattaggggttttagtaaaaatctgggacatcaatgttcaaatacttactaaggagtagcatgaaataaaagacaaactgaagtatgagataaaccgccttgtatgatagacgtgaattgcttccttaagtgaaaaaaattgaacaatcattgacctcacctaccagaagtacgttttcctgtggttttactcagatcaggtctgtgttctctttctctccattttcctgagaagttcccaccacctcttccccttttccagctttgaaatcttcctcgtccaaatcctctgcctctatactctccattcatctctcctaaaagatagatattaaaaaggtcttcaccaaaactgtaaggaaaatagtgctcttaaaaatgtattaataaaaagggaaaaattaatgtattctaggttcaagagtagcaaacaggcttgcaaagttgtacagctatgatacaagacccaaatattctgcagttaagtttctaatctctatcgctttttaaggtataccataatagtttaataactattaaatatggtttacgtatactagacgctcacaggttaaaaataaggacaggtactgtacctgtttacaagtccccattacagaaatgaaaataggacaggtaattaactctatgaaaacttatttgcagtatttgagacttcttattatagggcaggacaggatgaacataattctggcctgtgagacactagggatacatcatcatagcttcttacatacagtcaatcctgcagtgtcacatccattttttgtgcagtttttctgtaaatccaaaactgttcttataaaatacacgtctacttaaaaatgattcatatcctaagtatacaagtaaataaagatatacctgtacgctgcagtgcaattcattatcaaatactctacccaaatccttacttaaaaggggtttagttaataaaacaagatagtaactagaaagttcacgatttaacggcatgacagggctccaataattaggcattacacattatgaaactgatgctcaaagaaattaagcaaaccgatcaagatcaaagttgtttgtcgacagtacagagataaaactttcagcctcccaagctgaggcgctccttcaacaacgctgcgtgccatacccttctcaaacgagacaatatgctgagaacagtaacaaattcaaaaaaacgttaagaagtaggactggagaaagagtaaaaagaaacagttgggtacctgtgcttcttcaaatactactttatttacatctcctaaggctaaagttcttacttgcttgggacagaggtcccaaagctctcctagttcacaactgggccggctccaggatacgcgcagatctgtccggccggattctccctccctccctcccgtagagaagcaccacggggctaagagtctccgggatcttagctcctcaggcgactcctgccaagtccgcagttctcttcagccgcagctttcctgtcgtccccgcgcggtgctgaaccccatctgtctcaacggctcgggaaactcagtttccccaccgcagcttccagaaggtgtctgtagcgcacagcgccgcaaaaatgcctcaagcgaaaatcaggtcttcccctaaattcttttttggcgcttcagtgatccaacttccgctcaaagaagcggcaagacgagaggggcggggcggagtgcagccaatcaaggagtttggccagacggaagccgagaggcttccggaagcggtcttgaggtctgggccggaaagcggaagcggcgtgcaacacgtgggggcggtgccggtcggagggctcctagtgcgccaggttgtgggaagtgaggctggcggtggcgacaaccgaggaggaggggcgggacgccgtggagcacggcgaccggctgagcgtcatggagggctcaggggagcagccgggcccacaaccacagcatcccggagaccaccgcatccgcgacggcgacttcgtggtgctgaaacgtgaagatgtgtttaaagcagtacaagtccagcggagaaagtaagtcagatcgctgattttaggggtctcccgcccccaccttgtagataccccctccctccaggtttctccacagaattcttccgccagggtgccattcttggctctctcggtccccattccccgccctcgttgtctcctcgggtctttctgtcacagaaggcttttccaccaggatcccgtcttcgaacctcataatctcccttaaccctcctgtttttcccggagccccctccatgatttcatatctggccgtccaccttcagcatccttttcagtctttccacagagttccttccccagaattccattcttggccctagggtgccaatgcctccctctccacaccctaatcacctgtcctgaagttctttccctaggaccttgggatcttcactgtctttccagagacaccccctcctttcttcactttaggatctcatccttgtctccagagtctccttcaggttccccctttttttccaccatagatcctccttcttccctaatcccccagtcaggatctatcccacaaaaaatgaaacgtctcctacctagtctggctttctatcctcttctctacccaagcaggatacacagaatagatgaaggagacaattcaccacagagtgtggaatcactttgagtttccctcgttttactcaccaaaggattcaacgctgggaaaattgctaaaaagcaatttgctcaaggcctcagaactccaaattaggtttggtttgtgcacctgctggctagtatcgctctgttttatagaagtaaagaagtgggattttgataactttctggaagggctggtgaggttgttaagtcctaagagcttat

SEQ ID NO: 2151 - DNA, 6000 bp, Homo sapiens
tttacatatataaggatataagactcacagaaatcaaataagttgcccaacggtacaaggcaagtgatgaaggtagaaattgaacttagctggatccaaaaccagacctcttaacctctacaccatatgctaaccacctcacagctgttacataacttctgggcactgaaagaactttacattatgttcttgcaatgacgcagcaacgactcataggattaaatgcctggcccaagaacagagaaccatttaatggtgggctggagccagaatccaggttatctcatggccaaaggcagtacttgcttcactccactgagctgcagttcttagattatgagttaagatttcttttgggatagcatggcctagcacttgggaattaggtggaggctgagatgtttctgactagtcagttggagagcatctatttcacgcatccaaaatgtgcacctgcagtaggctcttccctcttcttcttgggctgtagacttcctccactggtcacttcaaatgcagttccataactatggccaatgacgttatccaggtagaaccactgtttttcgaaagttacttttctagggaaaaaaagtaatcaattaactgaatatcttttctatccagtacagaaaagacatgttcactacagtttatttcaaaagtggtctccacaatggatgatcagcagcattatctctgaacataaagcaacaaaggaactagagagaacctggttgggatagagacgtaaaattaatgaataagccacaagaacactgaattttggaaaggggaagcaaagactcatcgaagtaacaaggatttaacaaatttcttgggcttggtctgatcggccattttatttgaaaattatctaataaaagcaaattatacttgcaaataaacactgacaatctacacacttggaaatggagcctaacactgacaatgctctactgaggaccaggcaacttgaggtttcctatgacatagattttttatcttattgcaatttaaaagagaaatcccacaggaacacaatgctttcttctcaaaagaaaactaacatctgctgagtgccaaccaggggctaggcagtgtgtgcgaggtgtgattcacactttttgatttaattctcacggtaatcctgggacatagctctttccagaagagcaatccgaggcccagggagaagtatcttgtccaagattcacagttgcaaggtgttgttggagctgggattcaaattcaaatctgtgtctgaccccaagcctcattctttccactataccacacggtctactccagcaaagacctaaggacggtagaaagcccacctagcttcaggacatggcccatgtgcacagaacactgaattctgggaatcatgtggtggttaattctgattgtgccccatcccactccttctcttcctttctctgtgccaccaggaagctgattacgacagaatatactgccacatcacccacgctcccgtgtcagaggcttaccaccattgctggtctctgggtgtgtcacctttattggttccctaaatcggccacacttttgagtcacatcttcattaaagcttactcaaaccatctgagggaaatcctgtatgatcgtaagtgattcagatatggccaattcttgttatttgctgggtccctagatacttacatacaacagaatgtaacagacactcaaaatatttgctaatgtaaacctcctcagatgttgcaattcagctcagcccagatgtgcaccccctatcctcatcctttaatcacctaggtgctttgaaacactggatctggccaggtgtggtgggtcacacttgtaatcccagaactgtgggaggccaggtgggtcacttgagtccaggagtttgagaccagcctggctgacggggaaaaactccgtctctacaaaaaataaaaaaattagccaggtgtagtggcacacacctgtagtcccagctacttgggaggctgaagcaggagggtcacttgaattcaggagtttctctacaaaaagtacacaaattagttactgaggaggctgaggtggaagattgcttgagcccaagaggcagtggttgcagtgagccaagttcacgccactacactctagcctgggggaccgagtgagatcccgtctcacaaaacaaacaaacagacaaaccaaacaaaaacactggatctgagatgggtgggtttacctctctgagagcctatgtgatatgcagaggggatgatgcgtgtcacttaaaactggctggtttgacaggtcactgccccagtcgggaatgtggggccccgttagagggataaggaggccacatctttactgggaaggagtaggatttgcagagtctacttctcagagagcctggactgttttttgcccaatcagatgagtgtagccccaagggtgatgagggagtctgacctgggatgcagctgagctgagagagtcatttcctaaataaaatggaaactgccactatgacttctgcgaagaagagggcctgttgaaaagtatttccaaataaatgtttagggcagtggtctccaacccttttggcaccacaaaaggggaaggtcaactactgttcatgcctgtaatcccagcactttgggaggctgaggtggccggaattacttgagcccaggaattggagactagcctagacaacatagtgaaactctgtctctgcaaaaaaaattaattagtttaaaaaagaaaaaaaagaagaatttaaaaatggttaaaggttggtgcaggtattacatttccggactaaaagaaacatacccctcataaaagaaactttttatctttactaaattagtgcttgtgcaaaaagcttggttatcaccagcttagtgctctggagacttgtttcttgactattttatgatgcttgcttcaccttaaataccagtcaacagtttgcttaaaccaggagtaaaagaattcatctgaagtaagtacttatcagaaattccaaatctcatacttcccagtctgcagaaagctgttctcctgacattgcattcaacttatctctgtcaaaagtaatacaataacctagctcaaaagaaactgtggccaggtgcggtggctcacacctgtaatcccagcactttgggaggccgaggcgggtggatcacctgaggtcaggagttcgagatcagcctggccaacatggtgaaaccccgtctctactaaaaatacaaaaaaaaaaaaaaaagattagccgagtgtgatggtgccagagtcccagccactagggaggctgaggcaggagaatcgcttgaacctcggaggcagaggctgcaatgagccgagattgcactactgccctaaagcctgggtgacaaagcaagactccgtctcaaaaacaaaaacactgtggttgtatttctcagataaattaatccaaatatcccaataaattttcaccattaataagctcttaggacttaacaacctcaccagcccttccagaaagttatcaaaatcccacttctttacttctataaaacagagcgatactagccagcaggtgcacaaaccaaacctaatttggagttctgaggccttgagcaaattgctttttagcaattttcccagcgttgaatcctttggtgagtaaaacgagggaaactcaaagtgattccacactctgtggtgaattgtctccttcatctattctgtgtatcctgcttgggtagagaagaggatagaaagccagactaggtaggagacgtttcattttttgtgggatagatcctgactgggggattagggaagaaggaggatctatggtggaaaaaaagggggaacctgaaggagactctggagacaaggatgagatcctaaagtgaagaaaggagggggtgtctctggaaagacagtgaagatcccaaggtcctagggaaagaacttcaggacaggtgattagggtgtggagagggaggcattggcaccctagggccaagaatggaattctggggaaggaactctgtggaaagactgaaaaggatgctgaaggtggacggccagatatgaaatcatggagggggctccgggaaaaacaggagggttaagggagattatgaggttcgaagacgggatcctggtggaaaagccttctgtgacagaaagacccgaggagacaacgagggcggggaatggggaccgagagagccaagaatggcaccctggcggaagaattctgtggagaaacctggagggagggggtatctacaaggtgggggcgggagacccctaaaatcagcgatctgacttactttctccgctggacttgtactgctttaaacacatcttcacgtttcagcaccacgaagtcgccgtcgcggatgcggtggtctccgggatgctgtggttgtgggcccggctgctcccctgagccctccatgacgctcagccggtcgccgtgctccacggcgtcccgcccctcctcctcggttgtcgccaccgccagcctcacttcccacaacctggcgcactaggagccctccgaccggcaccgcccccacgtgttgcacgccgcttccgctttccggcccagacctcaagaccgcttccggaagcctctcggcttccgtctggccaaactccttgattggctgcactccgccccgcccctctcgtcttgccgcttctttgagcggaagttggatcactgaagcgccaaaaaagaatttaggggaagacctgattttcgcttgaggcatttttgcggcgctgtgcgctacagacaccttctggaagctgcggtggggaaactgagtttcccgagccgttgagacagatggggttcagcaccgcgcggggacgacaggaaagctgcggctgaagagaactgcggacttggcaggagtcgcctgaggagctaagatcccggagactcttagccccgtggtgcttctctacgggagggagggagggagaatccggccggacagatctgcgcgtatcctggagccggcccagttgtgaactaggagagctttgggacctctgtcccaagcaagtaagaactttagccttaggagatgtaaataaagtagtatttgaagaagcacaggtacccaactgtttctttttactctttctccagtcctacttcttaacgtttttttgaatttgttactgttctcagcatattgtctcgtttgagaagggtatggcacgcagcgttgttgaaggagcgcctcagcttgggaggctgaaagttttatctctgtactgtcgacaaacaactttgatcttgatcggtttgcttaatttctttgagcatcagtttcataatgtgtaatgcctaattattggagccctgtcatgccgttaaatcgtgaactttctagttactatcttgttttattaactaaaccccttttaagtaaggatttgggtagagtatttgataatgaattgcactgcagcgtacaggtatatctttatttacttgtatacttaggatatgaatcatttttaagtagacgtgtattttataagaacagttttggatttacagaaaaactgcacaaaaaatggatgtgacactgcaggattgactgtatgtaagaagctatgatgatgtatccctagtgtctcacaggccagaattatgttcatcctgtcctgccctataataagaagtctcaaatactgcaaataagttttcatagagttaattacctgtcctattttcatttctgtaatggggacttgtaaacaggtacagtacctgtccttatttttaacctgtgagcgtctagtatacgtaaaccatatttaatagttattaaactattatggtataccttaaaaagcgatagagattagaaacttaactgcagaatatttgggtcttgtatcatagctgtacaactttgcaagcctgtttgctactcttgaacctagaatacattaatttttccctttttattaatacatttt

SEQ ID NO: 2152 - DNA, 6000 bp, Homo sapiens
aaaagagttatttagggcatagaaagggaatatagtagaatttcagaataaccatatgtgtgttaactactattgattaccgctgtgacagggacttagatatatgatttcatttaatctttgcaatacctctttaagacagcttactgtggtggttaaatatgtaggctctggggtcaaactgcctagtttaaattctggttcactcacttactagctggaaaatgttgaacaactacttaacacttctctgactcagattacccagctataaagtggagataatagtaacccggctcctaggggttaatatgacagtgaatgcattaaaaatgtaaaaccctgagaagagtatgtgacataaaaagctttgacattattattatttctccatttacatattaggaccttgtatttcagaagagataagagactttcccacggttacgtacgtagtaattggtagaactggctgttaaaagatatgtctattcaaatcaaaacactgtccttcccactgtggcaggcctcaagtgagttatgagctgacaagagactggagtacataccacaatctagtttctagggaaattaggactatttatattacactgtggttaaaaggagagagaaactactcatatctgccttataagttgtagaagtatctaccatggtagttaagagtctaggttctaaagtcagacttcctaggtctccatctcaattccgaattttgtaactggaggaggttaatccatcctccaaactttagtatataaatcagtaaaatagcatacaataatattatctaccagatcagctgagagtaacaataaagcttaaataataaagagatttattatctcactcattaaaaagtctaaagaaaatttaaagggtttaaaaagctcatgaaggaccaggtttctttgcatctttcttgtcagtgtcctctttacataacaatatgagacagagaaagagaatttccctgaagacattagtcagaactgagcccctcatatagctcttaaaccagttacagacaaaggggaatggaattattgacattagtttaggccaatcatagtttgttccttggaaagagagaggggccatgtttcctaagcatgacgaccacccaaattaagtcagggtttgcttacaagaaaaagagggtggagagtggtgttgaataggaagggttatgttttttagtgtctgggaagtgcttagcttagtgctctgacccacagtgagtgctcaataaaggttagctttgccagctccctgaggctgacattcccagagggcaattctgtgctctcacaaaaaacagaccttcctattgtttcaaaaaacagtacacagcaccgaacttgacggatcacaggcctggctcacacaattttggatttcttacagatccctttgcatagcaaaaatctccacacttggacacaggaaggggaacatcacacaccgggaactgttgtggggtggggggacgggggagggatagcattaggagatatacctaatgctaaatgatgagttaatgggtgcagcacaacaacatggcacgtgtatacatatgtaactaacctgaacgttgtgcacacgtaccctaaaacttaaagtataataataataatttaaaaaaaagaatgggaaaaaaacaaaaaaactccacactttagaaacatttctatcttgtatactgaacaaaaggtgtggaaaatgagggagttaaaccatgctgcttcaagcatcatgctacatgttgaaggtatttatcctgtagttctcctttaacaaactgcgtcattttgctggctgaagaaactcttgcagcccatgtttgtcttgaagacaaatcctgttcagatttctacagcgttctctcctttttacgtccacgttcacagcaacagctgggaggaatcagggatgctagatgaaatactcaactatccattgccaataatggtggttaccaaatgactcccaactcagtgccattcaacaatgaacgtttattgtcatgttcatgagtctgcaggttggctgagtctgggagatctaggatggtttctactggacttgcttccaagctgtaaatggggcttaggtctgtcctgattgtctccttagatcagaggctccctgaggcatgtttatctcatggaaatgataagaaacccaagagggaaagcccaacctcaaagcatattttgagcctttgctaatatcacatcttcaaacatgccattggccaaagcaagtcacattgtccaacatcaatgggatggataaataaacagggtgtctagtaaaaactgtaaggtcacaaagaaaaatgtgtggacgcagaaaggagcagggagcagagagctatgatgcaataaactaccacaggaggctcaatctacttcttattttgcttagagctcattgtaactctccaatctcctcttctagtgagcgcagccctgtcttgccttcctaagccactgtgacaggtaaaaactatttggccaataatctttccagtaaataacaaagagatagaaggagaaaaggaaaagaaaggaaaggaaaggaggaaaggaaaggaaaggaaaggaaaggaaaacaatttggtatgatcagttgtaaggacaattgagaagttctggagccctggaagcagagtttcattgcagtactctgaagtagagaaaatcgacttgagacggtgactgataccttctgtgaggtaattagcaagccaaggctgctggctagagggactgtggaccattcaggttttagtttagggacatgtgatcaaaatgaaaccagtcagtttttcatgaaattctttgtagcaattggcttccaagcacaaggcaagaccctcaaatgacagcaagagtcatgggtcttgttcaccaggttatccatggtgattacaatagtggctagtatacagctggctaccaataagtatattttaaatgcattgaaatatttaatagcaaatttctgtattggattttggtaatcttttgactgagttcataagcattgggccttggagtcctgagggcagagaacagggagaatgaaggattaagagaatgtagtgtttctctccatttttctctcttcgtattctttcttctttttaaaaatcaacctttttgagatataatttatttaaaacaaactgcactcaatttaggcgtacttacagaacttacaagttttgataaacacacacacgatatagaacatttccgacatgctcatcaggtgctcgtagcccttccctgtccatctctacctatccctggccacaggcaagctttctgtcaacatagaatatcttgcctattctgcaattcctacacatggaatcaggcagcatacagtctatcgtgtccggcttcttttacaaagcttaaagtcgcgattcatccctgatcttgcatgcccactcatttttattgtggaatagtattccaatatttgggcataccacagtttgtttatccattcacctgttgattgacatttgcaggctactaagaagaaagttcttcacatcactttacaagtccctgcagacttgaacgttttcatttcttttggacaaatacttaggagtggaatttctaggttgtatgataagtaaatatcttactttataagaaactattctccaaagtggttttactattttatattccctccagcaatgaacaagagttccaagctatttctctctccgcccccccacctcccgcgtgtgtctctctctctctctctttctctctctcacactcactcactctctctctccctctcctctctctccttaataaaaaaaaaaaaagagttccagttgctccacatcctttcaagcatttggtattaccagtctttaaaattttatccattctggtcctcctctttcccttcttccctccctccctccctttctttcttgaattgagaaatgtttgtggaaggagtgaagacaaacattcctggacctatgttcctaaatgagcaagtttctattaataagactctcccccacccgccacacatcctacacactcaaggagaggagcgggagagggcaccctctttcttcctcggaaaataaaacctttgctttctttaggatgggctttctgtctcgaaagcacaacgtaaccgtttgcccgggtttcaagatcagcgcgctgcaaactctcaggcgcggccaggtttcctcaaagagcctctcaactgcgctcttctctgctgataaatgataattctcttcaaaaagctggtttgtggctggcgctggagagctccagctagagccaaaagccaggggttgcctctttggttcctcccgatgggccccttttcccagccagttgggatccaaagacgctccggagctcgagcccaaattcccaagaaaaccccaaagagcgtaaggctcctggggacccctagcacctctgcaaccagggcacggggcatgctcagagcgaatgcgggaggcaggcgttggctgcaatggggctcgggagccaggaggtgccgctgcgtccccgcttcctggcgcctgacccagcgtgcaaagttgggctgggagccgcggggggaaggaaggacccagcgagcgagggtggcggggaaggggggcgggggggaggaggagggaggagggaaaagagcggttagggggggcgccgggcgtgtgtcactcgctctctccctctgtgtatagaggatgtgctgaatggtgcgctttgaggcggcggcggcggaggagcagaatccgccgcgactggcagcctcggctgaccggctcggcttctcttcgccttccgaggctcctcatccaccgcgggctccagacctcgcgtcccgcccggggcatggccgggcgctgcgcccccgcgcgctctgcctgctgagcggcgccggagggaggtgcggaggccgggaggccggggaggccggcggggagcagagtcgagcgcctccggagcagagaaaggagcccgcgccccgcgccccgcgccccgcgcacggtccccagtccctgccgcgctcgcccgggccgcccggagcccagatgagcccagatggccggggctcaacccggagtgcacgccttgcaactcaagcccgtgtgcgtgtccgacagcctcaagaagggcaccaaattcgtcaagtgggatgatgtaagtattggggcggcccgagtcggggcgctggctcgggcaccgggcagggcgggcgtcgtgggggtggggcaaggggcgcgttatgcaatgggcgcactgggagcgggcaggggcagcctcgggcgcacaggttggcatctgccaaagcggatgtccaagggcagaagctttgcgcgcgctcctgtttcatcgggcttcagtagttgccatcctttctgggtctggcaggcgccccctgagggtcttacatcttttgggccagtggagagggaggggcaagctttgcctggtgacaggtcctgagagttcggaaagtagggagtgtgaagttgggaccaactggaaagcgcctggtgtgaacaaatcgcgtccctctccgcctgcggacgcaccccctattacctcttttgcccgatttcaagaaggaaggacctgaagttcaaaacactttagtgattgcgaaccctcttggcgcttttgtgggagccaaggcggcggaggacacaacggtccagccaacaggtggtcgttgatgccaaacttcagcgcctggctccggagtgagggtccctgaaaagggctgcggggacacatctggggagggcgtgaacagaatgggggcccttgaggggtcctggagggctcatgggcctgcaggcaagtggggagggctgacttttgagaactgagctgattggagtcttctgcctgaaatagacaggttgagagtttgccccacgatttacctgcaccgttt

SEQ ID NO: 2153 - DNA, 6000 bp, Homo sapiens
aacagtgtctatatgagtttcccctcagttgaagctttcctaagaacatagcaatatgcctttactagtaaaaatcccaacctcaaaaccaacacaatgttccccagtcccttttcctcctttagttaccgtcttcttcttcatctccttccctctactatgcaagtgtaacttatagtcactgtctccctgtccttacctcctacctacttcttctcagccttccaaagtctttttctgccctcaccactactttgaaatttctttatcatggctgtgggcaacatggctcccagcaaccccaactgatgtttttcagaatcttccttgtttttatttgctgcagtaccttccaccccttcatccattcattcaccagtcatactttaaaaatgtactgatgtctcttttaagcattgtgctagtgttgtggattgatgatgattaatgatttcatgcctgcccttattgcggagacagatgctaagcaaatagaggtacaattattttcattataactgctatgaaggaaaaaaagtacaagtgagtataggaagcatggaaggtttccctggaaaattctatttatgacaagtgggatttaggccagcatgagtagaagaatgtgtcaggtggagggaacagcaggtgtgggtattccaaagagccaaggaacacaagattttgaaggagagaagcagaattagcacaggagagtgtggctcagataatgtggttggatggcaagggcctgcatatatactgcgtaggtccttgcaggattttagacgtataaagtcaaccagaaaccattaaaaccatgttttcaaccctggcaccattgacatttggtcccagtagttttttgttgtggagtctggcctgtgtattatacgatatttagcagtatccctcgctctagatactgggtgtcagttgcaaagcctcccagtagtgacaaccaaaattgtctccagacatagccaaaagtcccctggggtgcaaaattgctcccagttgagaaccactgatgaaaatgataaatgatatactatgcttttaaaagtatccggccagttcactgccctccccgccaccccaaaggccaataagtacatgaaaagatgtttaacatcattagtcattggagaaatgcaaattaaaaaacacattgaggtgccactgcatacccaccagagctatatgttactgaaattattggtttttctcatctgatgcccccactaagccaggagcacctcggttgatttgggatctgggctttaatttggttctctcgtggattatctgaaggatcttgcacgacacttgaagaacaattcttccaacatttccctacattgtgttaaaagggatttttctgcttgttctgtaggaagccagtatcttcacattgcttctctccactgttttgcaccctctactctggaccttcttcatctcttctgcttttctttattttgggaaatttcagagtagagacactcctggaggaaaagtctcatcaatgctgatacacgtggatgttttactccaatgatcttaattcctcacctggcatccaagactacgtttataatgttttcatttcatagtcagggctgtattgctcatgtttagtttgacaagcatcacatctgattttctgtgacccttagaactctttgcccgttgcatagctgttttccccccagtgtctctatttgctgtatttggccctgctgcttcctgatgcaagtcttgggcaatccctgtggaacatcgcttgttacttttcctgttgactctgtggtatcgattagtttagacgtgcatgcctctattcatgtgtgttctcttgtaataccataaaaacatgagaatcgctgtggagtgagaattgtggtcaaccttggccaggagactttctgacagtggtgctgaggaatgtgccatgggtctgtggactggcccttgacatgagccttgaggtttagggttatgctttgtagtagtttactaagacttccatagcaaaggaccatagcctgggtggattacacaacggaaatttattttctcacagtttgggaggaagtgggagataaaggtgtcagcagggttgcttcctgctgagggccgtgagggaaggatgtgtgccaggcctctcgtcttggctggtagatggcctgcttctccctgcatcttcacatcattttccttctgtacatgcctgtgtccagatgttctcttcttataaggacaccagtcatactggattagggcccactctaaggcctccttttaacttaatcatatctgtaaagaccctatctctaaataagatcacactttgaggtactggggattaggacttcaacatgtgagttgttggggaggaggccacgataaacctggtgacatacctccgcctggtaaagcgtagctcagagggtagcaacatgacagctctagttagatattgaagaactgacacttagagaagaagttagatttattttgtactatttaaatgttaaaaattaaatggtagctgcatatgtggataaaaccataaactgccttgctggaattgtgtgacaagagcactgagattgctttgtgagaaatctccctgttaaagagtgtccctgtgaaggtttggagttgccctgcctaacagaaatatagcgtgagccacacaggacacttgtaaatgttctagtagcctcattaaaacaagtaaaaaagaaacagatggaattaatacgaatactatatttaatttaatccactgtaggcattttgacatgtaatcaatgtcagaaatcattagtgagctattttctattcctgtttccattcttagtctttgaaatcttgcagcacatcttagtctcagcagtcgcatttcaagtgctcagtagtcacaagggagccacagcagctcctgtactggacagcaccagtatagggcatccattctcaacaggggccatgtcgcttccaaggaaacgaaaagtggttttggggaacaaaagaaatcttcttactgtttttgttttttttgttttttttttttttggtataaggcacagttatacatacagcatataaacagatattcagcctatctgcaatattgaagtgtcatgggggatgattagaaaaataaaaacctaaaaagcctcccttgcagggcaataatggaaaaagttgagaagcactgttatagagtgcgtacttgaaggtttaatttccagtgcttcccataccagcttaactggctttccttgaggaagtcacttagcccaagccttggtctaggtatctgtaaaatgggaataataatagtgtctacctcttaagttattgtaagtattaaaggagaaaagccacgtgaagttcaccacagtgattggctcagagcaaatgttgagaatgtatcagttactattcagtcagggatttttataaaaaggtatactggtattagaagtgagtttggattagtggtgcctttgtcatttcgtctcagtttctttagtatttattattgacttatatcagtgcattgatgagcaaatcattgtaatgttaatgttgattccagtgactcttttttttcttgctgaattgtttctcattcttcaggatttcgaggttttgttaaggtcttttgctttgccccttgattgtttttgatttggcttaaagactctttagagattcatgtaaattactaaataacatcttcttaattactatattaatcttcactatttatgatataggaatgacagtaaaacgtattatatcaaataaagagcagcaagtagaaatttactgaacattatctgctattactaacttaagacaagtatgtttattggttttcttttttacagacaaacatttatcagaaaaaatacaactttaagtaaattagagttgaattcttagaagcaatatactcacaagatatggtttgcctgcattctaaggtcacaggtgttcttggaggtaaacatcatcctattcctgacccaaagcctcacctattgtaggcctacatccgtggttttgtaagtgtggcccctggaccaacagcatcagcatcaccatgagcttcttagaagtccagattttcagactccgtcccagagctactaaatgagggactctggagaaagagcccagcaatctgtgtttttacaagatctctcagtgaacttgatgcataggcaagtttaaaaaccacaatcttatgaaatacacacatgttatagatgttgatggagaggtaaaggattaaaatatagaccatctgagagctgtcttcatcattctacagtcaaaggtcccaagagtcgcaacccatctgcagctcctttgtcaatgaaggatggtcatatatttcaagtttcaaacctgggtatatgttctgacaattaagaatatttgggatctgggttgagtggctactttggtatggggagaatatagatactagcagctatgtgggaggtgggaaaacaagcaggtggaattgaaaatagacattcatatatttctgggtcagatcctactttgcatggcaagaatgccaagttccagctgatcttggaatgttagaggtgattatgaaggaagcgggcagggagccgagataaatgatcacttaacagaggaactgtggccggaagagtggggtcaagaaaacattgaacaaagaagggttaattttgaaggaggggaaggaataagctagaaatggaagtatctgaaacaaactaggcagcatagaacagtgttcctaaatataaattttgaaaagttttttttttttttttttgagacggcgtctcgctctgtcacccaggctggagtgcagtggtgcgatctcagctcactgcaagctctgcctcccgggttcatgccattctcctgcctcagcctcctttagaagttttattctgctcacttaaatatttgattgtatgggatccttgcagggaatcgccaccaagattttgattagaattttgtcagatgctctgataagaaaagaaactgacctgaaaaagataagttacacctacagtttattctaaagtcctctagaagtgggaatgtgtgctgtgtgcagcctgtcaaaacttttattttggcaacttctagaagtaacaaaacaggactgaaaatattgctatgatttattggaaacattggtgtgagctgttatgcatgcaatctcatgaaagaagcctaaactattttaaaaattagtctttcattataatatcgtttatttccaaatgtctttttttgacatttagaagtaattgggaaattttaaaattctagctgaagttccttgcaacagcacggtccttgtaaaagatatttttcaaactgcatgttaaggatgtatatatggaatatcagcataaaacagaatggcagttcctcaaaaaatgaaacatagtactatcatatgatccagtaattccacttctgggtatatactgaaaccaaggactcagatagatatttgtgcccctatgttcataacagcattattcacaatagccaaaaggtggaaacaacctagatattcatcagtggatgaatggataaacaagacatggcatatacataaatggaacattattcagctttaaacaggaaggagatatgacacatgctccatgaatgaagttttaggactttatgccaaataaaataagccaaacacaaaaggacaaatattatacaattttacttatataactacttagaatactccaattatttaattacctggagtagtcaaattcatggatacagagagtaagactggtggttgccaggttataggggcaagagggaatgaggagttagtgtttaatgcatgtggcatttcaatttgggaagatttaaagttctaaagatggatggtgctgatggcagcacagcaaggtgaatgcatgtaatacc

SEQ ID NO: 2154 - DNA, 6000 bp, Homo sapiens
ctatttctccacatcctctccagcacctgttgttccctgactttttaatgattgccattctaactggtgtgagatggtatctcattgtggttttgatttgcatttctctgatggccagtgatgatgagcattttttcatgtgttttttggctgcataaatgtcttcttttgagaagtgtctgttcatgtccttcgcccactttttgatggggttgtttgtttttttcttgtaaatttgtttgagttcattgtagattctggatattagccctgtgtcagatgagtaggttgcgaaaattttctcccattttgtaggttgcctgttcacactgatggtagtttcttttgctgtgcagaagctctttagtttaattagatcccatttgtcaattttgtcttttgttgccattgcttttggtgttttggacatgaagtccttgcccatgcctatatcccgaatggtaatgcctaggttttcttctagggttttatggttttaggtctaacgtttaagtctttaatccatcttgaattgatttttgtataaggtgtaagaaagggatccagtttcagctttctacatatggctagccagttttcccagcaccatttattaaatagggaatcctttccccattgcttgtttttctcaggtttgtcaaagatcagatagttgtagatatgcggcgttatttctgagggctctgttctgttccattgatctatatctctgttttggtaccagtaccatgctgttttggttactgtagccttgtagtatagtttgaagtcaggtagtgtgatgcctccagcttcgttcttttggcttaggattgccttggcgatgcgggctctttttttggttccatatgaactttaaagtagttttttccaattctgtgaagaaagtcattggtagctttatggggatggcattgaatctgtaaattaccttgggcagtatggccattttcatgatattgattcttcctacccatgagcatggaatgttcttccatttgtttgtatcctcttttatttccttgagcagtggtttgtagttctccttgaagaggtccttcacatcccttgtaagttggattcctaggtattttattctctttgaagcaattgtgaatgggagttcactcatgatttggctctctgtttgtctgttgttggtgtataagaatgcttgtgatttttgcacgttgattttgtatcctgagactttgctgaagttgcttatcagcttaaggagattttgggctgagacaatggggttttctagatatacagtcatgtcgtctgcgaacagggacaatttgacttcctcttttcctaattgaataccctttatttccttctcctgcctaattgccctggccagaacttccaacactatgttgaataggagtggtgagagagggcatccctgtcttgtgccagttttcaaagggaatgcttccagtttttgcccatttagtatgatattggctgtgggtttgtcatagatagctcttattattttgaaatacgtcccatcaatacctaatttattgagagtttttagcatgaagggttgttgaattttgtcaaaggccttttctgcatctattgagataatcatgtggtttttgtctttggctctgtttatatgctggattacatttattgatttgcgtatattgaaccagccttgcatcccagggatgaagcccacttgatcatggtggataagctttttgatgtgctgctggattcattttgccagtattttattgaggatttttgcatcaatgttcatcaaggatattggtctaaaattctcttttttggttgtgtctctgcccggctttggtattagaatgatgctagcctcataaaatgagttagggaggattccctctttttctattgattggaatagtttcagaaggaatggtaccagttcctccttgtacctctggtagaattcggctgtgaatccatctggtcctggactctttttggttggtaaactattgattattgccacaatttcagctcctgttattggtctattcagagattcaacttcttcctggtttagtcttgggagagtgtatgtgtcgaggaatttatccatttcttctagattttctagtttatttgcatagaggtgtttgtagtattctctgatggtagtttgtatttctgtgggatcggtggtgatatcccctttatcattttttattgtgtctatttgattcttctctttttctttattagtcttgctagcggtctatcaattttgttgatcctttcaaaaaaccagctcctggattcattaattttttgaagggttttttgtgtctctatttccttcagttctgctctgattttagttatttcttgccttctgctagcttttgaatgtgtttgctcttgcttttctagttcttttaattgtgatgttagggtgtcaattttggatctttcctgctttctcttgtgggcatttagtgctataaatttccctctacacactgctttgaatgcatcccagagattctggtatgttgtgtctttgttctcgttggtttcaaagaacatctttatttctgccttcatttcgtcatgtatccagtagtcattcaggagcaggttgttcagtttccatgtagttgagcggttttgagtgagattcttaattctgagttctagtttgattgcactgtggtctgagagatagtttgttataatctctgttcttttacatttgctgaggagagctttacttccaagtatgtggtcaattttggaataggtgtggtgtggtgctgaaaaaaatgtatattctgttgatttggcgtggagacttctgtagatgtctattaggtccgcttggtgcagagctgagttcaattcctgggtatccttgttgactttctgtctcgttgatctgtctaatgttgacagtggggtgttaaagtctcccattattaatgtgtgggagtctaagtctctttgtaggtcactcaggacttgctttatgaatctgggtgctcctgtattgggtgcatatatatttaggatagttagctcttcttgtttaattgatccctttaccattatgtaatggccttctttgtctcttttgatctttgttggtttaaagtctgttttatcagaggctaggattgcaacccctgcctttttttgttttccatggcttggtagatcttcctccatccttttattttgagcctatgtgtgtctctgcacgtgagatgggtttcctgaatacagcacactgatgggtcttgactctttatccaatttgccagtctgtgtcttttaattggagcatttagtccatttacatttaaagttaatattgttatgtgtgaatttgatcctgtcattatgatgttagctcgttattttgctcgttagttgatgcagtttcttcctagtctcgatggtctttacattttggcatgattttgcagcagctggtaccggttgttcctttccatgtttagcgcttccttcaggagctcttttagggcaggcctggtggtgacaaaatctctcagcatttgcttgtctgtaaagtattttatttctccttcacttatgaagcttagtttggctggatatgaaattctgggttgaaaattcttttctttaagaatgttgaatattggcccccactctcttctggcttgtagggtttctgctgagagatccgctgatagtctgataggcttccctttgagggtaacccgacctttctctctggctgcccttaacattttttccttcatttcaactttggtgaatctgacaattgtgtgtcttggagttgctcttctcgaggagtatctttgtggcgttctctgtatttcctgaatctgaacgttggcctgccttgctagattggggaagttctcctggataatatcctgcagagtgttttccaacttggttccattctccccatcactttcaggtacaccaatcagacggagatttggtcttttcacatagtcccatatttcttggaggctttgctcatttctttttattcttttttctctaaacttcccttctcgcttcatttcattcatttcatcttccatcactgataccctttcttccagttgatcgcatcggctcctgaggcttctgcattcttcatgtagttctcgagccttggttttcagctccatcagctcctttaagcacttctctgtattggttattctagttatacattcttctaaatttttttcaaagttttcaacttctttgcctttggtttgaatgtcctcccgtagctcagagtaatttgatcgtctgaagccttcttctctcagctcgtcaaagtcattctccatccagctttgttccgttgctggtgaggaactgcgttcctttggaggaggagaggcgctctgcgttttagagtttcccgtttttctgttctgttttttccccatctttgtggttttatctacttttggtctttgatgatggtgatgtacagatgggtttttggtgtggatgtcctttctgtttgttagttttccttctaacagacaggaccctcagctacaggtcagttggaataccctgccgtgtgaggtgtcagtgtgcccctgctggggggtgcctcccagttaggctgctcgggggtcaggggtcagggacccacttgaggaggcagtctgcccgttctcagatctccagctgcgtgctgggagaaccactgctctcttcaaagctctcagacagggacatttaagtctgcagaggttactgctgtctttttgtttgtctgtgccctgcccccagaggtggagcctacagaggcaggcaggcctccttgagctgtggtgggctccacccagttcgcgcttcccggctgctttgtttacctaagcaagcctgggcaatggcgggcgcccctcccccagcctcgctgccgccttgcagtttgatctcagactgctgtgctagcaaccagcgagactccgtgggcgtaggaccctccgagccaggtaagggatgtaatctcctggtgcgccgttttttaagcccgttggaaaagcgcagtattcgggtgggagtgacccgattttccaggtgccgtctgtcacccctttctttgactcagaaagggaactccctgaccccttgcgcttcccaagtgaggcaatgcctcgccctgcttcagctcgcgcacggtgcgcgcacccactgacctgcgcccactgtctggcactccctagtgagatgaacccggtacctcagatggaaatgcagaaatcacccgtcttctgcgtcgctcacgctgggagctgtagaccggagctgttcctattcggccatcttggctcctccccctgtctatacaaaatataaggagcaaaagaagactgttaagaggctaaaaataacctaaacatgccaaagaagtagagagaaaattgagggtgtttttaacatttattttaagttcaggggtatatgcgcaggtttgttacataggtaaacttgtgtcatgggggtttgttaatacagatgatttcatctccgaggtattaagcctagtacccattagttatttttcttgatcctctttctcctcccaccctgcaccctctgataggtcccagtgtgtgttgtttccctctatgtgtctatgtgttctcattatttagctcccacttataagtgagaacgtgtgagttggtttttaatttatttccctgacttgtgatacccattgtgaaaatgtatattatgggtttaaaaataataatggtaataacagaaatgttaaaagctaacatttcttgagcactttctatgtgctaatttgtactgatcactgactgagcccttgtgtagatgaggaagtggaagagttgagtgactgcccccactagcatggctgtgatgtgcaaagccaggactcacccaggttattcattcctaaactagaacacc

SEQ ID NO: 2155 - DNA, 6000 bp, Homo sapiens
ctagcctagccaacaggctactacctgtctctactgaaaatacaaaaattagccgggtgtggtggtgcaggcctgtaatcccagctacttgggaggctgaagcgggagaattgcttgaactcaggaagcggaggttgcagtgagcagagatcacaccactgcactccagcctggttgacagagcgaaacaccgtctcaaaaacaaaacaaaacacaagaagaatctatctcaccacaaagcactatgtattataatttctgattttttttttttttttttttttttaggcagcgtcttgctctgttgcctaggcttgaatgcagtgtggtgatcacaggctcactgcagcctcgacctcccaggatccattgatcctcccacctgagcctccagagtagctgggacttcaggtgcatgccaccacgcttggctgattttaaaatttttttgtggagtttgaatcttgccatgctgtctctccttggcctcccaaagtgctgggattacaggcatgagccaccacatctggcctataacttcttatttttgtagtcttctcctccatgagtttgtgagattctcaaagcagcttgatctcccaacatcattatttagttcaataaagttgtcatacatttgtaaaactcaggccttgaagtacaattattttgtttgttttgtttttggacaggagagtcataatttctatctgtgataatgagattgcttcacatattaaaacagttgctttaagatacatattacatctccggagccatttctcttacaggatggagattcttttttctttttaccctctggccttttgctgtcaaggcttaatctgacccagataaccttggccagctttttcctcagtgagaagagtggatgctagcaggttacctggcccaatgtcagttttttgggagctgtcttgggagggtagatgagttgtactttagagggccttgctcctctaaaatagagttatctcctgtaacttcctgtgtctccagaattaggtccaaactttctaggctggctttttttttttccccacctggagacagaatctcactctgtcgcccaggctggagtgccgtggtgtgatctcagctcactgcaacctctgcctccctggttcaagcgattctcctgccttagcctcctgagtagctgggattacagacgcatgccaccatgccctgctaatttttgtatttttagtagagatggggtttcaccatattggccaggctggtctcgaactcctgacctcaagtgatccgcccaccttggcctcccaaagtgctgggattacagagccatcatgccactgcacccggcctagaggcttttcctgatttggttttctacactgatctcatcccccatactaatgtcctcactccagaccaaaatggcctgcaggtaatgctgataccaattaattgacataatttaataactgactttagacgaaaggactcagaaatcacatttattgagcacatactatgtgctaggcgcagtctgataactttatacacttcccatttaattctaacagaatttgaacccagacatactggcttcgccgtttattatttagcctaatgaaaagttaatgtctttgtggataaaacagaggtggctgggtgtggtggctcacgcttgtaatcccagcactttaggaggccaaggtgggcggatcacgaggtcaggagtttgagaccagcctggccaatatggtgaaaccctgtctctactaaaaatacaaaaattagccgggcatggtggtgtgtgcctggaatcccatctactcaggaggctgaggcaggagaatggcttgaacccaggaggcggaggttgcagtgagccgagatcacacaattccactccagcctgggcgacagagtgtctctgtttcttcgttttttaaaaagaatataaataaataaaatacaggtaacagatgttgcatcaaagcacttataaatatctttagttgattatctatgcttgacatcagctcaccataatgttcatattactgctgtcgctataatcatttgttacatggttttttattctttattgttgcctctttttttttctttttcttttcttttttttttttttttgagttggagtcttgctcttttgcccaggctggagtgcaatggtgccatctcggctcattgcaacgtccacctcctgggttcaagcaattctcctgcctgagcctctcgagtagttgggattataggtgtccgccaccatgcccagctaatttttgtatttttagtagagacggggtttcaccatgttggccaggctgttctccaactcctgacctcgtgatttgccgacctcagccttccgaagtgctggaattacaggcacgagccaccgcgcctggcttttcttgcctttttttgctcaaactctgttttttttttttctttgagacagagtcttgctctatcacccaggcgggagtgcagtggcacgatctcagctcactgcaacctccacctcctgggttcaaccaattctcctgctccatcctcccaagtagctgggattacaggcgcgcgccaccacgcccaactaatttttgcatttttagtagagacggggtttcaccacgttggtcaggctagtctcagactcttgacctcgtgatccgcccacctcggcctcccaaagtgctgggattacaggcatgagccaccacaactggccttgctcaaactcttttgccaaggtaactcctcatctttcatggtaagtgtcatttctgggaagcttttccacactacctaggagaggtcatgtctcttgtggtgtgctcttggagcagtactcgagaccgaagtattgaaatgcctctagacctgctgataaacagctcctgccccagcttccccacccattcttccctgaacgtcttactgggtttcagcaactaactgggtgagatttggcctagagggacctctaggcccctgctccacacagtggaagtaccatcagcccaccacataatgtccctgcctagcattgagcctgatttgtaatttaacaaggatttgtgtcattagttgtgtcccctttgcctcccctgccagtctggaaactttaagaggtcagaagctgtgtctagttttcgtttttatctcttagagatggagtttcactctgtttcccaggcctggagtgcagtggcgtgatctttgctcactgcagcctcgaactcctgggctcaagcgatcctcctgccccagccttcccagtagctggaactaaaggcacgtaccaccatgatcagattgtgtctttttttcaccagggcctgattggtcagggaaaatatttgttgaatacttgaataaatgatacccagacaaaaaaagtcagcttgaaatctggatctacctctgacactgagtgagtcaattggcctctttgtccctcagtttctttctgctgtaaagtggtgcagttcctctttttttcttttttagacgaagtctgactgcaacctctgcctcccaggttcaagtgattctcctgcctcagcctcccaagtagctgggattacaggcgcccaccaccatgcccggctaagttttgcatttttagtagagatggggtttcgccatgttggacaggctggtttccaactcctgacctcaggtaattcatccgccttggcctcccaaagtgttgggattacaggtgtgagccaccacgcccagcccagttcctccttcagccaaggctctcttgagaatgtaagggccaggtgtggtggctcacgcctgtaatcccagcactttgggaggccgatgcgggtggatctctcgagcccaggagaccagcccagcctgggcaacatggcaagaccccatctcttaaaaaaaaaaaaaaaaaaaagagggagtgggcaagagagaatgtatgtacagccattgggaaacaacccggaacaggactcaggaggtccttgctcctgtggactttacaggagacagacagtaaaggcacaagatgccttcttatggtactaagaagaaaatatgccgcatgatattgcagatgggggggcgggggcgtcacagaacgtgactttttttttttttttttgagacagagtcttgctctgtcgcccagactggagtgcagtggtgcagtctcgcctcactgccacctccgtctcctgggttcaagtgattctcctgcctcagcttcccaagtagctggaattacaggcgcccaccaccacgccaggctaatttttgtatttttagtagagatggggtttcactatgttggccaggctggtctcaaactcctgacctcaggtgatcctcccacctgggcctcccaaagtgctgggattaaaggcgtgagccactgcacccggcccagaaagttgacttctaagcgtttccccaaagtgtctattaggtatctttatgattcaataacccattcttacagaaattaattgtaagcctgggagcggtggctcacgcctgttatcccagcgctttgggaggctaaggcgggaggatcgcttgaggccaagagttcgagaccaccctgggcaacacagcgagacctccatacatctctaagcaaaaaaaaaaaaaaattcattgtaaaagcaattttctttttggttactgccatagggattttgtaactgagtcacaccgggccgaggcgggacctcattggctgcgaccgaccacgtgccgcagtcgccccggcggtcggggccccgcccctcggctaccgttctgtggatcaggggccgagctccgcccccggcgcgcggctgagaccctctctataaaaggagccggcggaggatggcgagcctttacgtcggcgcgtaacgagggggtgcgtgtgaggtcatcgcgcgggcgggcgggcggggtctggcggtttgaacgagacgaagacggaaccggagccggttgcgggcagtggacgcggttctgccgagagccggtgagccggctagcgggcccggggggtgcggctgggggggcggccgcgtgggccaaggccgggcgtgcgcgggcaggccctacgggcagcgccagggccgttccacacggcggtgctgttcgagccgggtgggggaagggcggggccgtcacccggcgcgcgcgggctgggcctgggggcgcgcgctgcgctctgctcagggggcggggtctcgggccggaagtgggctgctgctacgcggggtgggggtttctgggccgccgctgaggtgtggtccctgcgctgcagcgactggaggtcccagggtggttgggccctgggagggtgtgggcgaggtgggccgtcctgggagctctggggacgcacattgtgggaggccgtgttgcctgagggccgagagatcgggtggtggagtcagacctgggttgggttccgtgcggtgtgaccttggacaggtgctttaaccgctgtggatctcagcttcctcatctgtaaaacggggacagtaatactacccacattaaactcttagcgcgatgtatggcagaaagtaagccagctcttggactccctcctttcttcagtgtgtgtttattgaatgcccactaggtgttgggcaccgtgctaaaccctggctgttttcccgggaacaaagatttgctctccaggaatccacattatgatgagcaggaggacagtataacgggatggtatcaacagtgctagttcagtccctacttcacagttgccctcggatgctgcagggcagagcttgacctctgccccattttggggatgaggatcctggggcccattgagggaggttatgctaggccgggcatccgcttctccgatggcatgtctctaacagtagtaatgataatagcagctctttgttagttgggcacttgttttgtgtcaagcactgttaagtgctccatgtggctttgtgtcttttaatactaaca

SEQ ID NO: 2156 - DNA, 6000 bp, Homo sapiens
gcccgccttggccttccaaagtgttgggattacaggtgtgagccaccgcgcttggccaatttttcttttttttaattgtgtaaaatagtactgggtaaaataccactgtggatatagttgctgaatagattgtcttctatttgggtttttaaaaaaagttcgtccgtttcaaaaaaaaaaaaaaaaacaaaagaatgccctcagtgtacttttgttggatgagtaaataaatcagtcacctcagaaatcaaggccttaaccttctgaagatcctttcttaattaagaatgtcaccctggtcactgaagtgcccctgctctcgtttatgttgactttccaaaaataacggtaaccgaacatgctggaaccagcagagaactggttcggcctgacctcaagtaagttgaatatgcattttatggcagtcttgaattctgcagattacttattacttaaccactggtttagcttcccaagcttgttcctttggcaaattagccctggaagggcagtaaagtacacagtgaagcctgctgtgaattaggagagttcagtttgtcggcattagagaaataatcttcctggaaagtttaagcagtaataaaacactttttggaaaaaaaaaatgggcaagtgggggaaggaatgaaatgggatgaaatattgcaataatttattacagtagtctcttttttttttttttttttgagacgaggtctctctctgtcccccaggctggagtgcagtgatgtgatcatggctcactgcagtccttgacctcttgggctcaagtgatcctccttcttcagcctcctgagtaactggaaccacaagggcatgccaacacgccaagctaattttggtattttttgtagagacagggtttcaccatgttgcccaggctgttctcgaactgctggactcaagtgatccacctgcttccctaagtgttgagattacaggcgtgagctacggtgcctggccttatcatagtagtctttatttatttatttttgagccagagtttcgcttttttttttttttttttttttttgagacagtgcagtggcctgagagaatcgcttgaactcaggaagtagaggttgcggtgagccgagatcacgccactgcactccagcttggcaacagagcgagactctgtctcaaaaaaaataaataaataaaaaattaatagaggaacacaaaaatgtcttctattcaactttgttaattaaatgacgggttggctgggtgctctacaaaaagaataaaaaactagttgggcgttggtggcacgtgcctatagtcccgctactccagaggctgaggtgggaggatcacttgagcctgggaggcagaagttgcagtgagctgagattgtgccactgcactccagcctgggcgacagtgagaccctgtttcgaaaagaaaagaaaagaaatgataggttaaatgtatttagagatgtaaaaagcccagggagacagacgtcttagggaaaaaaatgttttttaatctagatcaaggatggatcttggaaattgcctcctgaagaggagggtatatctttgtgaaaaatcagaaaatgtcacttttgttattttcttttctgtattttaggcattcatttttgtttctagtggtcattttattgtcatgatgattaccaataaagaacaggagttttaaaattttgtagaaacactccttttctccttgttataggcttctgggttgcaagtatgttgtagaatatatggggtgaaaaccacagtcttgttacaggttttagaaattgacttcacatgaagttagtgaagcttttggtttttgtaggtctacttcacaattttaaaaattgtatttggtttaagtgggtctgggaagaagttcaccctgcttctttaattgtatttttctgttgccgttgttctttcaggggctgcgtattgtcagtttatggacatgctgttccctggctccattgccttgaagaaagtgaaattccaagctaagctagaacacgagtacatccagaacttcaaaatactacaagcaggttttaagagaatgggtgttgacaaagtaagtaaacgttatcttttattgtggttaatgttccttaatgatcgttactaaggaggtagatgctagcttatgactttggacattttcttttttttcttaatttatctagttaacttttctcagttaacacagaatttactgggagcagtttgcccctaccttcttgcccctattccccttgcttgtttctttcttcatcgtctgtgaagttagtaactgtttagaggagtcagcctgtaaatttgtacagtgatttttatttttaaaaaattcctgtgtaatctctagtagtctggaatctaactctcttaatctggatttacttctgtaaaagcatactgtatgtagaatagttccagtagagaagattctaggccaggcgtggtggctcacacccgtaatcccagcactttggaggctgaggtggagaagattctagaaatacttgctttttatagaaggttacaaggaggctccgtggtgggtgctggaaaactcctttctgcccccaaaggtttttgaaggtaacagaaacatggtccaccaggcatggtttagcacaaacatttaatgtttagcacaaatattacctctgttttagtagataatagattaagtagtttatcccttcccccacccttgtgaagggtttatccttttaagccatttttggggggataactttttttttttatggcaaaggtagtaacacccccaattatcttgctggtgtctggtttttatttattttgaaatcagggtttttttttaattttagttttgtctctacaatatataaaataggcatttatagtataagaatatcacttaactttccaggcatagtttaaatagagttcatatacagtaattttgcattcattattatggaattttattttttgaatatggaaaatgtctaaagtatataaaagtaataatagtgtataaacaataaatagtaaatagtgtaatgatccctcatgtaactcaatggttagcatggccaattttgttttatatctaattctatcctatcctatgtattctgggttattgaagtgagtacagaggtaatatttgtgaatgtttcagtatcaagcaaagtaacttttaaaaattatatttgtcagaggggtggatatattattggatatattctttttataatacattgcaactggaatctttggagattaaaagatagttaaaagccaggcatggtggctcatgcctgtagtcctagctactctggaggttgaggcaggagcatcatttgaactcaggagtttgaggcagcagtgagctatgattgcagcataagactccagcctgggcaacagagcaagaccccatctctaaaaaagattaaaaagttaagttgtggccaacacttcagtgatttgaatacttgaaaacacagtattcttgtataatagaaatacttacagggtccttatgtatatttgttattttttgtgtgtgtgtttttattggtgttttttttttttttttgagatgaggtcttgctgtgttgccagtgctggtctaaattcctggactcaagcagtcctcaagatagctaggattgcaggtgggcagccctgcccccagcaagcatgttttaataggatttggaattacttggaaaacatgtcattttgtaaaaatttatcctgagactgattctgcatcttgatctattttcaggttagaattattcttttttcttttcttttcttttctttctttttttttgagacagagtctcactctgttgcccaggctggagtgcagtggtgcaatctcagctcactgcaacctccacctcccgggttcaagtgattctcgtgcctcagcctcctgagtagctgggattacagacgcccgccaccacacccggctaatttttgtatttttagtagagacagggtttcaccatattggccaggctggtctcgaactcctgacctcaagtgatctacctgccttgacctcccaaagtgttgggattacaggtgtgagccaccacgcccggcccagaattttcttgaacacagttcattgtagatgcctttggttggtttgtgcaatggatttttcttcccttttcttaaatggggtctctctctgtcacccaggctggagtgcagtggcacagtctcgactcactgcaacctctgtctcctgggctcaagcagtccaatctcagcctcccaaggagctgggaccataggcgcatgccaccacacctgcctaatttttttgtatttttggtagagcctaggtgtcaccatgttgcccaggctggtctcaaactcttgcccgccttggcctcccaaagtgctgggtttacaggcatgagccactgtgcctggcctgtgcagtggatttcatgctttgtgataggcattgtggccatgcaagttatatagcggacctactctttatagcataatgcacttttgtatcacgtcttacgatgtgcttggatggatgtgtgtatgtgacttatatggtacttgttccttttttgtttctgattccttttcatacatttgagagagtggggaggggttgggaagtgtaggtactcttgaaggcaaactgcatgaaacttgctttataaatttaggggcttagccctaaggtctctaaaatatttttttctccttttggcagagctttataatgaattgatgcatggactagtttgatgcttgccaaaagcctcttttttggggctaaacagttgtttttctctgcagataattcctgtggacaaattagtaaaaggaaagtttcaggacaattttgaattcgttcagtggttcaagaagtttttcgatgcaaactatgatggaaaagactatgaccctgtggctgccagacaaggtcaagaaactgcagtggctccttcccttgttgctccagctctgaataaaccgaagaaacctctcacttctagcagtgcaggtaaaaaaacaaccccaaaacgtttccaaaaaatagcgttccagatattcattcagcgttcaactagaatttttttcagtagccataggcttagggatcttaagaaatataatcccaggcatgtggccagagtatggattttggcatcaggcagataacggtgtgtgtccttaggtgtctgtagccctgtgtaagcaacttcaactctgccccacagtttcctcctctataaaatgggaattttaatacttgccccagagggtttttgaaacttgaacaagttactgtatgcagttttgccaaagctctagaaatccatcaggctagctcatgtaagagagcattagtttgttccaaaacaagggcatttttacagagccctaggatgggaagttataccagagctgaactccttgaaggaagtgtgtaggtctctcagggactgctcttggctgtctgtgttattctctctgtagaccagcttcctgtgtatactcacagcttccctacctgccctagaactttagctgctaggtgactttggcttgccatggtgctagcagagtcaggggcgggggtaggggagaggctgattttacataccttctcaaaagggtatgggcttggtagctttcccaagatgtgtttacattagtatagaatgtgtatattttggggcagggtagatactctacagatgctaatttcttcttttccagaggatggcaagaatattagttaaggtttcataatacctagagagaggcttgttcatctgatagagagggtaggttgagtgctttctaaatagcttaatggagagacaattcgcatgccatataattatatttttatatttaaagtataaagttaaacggtttttaatatatccaaagaattgtgtaactatcaccacaatcaattttagaacatttt

SEQ ID NO: 2157 - DNA, 6000 bp, Homo sapiens
agtgcagtggtatgatcacaactctctgcagcctagacttcctgggctcaagcaatcctcccacctcagccttccaaacagctgggaccacaggcgcatccctccaagaccagctaacttttctatttctcgtagagatggggtctccctatgttgcccagactggtctcaaactcctaggctcaagcaattctcccatctcagccttcactgtagtcgtgctgggactagtcagccaccatgcccagctaagccactgattacataggtcccttggctaaatcaccttctctctggtttttgactaatctatacgcatggtagcagctggtgctcatcaagttccttgcatccattagttcattccattcaacggactggctgtataaaaatggccccattttccagataaggcaactaaagcccagggaggcccaggaagtggtagagtcaggatttgtacccaagacggtctgaggaagaacccaagctctaagcactctggcttagttcagacactccaggattgggactgtcctggaggtctcacaggctgctcaaaagtacccggaccaaaaccagactgatcttcccctccaccatccacagggtttcctgagctagagttcctgacctgtcaccctcctcacatgcagctaccaagaactgctcatcaccacggcgatcaccaccttcccagtgggctgctgagcagactccacactggtctccctgcctctgctgcagccagtcctcctacaaaccttaccatgccgccgcccctgcttaaggccttcctccagctccccattgcctttgtactctcatctgccactgcttctctagaggaacccgagtcacgttttcccagaaatctagactgcccttgcatccctcccaccctccccacttcacgcctgctccctctacctctgtgggcagaaaccttacgcatcagctaggaggtgtcacctcttctccctctgaactgcctcaaacccaaccttttgccacattctgtctctccctacacatttctgcagatgtatctatctcaccctcagaggtgtctgaatcacttgagaatctatagtgtctgccatggagcctggcatcaacaaatgtttgctgaatgaaccccccccatgctgatgaaccactccctcttgtgcacattcactgacttttgaaggcacccaggggaaagaagagctgttgtgctctaagcactgtgtactcaactgcttcccctgcaaccctccggccaccttttggcaggtgctatgatggcctccacctgagagaggccacacagtgagaggtggacccaggacttgcaccctagttggctggtacagagcccacactcatacccgccacgtgccccacctccccagaacccagccagaatgtatccccctccatactcgcccctggggcccaaaccctagcatgcttctgccatctgcaccccttgccttctccctgggatccccacccttgtccacccctgaaggcaggtcagtgccacgccctaaaacaaaggcttgagtggatgccatttctgccacttctccctagataaacactggcagaggggccccgaaacgcaggggtgaagacattcactgctgaaaaaatctggatgactcgaacacccatccatgaagggggtcacgaaagctgtgctttgtttagccccttgaacaccacgcagctgtcaaggaccgaggcaggttgacaagaatcccctcacacatacagacaagcaaaacactgtcacagggcgatatatttatatgatcccttttggattaaaaagctcatgaaacttttctctggttcagtttatattattatagaatacatttcggggcagcctctggaaggactgtgggagaccagtgccatatctgaatggtgtgaatgatacaggaaaaactacaatttttaaaactttaaaaaacaaaaactgtcacaaccaccacaaacaaaaatagccttagggaaaaaaaggaaaaaaatgaatagggctgggatcctgccgtcaactttctagtttcttaagagttaagtttttggccaggcgcagtggctcacgcctgtaatcctggcactttgggaggccgaggcgggcagatcacttgaggtcaggagttcaagaccagcctgaccaatatggtgaaacctcatctctaccaaaaatacaaaaattagccgggtatggtggtgcacgtctgtagtcccagctactcgggaggctgaggcagaagaatcgcttgaacccaggaggtagaggttgcggtgagccgagatggcgccactgtactccaacctaggtgacagagcgagacttcatctcaaaaaaaaaaaaaaaaaaaagagttaagagttaagttttcagctgggcatggtgactcacacctgtaatcccagcactttgagaggctgagacagtcagattgtctgaactcaggagttcaagaccagcctgggcaacatggcaagaccctctctctactaaaaatacaaaaattggctgggcatggtggtacacgcctgtaatcccagctactcgggaggctgaggcacagaatagcttgaacttgggaggcagaggttgcagtgagccgcaatcacgccactgcactccagcctgggtaacagaatgagaccctgtctccaaaaaaaaaataaataaataaataaaaaagttaagttttctacattaaacatgtattatagttataatacttgagtttgtggaagtggacaggcagggccaagaggaatggctgaattgcagagccttgtatacagaatgcctgctggtatagaagctaagcctgtagcttatttcaaggactgtgccagacaaatgccagtgcagagaggccaaaagccaaacctgtggactttctggacttcagttccagaatggtgccagcctcctggcccttaagtacactgggggccagggctccttgtctctgggcctagtgcctcctgggcattcactaactcaacaactgttgaatgaatggaatgcccaggccaatgagcctgcccctgacaggtggagtggagggcatttttctttgcccctgtccctccctttgatcctagaacccataatcctgttcagatctttgaggacaagaccctcaggttgttagatttccgcagacctgagccttctataatgcttgtcacacagctgaatggaagatgcttgcccaggtcccaagtggtacccacaggaacaggcccctggagtacaggagacaggccacctggcccacccctggtacaaccccctcccacccactcattaagagggagggcccctaaaagcccttcttgccctttcttcaacctgtatcagcatccccagaaagcaaggcatcccagaggtcaacctcagaggaaacgcagactgctctccccactcaagagcagaatgacatgggaagattctaacatctctaggcctcagcttcccaatctgtaaaaagggactgctgctgatggggttaaatgagttaattaagtaaagcgcttggcacagagcctggcacacaagacatcctcaaaacaatggtggctgctattgttattattattagcattgtggtgattccggaaggcagcactgggcatggggccaagggggttgggggagcctcctcaggatgcctcagggaccagctgccacccacacccccatcagcagttaggcagcttctacctccttgtcctgagtcctgcctcacccctcccacttgctccaagttccctgctgagaccccatcctgcctggccagaccccgcctgcacaccagagccccaccttcacccataggctgcgccagtcaaactggtctccacaccctgccctgtgccccacagttcccagctccaggcttctacgcctccaatcccttctcccactggaattcagccgcctcttctgggccctccagtctgaattcgtcttgagctcagcgatcagggagggctttattaaaggatctccctgagacattttctctcctggcactgggggcctcctctccagctcccagaggcccagcccacctagtccttctacagagactcaggggtcggcctgcctgattaatgaggttccatggcaaccagggcctgggagggtggagggtggcagatggaaggacaggcagagggaggggatcagcagctggtccagctgccccgcccctgcagagaaggcctcccagccaggagggctgtccccagaggcctggccggccaggcctgcacctggcagtcagcatcgaggcaggaaggagggtctcctcaatggctcaccaacggttaggccccaggactttcctccgccccgccttcacttcccctagcagctgtgctcactaccgagatgcaaattctgagctgaagccagcaggcctcagttcaaatcccagccccaccacctgcagccgtgtgaccaggggcaagtcactttccctctctgggcctcagttcctcctccgtcagatgggcacagtgacaacacagctcacagcggggttgtgagttttagctggcttgaagtcgcccaaaggcctggcatgcagtaaacgccagttgaatacacgtgggctattattatcactgagtccgacgctggggaggctccggtgaggaagctgaggcgcagagcacagagcagcaaacagggaccggcccgaggtcaccccgcaccccagggcggggcccggaggcccaaccccggctctgcaccgcccagcctgggcgcctcagtcaacccctcccccgccccctgccgcctccaggccaaacacggcgccctcccgggtctgcgcggggggcacaggcggcgctgtcggcgcggcgtccctggggtccgtaccggcgggcggccgagcgcgggccgcggcgcactgggtgtgggccggggcgcctgcggtgtggcgaagagcagcaggtcagggtcgcaggggccggcggcgggcgccgcggggccggtgggagccggcggggcgctggcgtcctgcgcggcggagatgatgacgatctgcgaggagtcgagcagccgcagcgcgccggccccgagcagggcctccagcgccggcgcgcatgggccgcccgcaggggccccggccaaggccatgacgctcacggcccgcgcggcccgggtgacaggcggcggcggcggcgcgggcccatggcggcaggcctcggcgagggctcgatcccgctccgcccccggccgccgctgcctgcaaagtcccggccacttttacgcgccaaatcctttttgccgcgaaagagccacgagccgccgagcgccgccacaattggctgccccggccgtgacgggaacaacggcggcggttcctattggctttaacgcgccggacccggcggcgaggggcgggatggggcggcggcgcggggcggtacggccaatggcggggcggggcgcgcgcaggctttgtccggatggtaccaggcgcggtgtgactccccgcccccagcccgggcgtcccctgctggaggcgtggggacaccggaacataggccccgccccgccccgacgctcccgcatcccactgacctttctatagtgcaggttcagaacagagcctctcttctgcacgtgaccctcaacctgtagcccccaacagcctcagcttagatttccagagactgtcccctcttcttttcaggatcatcagttccacagcccagccatcagccacctcttccatcctcaacttgcctcacccatgacattatcctaatcctgcacccagccctatcccgctcacccagagcccaagctgaagagcggtgcctggaaatggcgagggggacgtcgggctttcctgcaagtcccattttagccaaaatctccaacagccaacgtatagcatctgcttgaactcattcattccctcactcattcaacaaacgtttggagagcttgctctg

SEQ ID NO: 2158 - DNA, 6000 bp, Homo sapiens
gagaagctgtgctggtaccagtcagttccttggcggtaataagactaacagcagctcacattttttgggtgctcactctgtgccaggcactgtacatgaggggtggctgttcatccctggaatggcagggcaagaactgagtgaggcatgccagggaaggactctggtggcctggagggtaaggccctcgctagctgggggacaacaactgtttagcaccgtgatggcctggccagtatagccagatactgctgtttgaaaagaaagccagaggccaagcgtggtggctcacgcctgtaatcccagcactttgggaggccgaggcgggtggatcatctgaggtcaggagttccagaccagcctggccaacatggtgaaaccccgtctctactaaaaatacaaaaattagcctggtatggtggcacacacctgtaatcccagctacttgggaggctgaagcaggagaattgccagaacctgggagacggaggttgcagtgagctgagatcacgccacggcacttcagcctgggtgacagggagactcccatttcaaaagaaaaaaaaaaagaggccaggcacggtggcttacgcttataatcccagcactttgggaacccgaggcgggcggatcacctgaggtcaggagttcgagaacagcctgaccaacatggagaaaccccgtctttactaaagatacaaaattagccgggcttggtggcaggcgcctgtaatcccagctactggggaggctgaggcaggagaatcacttgaacccgggaggcggaggttgtggtgagccgagatcacaccactgcactccagcctgggcaacaatagtgaaactccgtctcaaaaaaaaaaaagaaaagagaaagaaaagccagacatgttaatttttatatggtattttccaatttcctcaaatcttaaaacaaattcataattcaagaaaaatcttctatgggcaaattgagttatatctgggggccagtttgcaaactctgcttgttttgttttcttaaactttgacacgcatcgtgtaaagaagctgttatctgttgttctgcagatgaggcaagcaaagctcttcaagagggtgaatcacttccccaagatcacagaggcgggaagccacagggttgggggccacccgactccaaaggcttgtttctatgttagactgccttttggatgggcaagaggtctgttcagatatagccagaactggcacagtgacagaatatctccagggacagtaaactgtcagtcagggtagcattgagggattgttgcagatgcaaaactccccacctccctctgccacaactcaacaatggacatctctgtgcccttcataaaattaagtcatcacagaatcttttctcccaattatgcattccttatcatgactggatattcatgtttggtgaatttttgtttttttgtaagctaagaatgtatgcttaggggaggtgctgtttgtggaataaataggtttaaattatttgtgtcacttgtcaaacttcttaacaagcatactgtgcagtgacagagaaataattcctaactttcccactggactgtgagttccaggggtctgttttacttataactgtgtccccagcacctagcacaatgtctgacacataataggtgctcagtaaatatctgtggattgaatgaagtgaattgacttgtccaaggtcatgttgaccaagatttctgattacacccacctgatttagaagcccatgctatcacctctacaccactctgcttcttggaaagaaccaagggaaagaggtctccaggcacaggattgtgggcccaacagattgcatcccctcgaactcctctagtttggttggtgaaggtggtgatggaaataagcacctatgaaccaagccactatccaccataataccctttagaaactacactttataatcttgacagccctgagcctggcttttggggtatttacagagggtggcaagggcaggtcctgggttttgcagtgggacaagtgaagttctcatctcagttctgctgtgtgaccttgagctatgaatgcccctctctgagcctcttccttcctgcaccatgtggataaacaagcttacttacgggattatggggttgaaaggagatcatcaatggaagtggctgcccagtgactgtggattttttggaaactgttttttgaaaactgttgacattgagaacagccttatcaggagctgccaggcttagggccaaggggcctcatctatcaggcttttctgctttcaagtaggtattaataggtacagaaggcccttatctcttcctcagtttcatgctaggaatgctggtcttcactcctttctgcttcagcaggacctgaaggattgtgggacggagggcgcctacttctacctggatgtgtacttgaatactctggggcgggcaggactttggaaaacccccaacctcagcctcaccaagcctgaaaaataaccttttcatctacttggtaaactcaggcccttttggcctcaaatttcctcatcataaaatggagcaataataatagacatctctctttgccagccaccacagttaaaccagcacagtgcttggtatataataggtgcttaataagtgtttgttgaatgacttgggtttgagagggcttcacacaaatgaatgttagtgttactgggaccctgtgggaaggtgcagggaaaggacactctttccatctggaatgggaatgtgctggtttctcttgctctctgccagcacctgcgttggttgtttagaatgggacctacccctcagcttctttatggagaggggatggggaagggggacaggcagacctcagggctgggaatgcagtgtaggcccaatttggtcactggttggcttcacagttactttctcctgaaagggcctcagttttcctatccatacagcaagaggcttatgtggtctctgtggtcccttctagctatgatacattctaggatttgcaatgagtaatttcagaaactactcattggaggggaaaacaactcctgatttcctaaaccacctcatagtttgtaaaacactttccaattccttatgcttttcattctcctggcaaccctggaaggggccagggcaaggtctgtgtgcccatttgaaactaagggtgagaagcatcctcaggagctgtgatttgaggctgcaccactcattttgattatgctggtacaccagtttgctttcaaatgtgagtatgcataaaaataacctggaagcttggtgaggtggcagtcacctggagtaccagctatgctggaggctgaggcgggaggatctcttgagcccaggggtttgagactaccctgggcaacatagtgagacctcgtctatataaaataaataggaaaaaaaaaataagatactggcttttctaattccctaagtgtcaaaaaaaaaaaaagaaaaagaataacaaatatcacctggaaaggggacatggcattgttaaaatgcagattcttgggcacctagagattttaaattggcagggccagggtgggcccaaaattagcaagtgaccacgtggttctgaagccagtggcctaaggaccacccttgcagaaccgtggtctccttgtcacagtctaggcagcctctggcttagcctctgtttctttcataacctttctcagcgcctgctctgggccagaccagtgttgggaggagtcgctactgagctcctagattggcaggggaggcagatggagaaaaggagtgtgtgtggtcagcattggagcagaggcagcagtgggcaatagaggaagtgagtaaatccttgggagggctccctagaagtgatgtgttttctttttttgttttagagacaggatctcgctctgtcgcccaggctggtgtgcagtggcatgatcatagctcactgcagcctcgacttctcgggctcaagcaatcctcccacctcagcctcccaagtagctgggactacgggcacacgccaccatgcctggctaatttttgtattttttgtagagatgggtcttcaccatgttgatcaggctggtctcgaactcctgggctcatgcgatccaccccgccagctgattacagggattccggtggtgagccaccgcgcccagacgccacttcatcgtattgtaaacgtctgttacctttctgttcccctgtctactggactgtgagctccttagggccacgaattgaggatggggcacagagcaagctctccaaacgtttgttgaatgagtgagggaatgaatgagttcaagcagatgctatacgttggctgttggagattttggctaaaatgggacttgcaggaaagcccgacgtccccctcgccatttccaggcaccgctcttcagcttgggctctgggtgagcgggatagggctgggtgcaggattaggataatgtcatgggtgaggcaagttgaggatggaagaggtggctgatggctgggctgtggaactgatgatcctgaaaagaagaggggacagtctctggaaatctaagctgaggctgttgggggctacaggttgagggtcacgtgcagaagagaggctctgttctgaacctgcactatagaaaggtcagtgggatgcgggagcgtcggggcggggcggggcctatgttccggtgtccccacgcctccagcaggggacgcccgggctgggggcggggagtcacaccgcgcctggtaccatccggacaaagcctgcgcgcgccccgccccgccattggccgtaccgccccgcgccgccgccccatcccgcccctcgccgccgggtccggcgcgttaaagccaataggaaccgccgccgttgttcccgtcacggccggggcagccaattgtggcggcgctcggcggctcgtggctctttcgcggcaaaaaggatttggcgcgtaaaagtggccgggactttgcaggcagcggcggccgggggcggagcgggatcgagccctcgccgaggcctgccgccatgggcccgcgccgccgccgccgcctgtcacccgggccgcgcgggccgtgagcgtcatggccttggccggggcccctgcgggcggcccatgcgcgccggcgctggaggccctgctcggggccggcgcgctgcggctgctcgactcctcgcagatcgtcatcatctccgccgcgcaggacgccagcgccccgccggctcccaccggccccgcggcgcccgccgccggcccctgcgaccctgacctgctgctcttcgccacaccgcaggcgccccggcccacacccagtgcgccgcggcccgcgctcggccgcccgccggtacggaccccagggacgccgcgccgacagcgccgcctgtgccccccgcgcagacccgggagggcgccgtgtttggcctggaggcggcagggggcgggggaggggttgactgaggcgcccaggctgggcggtgcagagccggggttgggcctccgggccccgccctggggtgcggggtgacctcgggccggtccctgtttgctgctctgtgctctgcgcctcagcttcctcaccggagcctccccagcgtcggactcagtgataataatagcccacgtgtattcaactggcgtttactgcatgccaggcctttgggcgacttcaagccagctaaaactcacaaccccgctgtgagctgtgttgtcactgtgcccatctgacggaggaggaactgaggcccagagagggaaagtgacttgcccctggtcacacggctgcaggtggtggggctgggatttgaactgaggcctgctggcttcagctcagaatttgcatctcggtagtgagcacagctgctaggggaagtgaaggcggggcggaggaaagtcctggggcctaaccgttggtgagccattgaggagaccctccttcctgcctcgatgctgactgccaggtgcaggcctggccggccaggcctctggggacagcc

SEQ ID NO: 2159 - DNA, 6000 bp, Homo sapiens
gctggagtacagtggtgcaatcatagctcaccgcagcctcaaattcctgggctgaagggatcctccagcctcacccttcagaggagctgaagatgtgtgccaccgaggctttttttttttttctttggtagagacaaggttttgccatgttgcctaagcttgtctcgaactcctggtttcagacagccaccccctggtccaagcctcccaaagcaatggcattataggtgtgagccaccaagcccagcctcactcattactttttatctacaaaaatggcaatttcacatcattcaacctaatatctctaataagcagtcctgccacacatagttccatgaattctcattaagttttcttttaggatatggctgtcagtaacttgcaaacatgatttggcaaggtggtattagtaatacttaagcaaataaagaaaattatattacaattatataattattttactttagcagataattaaaaaattttaaagctatttagaaatttagtccacccccctcatcttgcagataaggaaactgaggcttgtagagataaagcaacttcattttgtttatatttttatatgccccacttatctcaaaaaatgatttgcatggccaggcacagtggctcacacctgtaatcccagcactttgggaggctgaggcaggcggatcacttgaggtcaggagttcgagaccagcctggccaacactgtccagcctgggcgacaagagcaaggctccatctcaaaaaaaaaaaaaaaaaaaaaaaaagatttgcattatagcaaatataccatactaaaaggggagactgggtgcaaggtatacaggaactctctgtactatgcaatttttctgtaaccctaaaattgttgtaaaaaatagttttaaaaaatgatttaaagttttttaaaaccaaaacaatcctcataaaactaaaatttattaaaacaagaataaaagagaagagacagagaaaaattatctcaggaatctttctgaaattcagatttcattctgagcttcctcaagacacagttcagcatccttttacaaacacactgccagatcagatctgctaggaataaactagcagagcccccaaagggaaagtaaatttcaatgtgcctgagaaagggaaaagagcagtagctggcaaactgtaacaaattggattacatctaaataagataatgagtgtcagtgtacttctaagctgtaaaccactgagccaatgttatcattactgcaggaaaaagggaaagattcatttcttttgtacattaatttatcccataaacactcatgaatttcaactcagtatcaggagtctgccacagtggtacagaaatgaacaagacctaccttcctacttttgctaaggatcagacagggaagacagcacccttactaaagaccaacagccacctgtgaacctggagtggaaagtgacagaagagtgagataaattatgtatttgatcctctctcatccaaaatactacaaaaggagtatttaaataaagtttaaaagagaagcaacactaccacctaaacttggaatagaggcataaatgctacaaggactaagatgcagaatggtattaaatagaatttgtcacttaaagcaaaaacagaaaaatacttgaggacacaaacattttatttactgagaaagaaactacagtatagacatttgtgtacagacataatttgtttcttactcctgaaaaaaacaaattagcatgcagctccttatttaaatctcatgtggggcctctctgttgctctcttccaacctctggcctctcccactcagtctcctttgctgccttttctcatctccccagtatctaaagtttggaaacctcaaggcttcagacctcttctccatctccattaatttccaaggtaatctcatccagtgttttgttttgtttttgagacaggatctggctctgttacccaggctgtagtgcactggcatgatctcagctcactgcaacctctgcctccccggttcaggcaattctcatgtctcagcctcctgagtagctgggattacaagcatgtgccaccacgaccagctaatttttttgtatttttagtagagacagagtttcaccaaggtgggaggatctcttgaggccaggagttcaagaccagcctcggcaacacagggagattcccatctctattaaaaaaaaaaaaattgctggctgtgtggcattcacctgtagtcccagctacttgggaagttaaggtgggagggctgcttgagccaaggagttcgaggctgcagtgagctgtgatcacgccactgcactccagcctgggacaagatgctcaaataaataaataaataaaatactatcacctctccacataacactagtacttttatttaccttaccatgctttttctgtccctatctaattattatgtaatatacttaccaaaatgcaaattccacaagtgcaaaagcattgttttatcgaatgctgtattcccagctcctacctaaaacacagcctggtttataacaagtgcccattattactgactattataggacattaggtaacatgatccatattatcaccaatggtcttgcaaaatgctaacagctctattacctatataaaaagcaaaaaaacaggctgggtgtggtggctcacaactgtaatcccagcactttgggaggctgagttgggcagatcatttgaggccaggagttcgagaccagcttggccaacatggcaaaaccccatctctcctagaaatacaaaaattagccaggcacggtggcgggcgcctgtaatcccagctactcaggaggctgaggcgggagaatcgcctgaacctgggagacaggatgttccagtgaacccagatcgcaccactgcactccagcctgggtgactgagaccaggtctcaaaaaaaaaaaaaaaagtggggggaggcatataacttatagcttggtcagtggcagagcaatgactgaaccccaatctgattccaaattctacactctctccattacattagctgttaaagcatgaacattacattagttaaagcatggactacgaactcacagctctgtgaggggcacttcttaaatagtgagcgataatgacacctatgtctgcagctttctgatcgaaaaggagcaaagaaagatagaagaactaaaggaacagagggcgtaccagtagccttggttttgttgtgacctctataaatctgggaccagttctcctttctaagccttcgcggtaaaatactgatcacaagcctagcctccaataactcccagggccaaagtaaagatcaattcaacagacgttgattaaacccaaaggcaatctagtcaagtcatcaaatgccctggggacagtttcccagctccatccacttattagttgtgggactcctggcaaattactttttctatgaatacctcagtttcttcatgggtaaaacgtgaagctatagaaagaactcaccccataggattgttgggaagattaaataggcctttggctgagcgcggtggctcacgcctgtaatcccagcactttgggaggccgaagcgggcggatcacctgagatcgggagttcgagatcagcctgaccaacatggagaaaccccgtctctactaaaaacataaaattagccgggtgtggtggcgcatgcctgcaatcccagctacttgggaggctgaggcaggagaatcgcttgaacccgggaggcggaggttgaggtgagccgagatcgcgccattgcactccagcctgggcaacaagcgcgaaactccgtctctaaataaataaataaatgggcccttatgtgtaatgcattcagtagcacctgacaatttgtgatcattccgtacagtaagccatgactattatcatcacgtgctaggccctgggatctagagatgaaaaaggcaaggcataacatctaacgaacgagcttacggtgtcaacgaggggccgggaaagtaactcggtgcacagcgagtgcaaaaaccgagaagcgaatgcagctgcgcctggagaaggcggctgagaagcgatacttcagcagggtcctgaagaatgggagctccagagtcgggtggcgggtgggactgggctttcggatagattacgtgcaaatccgccaggacacagggagcgaggggcgggggggcggcagagcgcggcgcctcaccctcccagcctgggattgcggctactggacacgagggtcgggaagctctccttcggcgccgactggagcttagcgtgctggcggcagcaagaagctgaggcaagcgggccccgggccctaacgacgcgtcccagcccctctctgggcctcgggttcctcccgggtaacaagaggccgctgcccgaacgggattccctcaggcgccctagacgggcgggtctccgggcctcggacggttaacccgagcacctcccacctgcccctgaggccccacctcaccacgctcggctcccgcagacgcccggctagttgctccgcgattgagctgcggcagccgctgctaaggccctgcgggggacgggggcggagcccaccccgaggcagagggccaggccccgccccccaaactcccgccctttgggaggggcccgcccctccaagtcctgcacctataggcagactgagccggcgcagggcctcccgccatgttgggtattggcagccgacttactagagaggccctgaaggaaagggggtattattttaagaattataagatccctagccagaaatggggacggtcagggtctctggattcgcgaaagggacatttcggaagcagaaaagaaaaattgccctcaatcatttcgcttttggcttcagtgttacatacagcgcatgtgcaaggtcacctggttctaggtgcgcctgcgcacagctccacctacaaaccagactacaattacaactgccgagaaacaaaggggctcgctgccactggttagcgataatactggcagcgcgaccggtttctgagggttgttcaccttgctgctcagacgctccgagaagcttcaggcagcataacacttacaggcgagttacttactcaacactcggttttgtctgcatgtctctgcacagagtgttacctttacctgacttaatccgtcccggagctgcagttctgcttaagcctgacttctagagaactttttcttcccaataggacccatgcgttattcctgtagcattttgtgtataaatttttttttttttttttgaaatggagtcttgctctgtcgccaggctggagtgcattggcacgatctcggctcactgcaacctctgcctcccaggttcaagtaattctcctgcctcagcctcccgagtagctgggactacaggcgcccgccaccacgcccggctaatttttgtatttttagtagagacaggatttcaccatgttggccaggatggtctcgatctctcttgacctcgtgatcctcccgcctcggcctcccaaagggctgggattacaggcgtgagccaccgcgcccggccttgtgtataaattgttaatgcactttcttagagttgtaaactccatttacctgcctcactcttgcactcagtggttctcaatttttagtaggaattaaaaacaaaactggtaaatgcagactcttggtttccacccccagagaatccctaaaccgggggtggagtccaggaatctgcattttagaaagtacccagggtgattctgataattgggaacacgttttaggaagcgctgcatgagattgtgagcttgagcgtagagactgtaatttggtcatctgactatagcgctcagcacaaggcctggtacaaaataggtgctcaataagtgctgagtgaatgggtgaatgagtggatagctcgagtgaaacagcaaggcttcaggttaatccacagccaaaggtaacctgagaaaggaacgctta

SEQ ID NO: 2160 - DNA, 6000 bp, Homo sapiens
gagactatcgttttggtgctccagactgttaccttgcagtgagaaagaaagaggaaagtggttgactttttttccctctatttttccctctctgtcatcctcagctcactttagtcactcaacatgtctccatgttaacatggagaggaagatgggggtgggaaaagtcttctttgaaccagtgtaatagctggcttagtgctttctgggcctcgcagatgtttatagccatctctatccatcatcaaagcatcatggggtgcttttatacactcttcaggggttccctactggcccctctcctgcagttcccttagcaaaggcatctattaatggccatttgtctagcttcttgttcctggggtccctttatacctccaggaagccctactgaacaggacctaatagtcagcaggcttgtctcttcttgctagagttcacaggcaggaagcatatcctggtcacgatactccctaagtgcaatggtatggattctgcatctcagattctcatggaagccccctctcctagtcacttggtttgagcggttaaaagtaatgtcctcttaatcttccccaaggaggaatggggactcatagccagaaatatctccacacaaattatctatcctccacctgcagacccctttatattgggataagggatttaggaactttcaaacagattttagactaacagaaaaaaaatatatatatatataaatatatatatatatatatatatatatatatatatatatacacaaatatatatgtagtgatttagcacctcattttgaaatttcacatacatatatatatatattttttaattcagttagtccagacggcctcttggcatgggctaggaggaatatgtataaataatgagcaaggctgggtgtaggaaagatccatattatagccctcagagagggtttgagtacaaggcatatttctagagatggaatttaggatataaaggaagaaaccgttcccctcacctggcagggaccagggttgattttctttcaactcatccattgcctttccctccaatccagcctcctttgagaactccccagtctggttcatcagacaggtctgaacatgatcagacttgaattgtctggtttaagtctttataggactcttgggccccaagccaggtgataggtaggaacacctgtttgtacgtctcaaatgctccatgcagtttgcagaatgcgttttttttctggttttttttcctttttttttttttttcgagacagggtcttactcctgtcacccaggctagagtgcagtagggccatcacggctcattgcagcctcgacctcctgggctcaagcaatcctctcacctcatttttttatttttttgtagagacaaggtctaactatgttgcccaggctggtctccaactcctgggcccaagtgatccacctgtcttggccttctaaagtgctggggttacaggcgtgagccactgcacccagccatctgcaggttgtgtaagactgatgtggtgtactcttatgcctacagaaccactagggcaggggtttctaatcccccaggccatggactactatcagtctgtgacctgttaggaccctggcagcacagtaggagttgagcagataagcgagcattaccacctgagctccacctcctgtcagttcagcagcagcattagattctcataggaggcaaatcttattgagacctgtgcatgcaagggatctaggttacacactcatgagaatctaatgcctgatgatctgaggtggaagtctcatctcaaaaccattcccacccacccctgcccatccctgtttcacacaccagctaattccactttgggctttggctcagataatatccagttgtactacattattatgttttaatacaatttccaacttgtccttactacattgtattattattcaatactagaacataatcaatgctcaataaatgtccactgggtaaatgaataaataagggaatgaatccccctttacaaacatcaaagattactatttggtttggtatatcttggtagtctgaaacctgtttactcctcatagtctttttctttgagatgaactttcgctcttgttgcccaggctagagcacaatggtgcaatctcggctcaccgcaacctccgcctcccgggttcaagtgattctcctgcctcagcctcccgagtagctgggattacaggcatgcgccaccacgcctagctaattttatatttttagtagagatggggtttctccctgttggtcaggatggtattgaactcccaacctcaggtgatctgcccacctcagcctcccaaagtgctgggattacaggcgtgagccaccgcacccggccgactcctcatagtcttaaaaaatattgtctagtttgctaatggatgttatgtcattaaactttgtaacactagggctgacttgattcattcattcaatggacacttacttgatacctaccatgtgtgtaagactgtgctaaatcccaggaataagtctcctatccacacaaagcttaaattttggagggaatgttaataggaaaacaaaataataaatggaaagtgctatgaaagaaacagaagacggccgggtgcggtggcgcatgcctgtaatgccagcattttgggaggctgaggcgggcggatcacgaggtcaggagatcaagaccatcctggctaacacggtgaaaccccgtctctactaaaaatacaaaaaaattagccgggcgtggtggcgggcacctgtggttccagctattggggaggctgaggcagaagaatggcgtgaacccggatggtggagcttgcagtgagccgagattgcgccgctgcactccagcctgggcgacaaagcaagaccccgtctcaaaaagaaaagaaacagaagactatcctagaaagtatagggtattactttagatagcatggtcagggaagacctagttgaggaagtatcatttaagctgggacctgaaggacaggaaggtaccagctaggccaagagctgggggaaaagtggtctaggtagctggcatagtgtatgcaaacgccctgaggcagaaaagagcttgatgtgcataatatttagattgtttcatttgtatttcaaatattgttgcagtgaacattcaagcacaatgcctgttgtgggattatttccctaggatggaatcccacaccactgcttctttgcatcgttttctctgtctagtgcctggagatgttccttttcccctctctagatagtttgcctttcagaatccgtgtccttccttccccttttactctccactttctctatttctcaaattagctattaagatcttttttgtgttcttacaggagaaagataaaatatagcttttaagcgttcctttctcaggttacctttggctgtggattaacctgaagccttgctgtttcactcgagctatccactcattcacccattcactcagcacttattgagcacctattttgtaccaggccttgtgctgagcgctatagtcagatgaccaaattacagtctctacgctcaagctcacaatctcatgcagcgcttcctaaaacgtgttcccaattatcagaatcaccctgggtactttctaaaatgcagattcctggactccacccccggtttagggattctctgggggtggaaaccaagagtctgcatttaccagttttgtttttaattcctactaaaaattgagaaccactgagtgcaagagtgaggcaggtaaatggagtttacaactctaagaaagtgcattaacaatttatacacaaggccgggcgcggtggctcacgcctgtaatcccagccctttgggaggccgaggcgggaggatcacgaggtcaagagagatcgagaccatcctggccaacatggtgaaatcctgtctctactaaaaatacaaaaattagccgggcgtggtggcgggcgcctgtagtcccagctactcgggaggctgaggcaggagaattacttgaacctgggaggcagaggttgcagtgagccgagatcgtgccaatgcactccagcctggcgacagagcaagactccatttcaaaaaaaaaaaaaaaaatttatacacaaaatgctacaggaataacgcatgggtcctattgggaagaaaaagttctctagaagtcaggcttaagcagaactgcagctccgggacggattaagtcaggtaaaggtaacactctgtgcagagacatgcagacaaaaccgagtgttgagtaagtaactcgcctgtaagtgttatgctgcctgaagcttctcggagcgtctgagcagcaaggtgaacaaccctcagaaaccggtcgcgctgccagtattatcgctaaccagtggcagcgagcccctttgtttctcggcagttgtaattgtagtctggtttgtaggtggagctgtgcgcaggcgcacctagaaccaggtgaccttgcacatgcgctgtatgtaacactgaagccaaaagcgaaatgattgagggcaatttttcttttctgcttccgaaatgtccctttcgcgaatccagagaccctgaccgtccccatttctggctagggatcttataattcttaaaataataccccctttccttcagggcctctctagtaagtcggctgccaatacccaacatggcgggaggccctgcgccggctcagtctgcctataggtgcaggacttggaggggcgggcccctcccaaagggcgggagtttggggggcggggcctggccctctgcctcggggtgggctccgcccccgtcccccgcagggccttagcagcggctgccgcagctcaatcgcggagcaactagccgggcgtctgcgggagccgagcgtggtgaggtggggcctcaggggcaggtgggaggtgctcgggttaaccgtccgaggcccggagacccgcccgtctagggcgcctgagggaatcccgttcgggcagcggcctcttgttacccgggaggaacccgaggcccagagaggggctgggacgcgtcgttagggcccggggcccgcttgcctcagcttcttgctgccgccagcacgctaagctccagtcggcgccgaaggagagcttcccgaccctcgtgtccagtagccgcaatcccaggctgggagggtgaggcgccgcgctctgccgcccccccgcccctcgctccctgtgtcctggcggatttgcacgtaatctatccgaaagcccagtcccacccgccacccgactctggagctcccattcttcaggaccctgctgaagtatcgcttctcagccgccttctccaggcgcagctgcattcgcttctcggtttttgcactcgctgtgcaccgagttactttcccggcccctcgttgacaccgtaagctcgttcgttagatgttatgccttgcctttttcatctctagatcccagggcctagcacgtgatgataatagtcatggcttactgtacggaatgatcacaaattgtcaggtgctactgaatgcattacacataagggcccatttatttatttatttagagacggagtttcgcgcttgttgcccaggctggagtgcaatggcgcgatctcggctcacctcaacctccgcctcccgggttcaagcgattctcctgcctcagcctcccaagtagctgggattgcaggcatgcgccaccacacccggctaattttatgtttttagtagagacggggtttctccatgttggtcaggctgatctcgaactcccgatctcaggtgatccgcccgcttcggcctcccaaagtgctgggattacaggcgtgagccaccgcgctcagccaaaggcctatttaatcttcccaacaatcctatggggtgagttctttctatagcttcacgttttacccatgaagaaactgaggtattcatagaaaaagtaatttgccaggagtcccacaactaataagtggatggagctg

SEQ ID NO: 2161 - DNA, 6000 bp, Homo sapiens
tatatattctgtgccaaaccctgcaccagttcccttatatatatttctcctcctcgactattcagaaccatcctgtgtggtagttactatttccaggctcagaaagataagtgattacccaaagccatgtcataaaataactcatagcagttctatttgtaacagctcaaaggtggagacaacccaaatgtccttcaatggatggttaaatataccatggtacatctataccatagattactactcagcaataaaaaggacaaactattgatacaagcaaccacttgggtgaatctccagggaattgtgccaagtggaaagagccaagcccaaatgattatacactatatgattccaggtatgtaacattttttaaataacacagttatagacatggagaatagattagtggttgcctgtggttagggataggggaagggaagatgaatggatgcaattataaagagatagcacgagggatctctgtggtgatcagacagttctagatattgtggtagtagttgcattaatccacacacgataaaattgcatagacctacacacacacacacacacacaaatgcatgtatgtaaaactgggaaaatgtgaataaagtctgtggattgtaccaatgtcaatttcctggttttgatattgtactatagttatgcaagatgttaccattagggaaaactgactgaagggtacatgaaacctctctgaactatttttgcaaccttctatgaatctataattatttccaaataaaaaacttatttatttttttgagatgaagtctcacactgtcacccaggctggagtgcagtggcacgatctcagctcactgcaacctctgcctcccgggttcaagtgattcttctgcctcagcctcccaagtagctcggattacaggtacctgccaccatgcccagctaattttttgtatttttagtagatatgggatttcactatattggccaggctggtctcaaactcctgaactcgtgatccgcctgcctcggcctcccaaagtgctgggattacaggcatgagccaccatgcttggccaatgaaaagctttttaaaagacgtattctccagtgtgatggctctgataaaaaagaaaataagtatccaagcttcttttccacaaccctcaacaaccaagtgccatcaaaaggcactgaggtctctgaaagagtctgggactcatatgagagctctgccttctcagggatggtctgcaatccacatttgtcctctttcctttaatcaacactgaagctacctaggagtcaggccttgtgttggaagctaagtgatatgagatgaatgagttatgatcccttcccaagtgaactcccaatctagggataaagaggcctaataagataagagtttggactaaaagtcaaaagatttctgtcctcatgaaaccacttactagctttcttattttggaccaatccttcatcttctgacatcttggtttctcaatctgcaaaattcaaaagaatgaaatataaatgtatattttaagcttaatctgggacttctgggagggttcaaggatatatgtaaattacatgaaagtagataactgcatcccttttcgaagaagaggcattatatgttttttttcagattctgggaatctgaatgttttaacttttatcatggacattttcaagcatataccaaagtagagtgtacatactgccaatctttcaagccttctaaagtgctgagattacaggcatgagccaccgagcccagctaattttttgtatttttagtagagacagggtttcatcatgttgcccaggctggtcttgaactcctgagctcaggtgatccgcctgcctatgcctcccaaagtgctgggattacaggcatgagccaccgcgcccggccaactactgagccaatcttgtttcatttattccctccacattatttttttactgctgaatcactttaaagcaggcttaccggcccacaaagggctggatttttaaattccatttctaagggcccttccagtctgacattcaatgattctaatagatctctcaggtccctcctcctatctctaataattcacgatttcaatagggatggaagaaatagactagagatctaacataacatctcatgattccaggtgccacaaaagttcattccctttcacaagaagataataactaaattttaaacatggaattctaggacatttatgatttaacccccaccagtgttccaacctcatctctcaccccttctccagatcccaaccactttcccatatagcctgcagtttccacagttttgctcctactcactatgtgcctttgtacaggcagtaccttctacctggaatgtccctgagccccacccattttgttcttgagtctcagcttgaagtctcctccccagtgaagacttctatcacctcttgcctccacagaagggttagtgtgctcccttaggcctagaaactgagtacctgttaccacacagggaatagcactgttggtcactctgggcagcaaacccaactactgaggggccagacagaagtcaaggtttgaagccagtaggcataacaaacactaagaccctgctttctcacctctaaaaagaaaagagagaaaaatatcaactctaaataaagcaacaacctgagagcaacagtaaatgcaaacaacattctatttcagagaaccatagggaatggttgagattgagaccaaatgggacagagtatcttgtctaaaggaagtcgtctctactcagtgtcagctgattgttgaccagcaggaatttgggtccagtgtggccagctcttccgttttttcaagaaaaattagaaatccagatttgcatgtgaaatctcccaatttttacatgtcagcaactaaaaaacattaaaggcccactgcaacgactttcaaggttttcaggctatggaaatgatttcatgagggtccacttctacccatccaaaggaaacatcctatggtaggggtaagttttatatcagggctaatggcatgttaatggttgttaaacctgctcctccatcctgcacgggctcaaaaggactgcaaggtcatagaaaacctttcatatgaggcccctgtcctttgagggcctcagtttccccttctgtaaaatgaggatataaaacctatttgtggcccggcacggtggctcacgcctgtaatgccagcactttgggaggctgaggagagtggatcacctgaggtcaagagttcgagaccagtctggccaacacggtgaaactccatctgtaccaaaaatataaaatattagccgggtgtggtggtgggcgcctgtaatcccagctactcgggaggcggagggaggagaatcgcttgaacccggtaggcggaggactcagtctcaaaacaaaaacaaaaacaaaaacaaaactatttgtgagtcagctaccaaacagaaaaccacctggccgagggctgtcagggccacgtgcttttacctacatcatctcactgaattctcaattacctctgagaggtaagttctattacatccacattttactgataagaaaacagtagctcagagatagcaagcagtttacctaataaaaacaagagcaaacttcttaaaagccctttctctccaacggcttaatttatttaatcctcctaacaactctgagctgggtatcgtcaaaggggattccaccaaggtagcctcactccaacactctaacccaaggctgctcaacagaaatataatgtaaactgcacatgcaatttaaatgtttttagaagctgcatttaaaaagtaaaaacacaggtgaaattaataacatttttatttgacccaatatatgcaaaacattatattccaacatgtaatcagtattaaaaagtattgagataatttttacatcagttttttcgtactaagtcccgtattttacaatatagcacatctcaattcgctatatttcgagggttatcaactagctacgttgcaagagctgagtcaactcaggaggccagcggccaccataaggggcaatgcatttagagttcacttattaaatgctgacgttaacagaacccacagagccgcatttcccttggtttcggaggacacgcgaaaaataacaacagcaaagggttctcgagcatctccttcgcgccagacggtgtgttgtactttgtcatcgtcgcagtaaggccggtgctatcgccctcctagtttgaccaagcgagaggactttctccagatgggcccctcccgagagaatggtcgccgtcccgctctcctgttcgggtcaccaccggccgggcgccactcgaacgagccccggccagccgtcaccctaatcattcccgaaggaggggccatcagagctacagctcatcagggtcaatcagaaggggcgcccgcacgcaaaggtcacctgcaaaccgaagcggcgcacggataaggtccgggacttgaagtctatctccaaacattcaggctcctcctccgactcctcctcgaactggcgctcagaggcgccaccattcggaaggagcccaggccacgcgcagctcgccctcccgcaccgcgagggcagcagccgcctcatgcgactcgagaacgctagagggcgccgcttccgggagcccgcaagcggcttccgggtgctcgcgcgccgacctggacgcagagaagccagagactttcgcttccggctgccgcaggcgcttcgctggtgcaggtaagctccgcacactctcggccggtcccgagtccgactccctcaagggtgacgcgagctctgccctttaaccggaaacgtctccctgctcaccccacccccgcgcagacgcagtgctgagcacacagctaccggacaaagagtgacgcccggagctggagttatggcggctacggagccgatcttggcggccactgggagtcccgcggcggtgccaccggagaaactggaaggagccggttcgagctcagcccctgagcgtaactgtgtgggctcctcgctgccagaggcctcaccgcctgcccctgagccttccagtcccaacgccgcggtccctgaagccatccctacgccccgagctgcggcctccgcggccctggagctgcctctcgggcccgcacccgtgagcgtagcgcctcaggccgaagctgaagcgcgctccacaccaggccccgccggctctagactcggtcccgagacgttccgccagcgtttccggcagttccgctaccaggatgcggcgggtccccgggaggctttccggcagctgcgggagctgtcccgccagtggctgcggcctgacatccgcaccaaggagcagatcgtggagatgctggtgcaagagcagctgctcgccatcctgcccgaggcggctcgggcccggcggatccgccgccgcacggatgtgcgcatcactggctgagcggtggagctgcgggcggccagggccgggcgctctgtgcggactggggccatgatcgggcccgggggcctgagcctgggaccccaccccgtgttaatgaaaaatgagttttggcagcgcctgtggtctggtgtgtctctttcattcgttcttattgggtttattttaccaagcctgtttcctaccgcctttctggctggtggcgaaacgaagttgggagtccgtaacaataaggccttcgttggctatagtgggatctttagatgttgactgaacctaggttatccctctaccacacatgggaagtttttcacctgggctcccaaggacccacttgggtttcttacacgcaaaatagctggctctattaaatgctcacttaactggctacctctataccaatatgggcaccaacttgcacctgccctttgggtacaggcttcccaaaatgtccaagttactgggccattttaatgtgaagtgtttactgcacaccttcacagagataggctagttcttgtgagc

SEQ ID NO: 2162 - DNA, 6000 bp, Homo sapiens
cgaggcaggtggatcacctgaggtcaggagttcgagaccagcctggccaacagggtgaaaccccgtctctactaaaagtacaaaaattagctgggcgtggtggcggacgcctgtaatctcagctacttgggaggctgaagcaggagaggtgctggaacctgggaggcggaggttgaagtgagccgagattgcgctattgcactccagctcgggcgacaactgcaagactccatctcaaaaaaataaaaataaaagaaaagaaagaaatatgtgcactacctaagttttgtctttagaaaaactatccacctataaaaaattaccttgacaaaaatagttccggtttgactaatcattttgtttctttaagtggtaagtgtatgcaaggtggatccttgatgagccaacattgcactgtggatacatatctatgtttacgcgctattagaacagaaggcgctgtatatagaaatgttgctttgaagcaatatttgcaaaacacgcagacttctgtatctgtatttggaaaaaataaaacaggttcttgttgctatgtttcagttacgtattgttgagttacagtcatgcatcatataacgtttctgtcaaccatggaccccatatacagggtggtcccataagattataatggagctgaaaaattcccatcacctagtgatgtcctgatggtcctactgcataggcctaggctaatgcgtggatttgtcttagtgtttaacaaaaatctaaaaagtaaaatatatataaaaaatttaaactagaaaaaaactcatagaataaggatataaagaaaatatatttgtatagttgtaccatgtgtgtaaacacaaagtgttattacagaagtcaaagttaaaatttaaaagcttacaaagtataaaagttggtcaggcaaggtgcctcagatctgtaatcctagcacttagggaggctgaggatggagaccctgtctctaaataaaaggctgggtgccgtcgctcacgcttgtaaccccagcactttgggaggccaaggcggccagatcacctggggtcaggagttcaagaccagcctggcaaacatggcaaaaccccatctctactaagaatacaaaaattagcatggtggcgcatgcctgtagtcccagctacttgggaggctgaggcaggagaattgcttgaacccaggaggaggaggttgcagtgagtcgagatcgtaccactgcactctagcctgggcaacagagtgaaactgtctcaacaaaacaaaaaacaaaaacaaaaagttatggtgaactaaggctaatttattattgtagaaagaaaattaaaaaaaataagtttagtagttcgtgaccagcctgggcaacatggtgaaaccccatctctacaaaaattagccaggcatggtggcatgcacctgtattcctagctacttgggaggctgaggcaggaggatcacctaggcctgggagccagaagttgcagtgaacctagattgtgccactgtactccagcctgggcaacaaagtgagatcctctctcaaacaaaaaaaaattagtctatgtgttcagtgtttatataaattctggagtagcgtacagtaacgtcctacatcttcacattcactcaccacttacccagccagaacaatgtccagtcccgcaaactcttattttttacttttatatatatatatatatatgtgtgtgtgtgtgtatatgtatatatgcatatatatatgtgtatgtgtatatatgcatgtgtgtatatatacatatataaatatatataaatgtttttttttttttttgagatggagcctcaccgtgttgcctaggctggtgtgcaatggcgcgatctcagctcactgcaaccttcgcctcccaggttcaaacaattctcctccctcagcctcctgagtagctaggattacagttgcccgcaaccaagcccagataatttttgtattttgagtagagatggggtttcaccatgatggtcaggctagtctcaaactcctgacttcgtgatccgctcacctcggcctcccaaagtgctgggattacaggtgtgagccaccgcacccggcctattctatatttttacttaaccatttctatgtatagatacacaaatacttaccattgttactgcctatagtattcagtacagtaacatgctgtacaggcttgtagcctacgagcagtaggctctatcacaaagcctaggtgtgtgtaggctataccatctagtttgcataagtgcactctatgaggctcacacaataaaactgcctaagggctcattttcagaacgcatccccattaagagatgcatgactgtataaagttcttcaccattcttttttttttgagacggagtttcgctcttgttgcccaggctggagtgcaatggcgcgatcactgctcgctgcaacctccgcctcctggtttcaagcgattctcctgcctcagcctcccgaatagctgggattacaggcgtgcgccaccaagcccggctaattttgtatttttagtagaaagacagtttcaccatgttggtcaggctggtctcaaactcctgaccttaagtgatccgcccgccttggcttcccaaagtactgagattacagccatgtgccactacacccagataattttctatttttagtagagatgggggtttcactatgttggtcaagctggtctcgaactcctgatctcaagtgatccaccgcctctgcctcccacagtgctgggattacaggcgtgagccactgtgcttgtccttcttcacctattctaatcttctttaaacattaccttttaaagaaggctgttcttaccttctaaacaactatctttttccagggaggcaggtgcaaactctgccaagaaatcccaagaatgcaaaaatacttctcaatttgtctgtctttaatattcaaaagcaaattgcccctcaccaacttccagcccagtctcactcatgctttgtggtgtgaactgcaggctgattttgattgttgagagcagtgcaaggaagacaagtctggccttccttatattaacaaatggcactcactgcaataggacctatctgggaccaatccaagctgtccatggaccctaactagctccttcctggttgggcagaagcctctggaaacagagtaggtttaagatttcagaacaggtcctcattatttgccaaattctttcttccctttgtaaacgattatgctagtttaaacaccaaaagggagccagccggagagacattaaaatgagtagcttcagtaatgtaaataatccattacttcaactagttctgctttattcctaccacaggcctaaaatttggcaaggaagttgagcaagcctggcggcataagccagagctcacaagaactagcctatctctgtgaaggtgtgcagtaaacacttcacattaaaatggcccagtaacttggacattttgggaagcctgtacccaaagggcaggtgcaagttggtgcccatattggtatagaggtagccagttaagtgagcatttaatagagccagctattttgcgtgtaagaaacccaagtgggtccttgggagcccaggtgaaaaacttcccatgtgtggtagagggataacctaggttcagtcaacatctaaagatcccactatagccaacgaaggccttattgttacggactcccaacttcgtttcgccaccagccagaaaggcggtaggaaacaggcttggtaaaataaacccaataagaacgaatgaaagagacacaccagaccacaggcgctgccaaaactcatttttcattaacacggggtggggtcccaggctcaggcccccgggcccgatcatggccccagtccgcacagagcgcccggccctggccgcccgcagctccaccgctcagccagtgatgcgcacatccgtgcggcggcggatccgccgggcccgagccgcctcgggcaggatggcgagcagctgctcttgcaccagcatctccacgatctgctccttggtgcggatgtcaggccgcagccactggcgggacagctcccgcagctgccggaaagcctcccggggacccgccgcatcctggtagcggaactgccggaaacgctggcggaacgtctcgggaccgagtctagagccggcggggcctggtgtggagcgcgcttcagcttcggcctgaggcgctacgctcacgggtgcgggcccgagaggcagctccagggccgcggaggccgcagctcggggcgtagggatggcttcagggaccgcggcgttgggactggaaggctcaggggcaggcggtgaggcctctggcagcgaggagcccacacagttacgctcaggggctgagctcgaaccggctccttccagtttctccggtggcaccgccgcgggactcccagtggccgccaagatcggctccgtagccgccataactccagctccgggcgtcactctttgtccggtagctgtgtgctcagcactgcgtctgcgcgggggtggggtgagcagggagacgtttccggttaaagggcagagctcgcgtcacccttgagggagtcggactcgggaccggccgagagtgtgcggagcttacctgcaccagcgaagcgcctgcggcagccggaagcgaaagtctctggcttctctgcgtccaggtcggcgcgcgagcacccggaagccgcttgcgggctcccggaagcggcgccctctagcgttctcgagtcgcatgaggcggctgctgccctcgcggtgcgggagggcgagctgcgcgtggcctgggctccttccgaatggtggcgcctctgagcgccagttcgaggaggagtcggaggaggagcctgaatgtttggagatagacttcaagtcccggaccttatccgtgcgccgcttcggtttgcaggtgacctttgcgtgcgggcgccccttctgattgaccctgatgagctgtagctctgatggcccctccttcgggaatgattagggtgacggctggccggggctcgttcgagtggcgcccggccggtggtgacccgaacaggagagcgggacggcgaccattctctcgggaggggcccatctggagaaagtcctctcgcttggtcaaactaggagggcgatagcaccggccttactgcgacgatgacaaagtacaacacaccgtctggcgcgaaggagatgctcgagaaccctttgctgttgttatttttcgcgtgtcctccgaaaccaagggaaatgcggctctgtgggttctgttaacgtcagcatttaataagtgaactctaaatgcattgccccttatggtggccgctggcctcctgagttgactcagctcttgcaacgtagctagttgataaccctcgaaatatagcgaattgagatgtgctatattgtaaaatacgggacttagtacgaaaaaactgatgtaaaaattatctcaatactttttaatactgattacatgttggaatataatgttttgcatatattgggtcaaataaaaatgttattaatttcacctgtgtttttactttttaaatgcagcttctaaaaacatttaaattgcatgtgcagtttacattatatttctgttgagcagccttgggttagagtgttggagtgaggctaccttggtggaatcccctttgacgatacccagctcagagttgttaggaggattaaataaattaagccgttggagagaaagggcttttaagaagtttgctcttgtttttattaggtaaactgcttgctatctctgagctactgttttcttatcagtaaaatgtggatgtaatagaacttacctctcagaggtaattgagaattcagtgagatgatgtaggtaaaagcacgtggccctgacagccctcggccaggtggttttctgtttggtagctgactcacaaatagttttgtttttgtttttgtttttgttttgagactgagtcctccgcctaccgggtt

SEQ ID NO: 2163 - DNA, 6000 bp, Homo sapiens
gctgcagtgagccaagattgagccactgcattccagcctgggtgacagagatagactctgtggttgggagtttgagaccaacctgaccaacatggagaaaccccatctctactaaaaatacaaaattagccgggcatggtggcgcgggcctgtaatcccagctattagggaggccgagacaggagaatcgcttgaacccaggaggcggaagttgtggtgagccgagatcacaccactgcactccagcctgggcaacaagagcaaaactccatctcaaaaaaaaaaagaaaaaaagatatatgaagaaagagcagggtctgttcagggagcatgagacatagctaaaacgtgagatgctcaggaggtgtggttatgaggaaggaggctgggctggcagaggccataaactagctatggcacgtgatgtgccaagtgaacttgcagactgttttatttgacctgcatagtgttttggtttaaatattgctcaaaattaacttgcttgtctttagttgaggtattggctctgtaattcaccaaagtcttcacctcacacaattaagtcatctgccaggcatgttacctgtttgcaacccccagtatggatccatagggcctctttcaggtcaaaaattctctatttagtggttgcaaaatggcagttcaccgcccatagctagcctactgacatgtttcaacagaggttatttttaggaatttgaatgagtcttttaacacttaaatactagatttttatgaataatcttttaggaaaaaataatttaccaaagtgaccccaatagaaactatttatttatttatttatttatttttgagacagagtctctcttttgcccaggctggagtgcagtggcacgaccctggcttactgcaacctctgcctcctgggttcaagcgattctcctgcgtcagcctcctgagtagctgggattacaggcacccaccatcgtgcctggctaatttttgtatttttagtaaagacagggtttcaccatgttggccaggctggtctcgaactcctgacctcaagtgatccgccaccgtgaccggccgaaaccatttaagtagactaattttctgattttatttccttttttttttttttaatttggagacaaggtctcactctatgccctaggccagagtgcagtggcatgatcacagctcactgcagcctctaccttcccagactcaggtgatcctctcacctcagcctccaagtagttgggaccacaggtgtgcaccaccatgactgactaattttttaatttgtagagatctggtctcactacgttgcccaggctggtcttgaactcctgggctcaagcagtcctcccacttcagcctcttaaagtgctgggattagagatgtgagccaccacgcccagcctaaatagattaattgtcatagaagtagagaagctgtaaaagaggtctctcaccactaccaccacctaaaaagaaaaaagcagctggtcctaaaggtttcacaggcaactccaaacaacctcaatgtttcttcaaccgttccagagcctaaaaagaaggaaaactaccaaattattgtaatgaactgagaacactgacactaaaacctaatagaggttgcacaaaaaaagaaagctacagattcatctcatttataaatattgttcttaaaatcttaaaatataagcaaatagaattcagcagtacctgtaaaaataacatatcattctgggagtgcaaagatggttaattatataaacataattcattatgttaacatagctaaggagaataatcacaggatcttctataaatttttgttttttgacagaggtgcatgaacatgtcacccctatggcccagtggggctccaatgtcctggggaccttagtaagactgcagggggccgggcgcggtggctcacgcctgtaatcccagcactttgggagtccaagacaggcggatcacaaggtcaggagattgagaccaccctggataacacggtgaaaccccatctctatcaaaaatacaaaaaaaattagctgggcgtggtggtgggcgcctgtagtcccagctactcgggaggctgaggcaggagaatggcgtgaacccaggagatggagcttgcagtgagccgagatcgtgccactgcactccagcctgggcgacagagcaagactctgtctcaaaaaaaaaaaaaaaaaaagactgcagggagcatgcctcagaattgtccacttgagagctgctcctggaggcattaacttcccagcctttctgggttaagcactccagtggccagagggtgacggtgctgagagtagcaagctatcacatcagcctgtgcggcaatgaggggtgctgagaagatccagaaggttaatgccaatagagaacgctatggctgcaggccttagggagagctggcaaaactcgtacttctccaaagaagcgggctacaccttgagggcacaactcacaacaccttcagtagaacattgggatggtgatggacaggctggctctgggagcctctctggtcccactgggaccaaggagaagtaggggagtggggtgaccagggaaacacacagatgttccatttttatagccctacagctgccaagctccaactgatcggaagaggagagggctaaaccaattcacatactcacaaaaaaccctgtcagaagaagcttcactatgaagccaagagaattcctgccagcctggaattctactctagtcctttctccacacacaatcccacaagcagcttgtccagaagaactcacttcatctaaaggggagttatagtaaaaaagaaataacacaagacttatacaaatatattactgaaaaaagcaggagagggaggcagggaacaggaaaaacaaatggcagatgaaagacaatcaccaaaaaaagaaaaataaaaaagctaacatgaaacagatgataatcatgaacaacaaagaagtcaaagggcttaatgaattttaaaacaagagatcaaagcaaagatgtaatagttcaaagaaaagacactgagacagccagaggagacgacactggcagagctcaggaaagaagggattttaaaaataaccatctcagaagagaaggtcattccagaaacatcaaaaagaaagctagccttgctgagaacagaagataggactgcaaaaagcaaatgaaggagttgggaatgaatgatttaaaaagagccaagaggccgggcgtggtggctcacgcctgtcatcccagcactttgggaggctgaggcaggtgggtcacctgaggtcagaggttggagacaagcctggctaacatggtgaaaatctgtctctactaaaaatacaaaaaattaaccgggtgtggtggcaggcgtctgtaatcccagctactcgagaggctgaggcaagagaatagcttgaacctgggaggcagaggttgcagtgagccaagatcatgccaccacactccagctgggtgacagagcgagaggaaagaaaaagcgggaggaggggggtggcgacagagcaagatgaaagaaaaaggggaggggaggggagaggagaggagaggagaggaaaggaagagaagggaagagaggggaagagaagggaagagaagggaagggaagggaagggaagagaagggaagagaagggaagagaatggaagagaagggaagagaagggaagagaagggaagagaagggaagagaagggaagagaagggaagagaagggaagagaagggaagagaagaggagtatggcagtatagagacagagaaagtgagaggtaggggcaggcacggtggctcacgcctgtaatcccagcactttgggtggctaaggcaggaggattgtttgggcccagcagtttgaggccagcctgggcaacatagcgagaccctgtctctataaaacaaacaaacaaacaaaaaaacaattagtggggcatggcggtacgcgcctgtggtcccagctactcacaaagctgaggcagaatagtttgaacccaggagtttgacgctgcagtgatctaggactgcaacactgcactgaattttctgaataactaatgacactgagcttggatgacagactctgtcaaatgaaatactaagtgctgatgaggatgtagagcaactaaaattctcattcattgctgggccctggattctaccctggctagtacttctactttctgaactttagtttgcccatctgtgaagtaaaggggttgtcctaaggttctatgaatcaaacacatgtctatagaaagaaaggtggcaatatgtagcaaaatatttcagtcagtcctcttttgggattacagcttaaggaagtactggtatcccttaccatccaagctcttgctatcagaatgcttccttttcaaactcagagaccaaatagatttgatagtaatagatgcttataattcaaaatcagaacaagctttaagcaatatatgattatcacattattttaatgaaaaatcagaaataatctaagtgttcagcaataaagcaatattctttacagtgcatccagactgagtctcctaaaacacaaatctgatcacatccttcccctgctttaagtccttccatggttcctactgtctatgttaaacgtgggtttgaatcccaatcttgccatggattggctgaacctgggcaagttaattaatctctctagaccttaatttctcatctgtaaataaagtatcacacatacacagatgttcaataatgatatggtttggctgtatccgcacccaaatctcatcttgaattgtagctctcataattcccacgtgttgtgggaaggactcagtggaagataattcaatcatgggggtagttcccccatactgttctcatggtagtgaataagtctcacgagatctgatggttttataaggggaaacccctttcactttctcattctgtctgcctgctgccatccatgtaagatgtgacttgctcctccttgtcttccaccacgattgtgaggcctccctagccacgtggagctgtgagttcattaaacgtctttcctttataaattacccagtcttgggtatgtctttattagcagcatgagaacagactaatacactaataataatatcaatgcctgtgacttttaaaaatactacatactagaacttacatattcaaggaagtattatctcttcataaccatcggttttaaaaaaatgacgaagtatatattctgtgccaaaccctgcaccagttcccttatatatatttctcctcctcgactattcagaaccatcctgtgtggtagttactatttccaggctcagaaagataagtgattacccaaagccatgtcataaaataactcatagcagttctatttgtaacagctcaaaggtggagacaacccaaatgtccttcaatggatggttaaatataccatggtacatctataccatagattactactcagcaataaaaaggacaaactattgatacaagcaaccacttgggtgaatctccagggaattgtgccaagtggaaagagccaagcccaaatgattatacactatatgattccaggtatgtaacattttttaaataacacagttatagacatggagaatagattagtggttgcctgtggttagggataggggaagggaagatgaatggatgcaattataaagagatagcacgagggatctctgtggtgatcagacagttctagatattgtggtagtagttgcattaatccacacacgataaaattgcatagacctacacacacacacacacacacaaatgcatgtatgtaaaactgggaaaatgtgaataaagtctgtggattgtaccaatgtcaatttcctggttttgatattgtactatagttatgcaagatgttaccattagggaaaactgactgaagggtacatgaaacctctctgaactatttttgcaaccttctatga

SEQ ID NO: 2164 - DNA, 6000 bp, Homo sapiens
gctaataacattttacccttgagtatcacttatacagacaaatagtttttaattggtttgatattttgctcttctcactttgattttgtttaacctgtacctctgtgactgagctgtccttttcttcccctctggcatgtaggtatatagaagtgttctgctgaaaagtattccaagagaagttgtggcatataataaaaatataaatgatgactttgaaatgatagattgtggtaagttatccaatttaacatattatatgtaaaacacattggatcacactgtacataatacagtgggtgtcagacaacatggaaatgtgaatcataaggaggtgaggtggacaatgcatatgttttgaaaacaaataagtttgagattagaatgtgctggtatagtttattgaaaccattaatttgtcccctgttaattgtgttttggaagaagttttctagtctacttatacatgttaatgaaacacgtaaaagagacttaataaaattctaaaatctgaatgacagggaaaacaaggtagctgacagtaatcttcccgaggagtctgttaagaaaatgtcccggctgggcatggtggctcacacctgtaattccagcactttgggaggccaaggcgggtggatcacgagttcaagagatcaaggccatcctggccaacatggtgaaaccccatctctacttaaaaaaaaaatacaaaaattagctaggtgtggtggtatacgcctgtagtcccagctactcaggagcctgaggcaggagaatcgcttgaaaccaggaggcggaggttgcagtgagctgagatcacgccactgcactccagcctggcggcaaagtgagactctgtcacacacacacacacacacacacacacacacaagaaaatgtcctgttcatataagtattacttataggtaattctgctaccacaggcaagactgcaccctcttgccaccatcatgctaagacttcaggcactagtaatctttttttttcaaagaaagaaaaatcaaatggttagtattcatacacctcttctgcctacctcctttcccttgtctcatctttccatgtatttcaggtgtatgtaatatatacatgtgtatatactatgattttttttttttgagatagggttttgttctgtcacctacactgaagtgcagtggtatgatcatgactcactgcagcatggacatcccaggctcaatcaatccttccacctcagcctcccgagtagctggaactgcaggcatgcaccatcaccctggcgaatttttatattttttgtagagacgggattttgccatgtttgctcaggctggtctcgaaatcgtgagctcaagtgatccgcccaccttggcctcccaaagtactaggattacaggcatgagccactgtgctaagcctaggtactgtgatttctttaatgccacagtgtgagacatttaggtcatttctccttttcttgtctcgtcttgtctcgtctcgtctcgtcttctctcctctcccctctcctctcctctcctttcctctcttcttcccatccccatccccctcctctccccctcccctgccctcctttctcttttattttttcttttcttttcttttctgagacaggatcttactctgttacccaggcaggcatgcagtggcacaatcatggctcactgcagccctgacctccggtgctcctttcatctcagtcttgtgccacacccaactaattttttgtagaggtgggattttgccatgttgcccaggctggtctccaactcctgggctcaagcagtctccctaccatggcctcccaaagtgctgggatgacaggtgtaagccaccatgcctggccaggttgcttctaattatgcacagctctgtgatgagcatcatttgtagcttaatctttaggccacatccttaggataaattcttaagagaaaatctgatgaattaaagcaaatttttaaattataaaaatatccataatcattatggtgtccactgggatataaacttttaagatttcattcaccaaaaagatcttttaataatgtcctagaatctgactccgtttgaggataataggccaaactcaattctttttacataagtgtattattctggagccttttcaaggcaacgaggagtatataagacagtaaccctagccgggtgtggtggctcacacctgtaatcccagcactttgggaggccaaggtgggtggatcatctgaggtcaggagttcgagaccagcctggccaacatggcgaaaccttgtctctactaaaaatacaaaaattagctgggcatggtggtgagcacctgtaatcccagctacttaggaggctgaggcacaagaattgcttgaacccaggaggcagaggttgcagtgagccaagatcacaccactgcactccagcctgggtgacagcgtgagactccatctcaagaaaaaaaaaaaaaaaaaaaaaccgctgggcacggtggctcacgcctgtaatccagtactttgggaggccgaggcgggtggatcacaaaatcaggagttcaagaccagcctggccaagatggtgaaacccgtctctactaaaactacaaaaattaccaggtgcagtggcagacacctgtaatcccagctactcaggaggctgaggcaggagaatcacttgaacttgggcggcagaggttgcagtgagccaagatcctgccactgcactccagtctgggcgacagagctagactctatctcaaaaaaacaaacaagcccgggtgcggtggctcacgcctgtaatcccagcactttgggaggccgaggcaggtggatcatgaggtcaggagatccagaccatcctggctaacacggtgaaacctcgtctccactaaaaatacaaaaaattctccgggcgtggtggcgggcgcctgtagtcccagctgctccagaggctgaggtaggagaagggcatgagcccaggaggtggagcttgcagtgagcggagatcgcgccactgcactctaccctgggcgacagagtgagactccatctcaaaaaaaaaaaacaacaacaaaaaaagccattttctatatttgttatacatgttgcttacctatccagggtggtttttctgttcctacaaaaccagacatcagaggttagctagaaagctgtggatcacttgcctgttttgtgttttttctatgagaaactaactgctagcaagtatctgagctacaagagcagtgaagttccagagagtagaagtaagcaaaagataatagacgatgtcgttttctgttttgttttctttttgataagtatctgccaaagaaacttgggtgactgagagtttgccacttcctgtatatataggtttcagatcaaattctgctacacaatttctttctttctttcttttttttttttttttttttgagatacagtctcactcttgttgcccaggctggagtgcaatggtgcgatctcggctcactgcaacctccgcctcccaggttcaagtgattctcctgcctcagcctcccgagtagctgggattacaggcacctgccaccaggcccagctaatttttgtatttttagtagagatggggttttgctatgttggccaggctggtcttgaactcctgatctcaggtattccacccgccttggcctcccaaagtgctgggattacaggcgtcagccactgcacctgaccttttgtttgtttgttttgagaccatgtcttgctctgtcacccaggctggagtacagtggcacagtcacagctcactgcagccttgacctcccaggcccgagtgattctcgactcagccacgtcctggctaatttttatattttttgtagagatggggtttcaccatgttgccaaggccagtcttgaactcctgggttcaagtgatccatctgccttggcctcccaaagtgctgggattacaggcgtgagtcaccgcacactgccttacatacggttattaactagatatatttattagcaagtaagcaaacaaccattgttacagatcctgtacagtggtggtggcacagggcagggagaatatccagtgataatgaactcaggaattctggcactcaaaaagagagaacacagtggcttacatctacaatcccagcactttgggaggccaagccaggagggtggcttgaacccaggagttcaagaccattgtgggtaacatagtgacagcctattgctacaaaaaattttttaaaatagccacacatggtggtgggcttctgtagtccaagctactcaggaggctgaattgggaggttggcttgagcccaggatgtcaaggctgcagtgagccatgatcttgccgctgtactccagacagagcaagaccctgtctcaaaaaaaaaaaaaaaaaagagagaaagttatgtaggaggatatacagtcagacaagtctatattcagataagtcaccttccagttcttagagctatggttagatgctatgacccagatttggacacaccaaagaacaccaacttgggaaaaacagttctggttctataaacaaattcattatgagttgtaaaataattactgtttaaaaagcacacacacaatttatatatcctatgcagtaagttcatatatcccagttctatgtctgaccagcacccatagaaaagatttgctcaagaacaggtgccaagatttcagatgcaggattcagtcaaccttaaggctaccatcaagcaaataccgtggatcagaattcagggctggacacaggacttctcagagcttttagccttaacattattatccctaagagtaaagctgagagacttcactggatctttcatccctttcatggctattgagggtagtgtctcaaattttttttttttttttttttattgatcattcttgggtgtttctcgcagagggagatttggcagggtcataggacaatagtggagggaaggtcagcagataaacaagtgaacaaaggtctctggttttcctaggcagaggaccctgcggccttccgcagtgtttgtgtcccggggtacttgagattagggagtggtgatgacttttaacgagcatgctgccttcaagcatctgtttaacaaagcacatcttgcaccgcccttaatccatttaaccctgagtggacacagcacatgtttcagagagcacagggttgggggtaaggtcacagatcaacaggatcccaaggcagaataatttttcttagtacagaacaaaatgagaagtctcccatgtctacctctttctacacagacacggcaaccatccgatttctcaaatcttttccccacctttcccccctttctattccacaaaaccgccattctcatcatggcctgttctcaatgagctgttgggtacacctcccagacggggtggtggccgggcagaggggctcctcacttcccggtaggggcagcagggcagaggcgcccctcacctccccaacggggtgactggccgggcggggggctgacccccccacctccctcccggacggggcggctggctggcgggggggctgaaccccccacctccctcccggacggggcggctggccgggcagaggggctcctcacttcccagtaggggcggccaggcagaggcgcccctcacctccctgacggggtggctggccgggcagggggctgacccccccacctccctcccggactgggtggctggccaggcggggggctgacccccccacctccctcccggacggggcggctggcctggcgggggttgacccccacctccctcccggacggggtggctgccgggcggagacgctcctcacttcccagacggggtggctgctgggcggaggggctcctcacttctcagacggggcggctgggcagagacgctcctcacctcccagacggggtcgcggccgggtagaggcgctcctcacatcccagacggggcggcg

SEQ ID NO: 2165 - DNA, 6000 bp, Homo sapiens
cgaggatagtctcaaactcctgagtttaagtaatctgcccaccttggcctcccaagtgctgggattacagacgtgagctaccatgcctggccaacaatccattcttatagtttcatatttaatgatgtatttttgtgaaatcctttttggccctgtcttcttccttttcctttcccttaaaaacctccaagcggccgggtgcggtggctcatgcctataatcccagcactttgagaggctgaggcaggcagatcatgaggtcaggagtttgagaccaacctgaccaacatagtgaaaccctgtctctactaaaaatgcaaatacccgggcatggtgtcatgtgcctgtagtctcacctactcaggaggctgaggcagaagaatcacttgaacccaggaggtggaggttgcagtgagccgagatcacaccactacactccagcccgggcaacagtgcgagactccgtctgaaaaaaaagaaaaagaaaaaacctccaagcaagaaaaaaacttctgaattggtgtaatggtaaatttatcccaatatatccaagttttccactccttctcccttttttccattttcataattccctctcctataaccgatgtcagatcctcaaatggctctaggataggaactattatttgttgagtacccactgtctgctttaagcataaatggagaaaaatttcttacaagcagaaattttctgggaaaagagattagtttgtgttgggcaaccacttttataagctgcatgtggaattgtgggaggcccccaagaggcacactggactaatttggactaattagaaatagtcaccatcaatctgattctcaggctcttgtttggttgaagaatatacacagagagccagagctgagctatctagggcaatggagggacatcttggaggtgatatgggaaagaagaaaggaaatggaaaaactggcaggtgaagaatggaagtatctaatggttaattgcatttttttttttttttttgagacagagtctcgctctgttgcccaggctagagtgcagtggcgcaatctcggcttactgcagcctctgcctccccggttcaagtgattctcctcctgcctcagcctcccaagtagctgggactacaggcgagcatcatcacgcccagctaatttttgtatttttagtagagacggggttttgccattttggccaggctggcctcgaactcctggcctcaagtgatctgtccacctcagcctcccaaagtgctgggattacaggcatgagccaccatgcccggcccccattacccccaattctttgatatctggttcaggtattcttagctattatcttttagttagtaatttggatgaaatgctttactttttttaaacattggggttaacaactacataaaaaattgagtttgcatttttcaaaattaaaggaaaaaaaggtagccaaaaggaatcacaagtatgactacggtagggtgagaaaggagagagtagcaaatgaaggcagagttagacaggggaccaccagacccttagtgccttgtaggccaggacaaggagcttggcttaaccctgaaagaaatggggagtcactagaacattttcaaacttttggatttttgacaattgaatagattaaaatatggttttataccggtttaaacttgtatatatatttttcctattagaaaggttggggccgggcacagtggttcacgcctgtaatcccagcactttgggaggccgaggcgggtgggatcacgaggtcaagagattgagaccattgtgccaacatggtgaaaccccgtctctactaaaaagtacaaaaattaccctggcgttgtggcacacgcctatagtcccagctactcgggaggctgaggcaggagaattgcttgatcccaggaggcagaggttgcagtgagccgagatctctccattgcactctagcctgggcaacaagagtgagactccgtctcaataaataaataaataaataaatagaaagaaagaaagttgggcatcttttcacatctaaaagccatttacatttgcttttctaagattgtatgcaaatcctttcccccttctgtgggtagagaggctttattaatctttgtaatgcactacttccacagtgcagaaccagcttaaagatcaccactttagtttttcctccaaggaaaaagaacattaagaatggtgaggtccagctgggcatggtggctcacgcctataatcccagcattttgggaggctgaggcgggtgcatcacctgaggtcaggagttcaagaccagcctggccatcatggcgaaaccccgtctctactaaaaatgcaaaaaaaaaagttagccgggcatggtggcgtgtgcctgtagtcccaggtacttggggggctgaggaaggagaattgcttgaacctaggagggagaggttgcagtgagctgagatcttgccactgcactccagcctgggtgacagagtgagactctgtctcaaaaaaaaaaaaaaagaatggtgaggtcaggtcttgcccctcccccacaaatatcaactgctttttttttttttttttttttttttaatagaaggttagacaagcagtttgtcctgagaggggcaagtgcagactgattttctgcttagggcatagcaaagctggaggacaaaaaaagaaaaaaaaatttaagaatttcaaaatgagacatcttgggaaaattagttagaactttcttgtactttcttacacttattttgtgatttagaattgcatatattttgaattacatttggaagggtacacactataatctttttagtcttggaatccctaaaggtcataatcaggttccaaccacatgctttgggagaactctgaaatattaaaccacaacagggaggctaatcatagaggctatcacacaatgggatcaaaatagaaacaaccttcatgtgtatctggctcaaaactgaagggcagagtaaatctatttcactacccatacttcattttcttttttcttttttttttttttttttttgagacggagtctcgctctgtcaccaggctggagtgcagtggcacgatcttggcttactgcaacctccgcctcccaggttccagcgattcttctacctcagcctgccaagtagctgggattacaagcgcccgccaccatgcccagctaatttttgtatttttagtagagacggggtttcaccatgttggccaggatgatctcgatctcctgatctggtgacccgcctgcctcagcctcccaaagtgctgggattacaggtgtgagccactgcaaccggccttccatacttcattttctattcagaaaagctcaattttgggttaaatgggcatgtcctgggataataagaaaaaataaaaccaatataaggaagggcatattgatttttggtttttttaaatgcatgcaggtgaggctgggtttgacagatgtgtcctcagttgtttgtttttgagacagagtctcactctgttacccagactggagtgcagtggtgcaatcttggcttactacagcctctgcctcctcggttcaagcgattctttattctcatgtctcagttgcccaggttgttaggattacacaagtgcacccacacgcccagctaatttttatatttttagtagtgacggggttttgccttgttggcctgactggtctcaaactcctggactcaagtgatccacctgcctcggcctcccaaagtactgggattacaggcaaagcaaataatggaacaacaaaagaacgaagacagggatttattgaaaacaaaagtacactccatagtggggaagcgaacccacgcagcagctcaagggcccagacacagaatcttctggggtccaaataccctctagaagtttcccattggccactttatgctctcttgatgtaactgaagtggtagcccacaatcagtctgagtggttgcagaaagcaaccaatcagaggccagggtgaagttaacaaaattatacttctatgcaaaggaagactctcccgccatcagtctgattggttgtggacagcaaccgttcagaggctggagtgaagttacaaagttgcaaacaaagactggaaggcgctcagtgtgatttgttgcagacagccaatttcccatctgccatgcagaaaaggtccaagggaacagcctctggttcttttgttacttaggcgtggaaagttggggttttcctttcaatttagttctaagaagtcacgtgaaacagccataggttccctgcctccagaccctattctcctgcctcatttactgcagtcttctctgcctgcctcttttagcgactagcatgagatgaggattcgtcttctaatatccgtcaccaatccttcccctctgtcatttagcgaaccactcactgggcactaggactttggggagagtcccaagaggcccctcttcgtccaggggctacttttttctcttccagcctccatctcctaactcaaggggtacagctcagattatgtttggcgcccagggacagtgacaaacccagggcccgtggatagaggaggcatctcactacgctgcacgaggccacctcgcagtaggcagcccagccctgccccaaaacccaagagcctaaccaggaagacagggggaggccgcgggcttcatctcccaagagatggactacacctcccagcaggctctgcgcgcgggctgaggatccctccgctctttttctgtcccgccggctgggccccccgcgaccagccaagggccaaggacaggtctttcagaatctgaggtacatcttcttatcacatttccggggagggactgctaggagctccggaggaaaaacggactttttttgaggagaaaagcggaggcagacggtggatgacaacacgtcccgcagctgcagattttcgcgcgctttggcgcaggtggttgtgggtagcgcgcctgggagggagaaagaagtcgggggccgtggcgcgcagcccgcggggcctgaagggatgttcgaggacaagccccacgctgagggggcggcggtggtcgccgcagccggggaggcgctacaggccctgtgccaggagctgaacctggacgaggggagcgcggccgaagccctggacgactttactgccatccgaggcaactacagcctagaggtgagcggcagcaggtggggcggccggaccctaccctcgccaggccccacccctgccccgccccttcctcggcctatggggtggtgggagtttccccacctaggagggtcgctgcgcagccaagcgccgaggggcgggaaaggtgggtgtagctcagccaatccacccatcattttgaggcgggaaactgaagctcaggaaaggagcggcctaggtcccgcgccgctcagaccccaggcttcctgaccacacttccctctaccccgccaagcgccacaaaagtcatggtgctgcccttaaatcagtaagaacaaatataatggtaaagtgaaaatgaactgcatgccaagacatcactgcccagagctttaaatggaccctcagttccgtctgaaccccttctgtgatccccatttcacgcaagaggaagcggagccctagacgggttaagctacaggcccaaggtcacacggttagagatggagccagacccagggtctgagccgtttaacctccaccctctgcttcaccagggtggagctgccggtcgctgtgcagcagtttgatcaaagccaatgtgcacacgaagctgatctcagccctacgtttcctcctccgtcagagcatcgtcctgatgctttgcatcagtgtctggctctgaataaaacaaatgtcagttataattacttgatttttttccccatcattcttgcattttatcctcgcaacagccctgtgaacatggcatggcaatgagtattagactgctttccaggtgataatggcaaggctca

SEQ ID NO: 2166 - DNA, 6000 bp, Homo sapiens
caggactctgattagcctggcttggagtcagctcccaccaaactacacgaaccaaataggattgttaaggatcttgaaaaggtggtttcccaaagggatgatgggcaaacaaaacccatgtcacaactacagacagaatcagaatcactggaggtgggaagattttttccatattttaaacaaactctccagatgtttctcacactgaaattcatgaaccattggcttaaaggctgtgcgctttctaaattcagatgcattttcagcacacttaaaatgtgtggcaaactaaaagcattttgcaacacttctctcacaataaacagcttctcaaagtacttcatttactccctcaggaatccaaagaaaataaccgagggtaagtaaatatgagaatttctttatgtcatcccagatgaatgttcctattctgccgtctcatcattctgcagctgtgagttttttcagcatcctatattgcctttctggccttttctttaggagttctttaggaccttcttactttgttttattcacaaattagaatcactgaggtgaggagtgaaatgttgggatagtctttaagcctctcaagttttaggatgagtctcacagttgaaagaccacactttttttcttttttttcttttcttttcttttttccttttttttccccccgagacagtctcaccctgccacccaggctggagtgcagtggtatgattttggctcacctcagtctctgccttctgggttcaaatgatcctcccacctcagcctcctgagtagctgggactacaggcacacaccacaacacctggctaattttgcattttttgtagagacagggttttgccatgtttcccaggctggtcttgaactcctgggctcaagcagtcctcccatctcagccttccaaagtgctgggattacaggtgctgcgattacaagctactgggattgcagttgctggaattacagagtgttaggattacaaagtgctgggattacaggattataggccaccacgtctggcctggaagatcacactttaaaaacttactctagcataccaagatgcctaaatggattctgaaaataaaagaatggattaaaagcatgagtaactcccaattttcttcccactgtaatgttctcccacaatgtttatgtaactctcaggccctacatttgaatcaatgacagagaagttattacatattatttttctttagaagatatctcttctaggcaggatcaaagctttatttcaaggattaactttagccaaaatttgaggaccacagaccacatcgaatatatgtgtctataatttaaccttctatgaacctggcattgtgcaagtccctgaggaattcctagaagaagagccagaaagaatcctttccttcagagcgaacagatacacacataaagaactgatgatagcacacataagattgaagtgacctctaagaagaagaaactttttaagtgctatgagaactcttacgaaagacatggtgaagaagcaaccaaggcttcctaggagacatgacactggagctggaccttgaaggattttgatgggcagagaagagttttggaaagggccttccagtttaagaaagtgacataagggtcgggtacagtggctcatgcctgtaatcccagcactttggaaggccgaggtgggtagatcgcttgagcctaggagttcaagaccagcctgggcaacatggcgagaccccatctttacaaaaacaaatttaaaaattagccaggtgtggtggcacatgcttgtggtcccagctattcgggtggctgaggcaggaggattgcttgagctcaggagttcaaggctgcagtgagctgtgtatggcaccactgcactccagcctgggtgacggagtgagaccctgtctaaaaaaaaaggacagtgacataagcaaaggtatagggttttcaaagtctgtgttttcttaggtaaaggtgaatggtctgaatggtctggatggtttgagcacagagtgtgtgatggggaagagatgaggccaaaaagttaagtcaggaccaggttatgaatagccttgaagtccacgctgaggcaatgggaacttgattcgataaaacctggggacttcaggggtggggggcaaggggagggagaccaataggacaaatacctaatgcgtgtgggcttaaaacctagatgacgggttgagaggtgcaacaaaccaccatggcacatggatacctatgtaacaaacctgcacattctgcacatgtatcctggaacttaaagtaaaattttaaaaatcggctgggtgcagtggctcacgcctgtaatcccagcactttgggaggccagggcgggcagatcacttgaggtcgggagttcgagaccagcctggctaacatggcgacaccctggctctactaaaaatacaaaaattagccgggcgtggtggcgggcacctgtaatcccagctactcaggagactgaagcaagggaattgattgaacccaggagacagaggttgcaatgagccaagatcacgccactgactccagcctgagtgacagagcaagacaccgtgtcaaaataataataataataataaaatttaaaaaataaataagtaaataaaagaaaatatggagcaataggaatcctactctgcttgttggcaaataaatggatacaaccaccttttttttttttttttgagacagggtctcacaaaaaggaaaaaaataaacctggggagttactgttatgaaatcaaagtcagtcttttgacaccctgaagagctgagtagagaggagaacctcttgtagattgcattggaatcagccattctcctcttgctctttgggatttccaggcacctggctgaggtgtggagaatgctgtcggtggagcttcccagcacgacctggattctgtggaggctcctgaggaagctgcagaaatgccataatgagcctgcacaggagaagatggcatatgtggctgtggctgtaagcccttgagctttgcccctctaatgtcagcccctcccaggatgactgaccccacaccccagtggagagtgttccttttggtccctctcaaagcctgcatctgtcatccatttataagtctacagtgtttctgccaagggattgacatggagggagctggggagagtgaaggagtcagaatgccttaatacaaactcgtccaacctgcctttttttgtttttgttgttctgttctgttttgttttaggcttttagaagcctgaagccatggtatttagtttctgtctctagtgataagcggaaaagaggtatgaggaaggggctttattgacccaaccagaaacagaaactaagaacccatgactgtcatctgtcccttggaaacatccctggtttaatatgtttaaaacattccttccctcatcctctaaaaaatatgtatcatcatagttaaagagaaatgcaaacttgtgggaaaaaaacctcaaatatcgtagaactgtataaaacaaagtgcagactagacgcggtggctcacgcctgtaatcccagcactttgggaggccaaggtgggtagatcacctgaggtcaggagttcaagaccagcctggccaatatggtgaaaccccatctctagtaaaatacaaaaattagccaggtgtagtggcgcccacctgtaatcccagctactcaagaggctgaggcaggagacttgcttgaacccgggaggcagaggttgcagtgagccgagatcacgctactgcactccagcctgggcaacagagtgagactccatctcaaaaaaaaaaaaaaaaaaaaaggccaggcacagtggctcttgcctgtaattccagcactctgggaggccgaggcgagccaatcacttgaggtcaggagtttgagaccagcctggccaacatgatgcaaccccgtctctacttaaaatacaaaaattagccaggcatggtggcggccgcctgtaatcccagctactcaggaggctaaggcaggagaattacttaaaccagggaggcagaggttgcagtgagccgagatcacgccactgcactccagcctgggtgacagagagagtctcaaaaaaaaaaaaaaaagaaagtgcagatctccctgagcagaagttggccaactttctataagagaccagatggtaaatatatagtctctgtcacatattctttggatttcttttaaacaatctttggattttggattttttaaaacaatccttttattaaaaaatgtaaaaaccattcttagctcatgtctgtaacaatctccctaaaaatgaattttccagaagtctttatacatatataaacttttggtatatctatttggtatacttttttcattttttccttttaaatactttattttttagagcagttttaagttcacagaaaaattcagcagaaagtacagcgttcccataaacctgcctccacacacacacagcctgccctactatcaacatttactttttactttattttctcccctaccagtttatggttcagctttctgtggtctaaattattgttatttttcttttttctttttttatttttttattttattttttttttgagacaaagtttcgctctgtcgcccaggctggagtgcagtggcgcgatctcgactcactgcaagctccgcctcccgggttcacgccattctcctgcctcagcctcccgtgtagctgggactacaggcgcgcgccaccatgcccggctaatttttgtatttttagtagagacggggtttcaccgtgttagccaggatggtctcgatctcctgacctcgtgatccgcccgtctcggcctcccaaagtgctgggattacaggcgtgagccaccgcgcccggccttttattttttattgatcattcttggatgtttctcgcagagggggatttggcagggtcataggacaatagtggagggaaggtcagcagattaacaagtgaacaaaggtctctggttttcctagggagaggaccctgcggccttccgcagtgtttgtgtccctgggtacttgagattagggagtggtgatgactcttaaccagcatgctgccttcaggatctgtttaacaaagcacatcttgcaccgcccttaatccattcaaccctgagtggactaagcacatgtttcagagagcacagggttgggggtaaggtcacagatcaacaggatcccaaggcagaagaatttttcttagtacagaacaaaatgaaaagtctcccatgtctacttctttctacacagacacggcaaccatccgatttctcaatcttttccccacctttcccccctttctattccacaaaaccgccattgtcatcctggcccgttctcaatgagctgttgggtacacctcccagacggggtggtggccgggcagaggggctcctcacttcccagtaggggtggccacctcccggacggggcagctggccgggcagggggctgaccaccctcctccctcctggagggggcggctggccgggcagaggggctcctcacttcccagtaggggcggccgggcagaggcgcccctcacctcccagacggggcggctggccgggcggggggccgaccccccgacctccctcccggacggggcggctggccgggcggggggccgacccccccacctccctcccggacggggcggctggccggcggggggctgacccccccacctccctcccggacggggcggctggccgggcggggggctgacccccccacctccctcccagacggggcagctggccgggcagaggggctcctcacttcccagtaggggcggctgggcagaggcgcccctcacctcccggacggggcggttggccgggcgtggggctgacccccccacctccctcccggacggggtggctgccgggcggagacgctcctcacttcccagacggggtggctgccttgcg

SEQ ID NO: 2167 - DNA, 6000 bp, Homo sapiens
gaaacgagatctagctgtgttatccaggctggtcctgaactcctagcctcaaactatcctttcaccttggcctcccaaagtgttgggattacaggattacatgtgagccactgaacccagccaacaggtgtatgtaatagtttaaggagacttggtatttaggttttgatttaacaaatttttttgtacagacgggggcggggggtctcactatgttgcccaggctggtctcgaactcctggctttacacaatccttccaccttgccctcccaaagtgctgggattattacaggtatgagtcactgcacctggtcccaaatctctttttgagacagagtcttgctctgtcacccaggctggagtgcagtggcacagtttgggctcacggcaacctcctcctcctgggttcaagtgattctcatgcctcatcctcctgagtagctgagactgcaggtttgtgccaccatgcccaggtaatttttgtatttttagtagatatggggtttcaccatgttggccaggctggtctcaaagtcctgacctcaaagtaatttgcctgccttggccttctaaagtgctgggattacgggcatgaccactgtgcccagcctgaatctcttttgatgacccatattttatgagatacaattcaaactctagcattcccagctttctcacttgaggtccaagcctttctaactctccagcccaaatgttagctttgtaacattgcatccactcaatttaaatggaatgtgtagaaccccttccatgagtacctaccagaagccaagctatagtaaaggtctgaagcttaaaatgtgcacaggctgtcctttctcttgagagagaaataaaatggtggaggaagtgtgatgaggacaagaatgataaggaggatgctctggaggtggagggggaagactccagccagaagggccatgtgattctacttatcatcaattagtgtttggtgtccaagctggtgctgagccctgagcatttaataaattgatttgacccttatcttcccaacacagggtcaggcctgggggttggggcaaattgtggaataaccaaatacctggagcctccctgtccaaggagggcgtgttcaggaaaagtttcccagcagagataaattctgtatgttactagtccagagtccagggaccactcccaggtgtggtttcactcgggacactgggaatcctctctccaggggatatctgttggtatgatgataactggagaggaaatgtgtggagatcatcagattccatctggcactagggtgatctccctgctgcctgactcacagcactgactccaggcttctttggctctggggcattggttaactggccccagttccaggttgcaagtgcactctgcagctgttccctgcctcttgctttgggcagataccttgcccaagctgtcaggtcctgcctctccctgaaatgggatgactaatgtgtggacctcaaaggataagagtgagggcagctgaagaattacagtagtaataatagctaacagtaatatagttctttttttgctgggcgcggtggctcacgcctgtaatcctagcactttgggaggccgaggtgggtggattgcctgagatcaggagtttgagaccagcctggggaacatggtgaaaccccgatctctattaaaatacaaaaaattagccaggcgtggcggagtgcttctgtaaccccagctactcgggaggctggggttattgagacggagtcttgctctgttgccaaggctggagtgcagtggcacgatctcagctcactgcaacctccgcctccaggttcaagtgattctcctgcctcagcctcctgagtagctggagttacaggtgcatgccgccacgcccggctaatattttatatttttagtagagatggggtttcaccatgttggccaagctggtctcaaactcctgaccttaggtgactcactcgcctcagcttcccaaactgctgggattacaggcatgagccactgtgcccggccaatatagctctcattatgtgccaggaactgtttttggtgctttacacatattaatttatttaatcctataattacctacaaagtatagtgattaagagcatagactctagaactagacaggccaggtttgaatccctgctctgccatttactagcactgtgaccttggggaagtctgtgcctcagttttcccatctgctaaaagaggataatcccagtatctacctcatagagttgttacaaggattaaatgagttacaatttataaacagaatgctggctggaaatattagctgggcatggcggcgtgctcctgtaaccccagttacttgggaggctgatagtttaaaaactatctaaaattttgataaatcccatttttccaggtgagaaaactgaggcacagaagagttaggtaattggctgggcatgatggctcatgcctgtaatcccagcactttgggagtctgagtcgggtagatcacctgaggtcagaagttcaagaccagcctggccaacatgatgaaaacccatctctacaaaaatacaaaaaatagccaggcatgctggcgcattcctgtagtcctagctactcgagaggctgaggtgggagaatcatttgaatccgggaagtgggggttgcagtgagccaagatcacaccactgcactccagtctgggcaataaagcaagacttggtctaaaaaaaaaaaaaaagttaagtaatttgcctaagataccgcaactgaatggtggagctgggactcaaaccccaggaagtttggctgtggaggctgtgctttcaatgaagtgggcatgtccacattaattactttataaggggagtgggcgggagaaaccctgaattaagtgatgtggaagcttctagcacttaagatgtgagttagtcttccttctgtggtaagtgaagtttgcagcagctggtggctggactgtccccaggtggccagcagcttctggaagggggctctgaggcctgaacaggggctaaaaggctggggtttgatttggtttcttcagcgtcctgtctcagagctcatttatcttcctctcagcactgctcccaggaagtccagtgtgacttgatccttggtacttggtaaatgtcaatctaatatagaaaacctttgctaaatctcaaggaaagacagtctcactgtctgtcgcccaggctggagtgcagtggcgggatgacaagggcttgagcccctcgaactcctgggctcaagcaatcctcctgcctctgcttcccaagtagctgggattacaggcattcaccaccacagccaggtaatttcttaattttttgtaaagacagggtctcactctgatccccaggctggtctcaaacttttggactgaatcagttctcccacctcggcctcccaaactgctaggattactggcatgagccactaaatctgggctaatctctgggagtttaaacccaaggtaaacaattcaatgcaacaaacctttgcctggggcttcttatgtcaggtcttctactgggccctggagatactggtgtgcattgagaggccacctggacctcaggatgctcccagttcaaagggggaaatgcagaagtctacaggcagattgtgggcagtggaccccaaattaaataggaatcagccacgtgggaggggcaggaagtgttcctgccctgggtaatggctcaggcaaaggcaaagaggccgtttcttttggccagggctgggtggtggtctggaagatcagataaatgtgattgtggagtaaggaatttaccctgagggagaggaggatggttttaaattctggaaagagctcacgcctgcaatcccagcactttgggaggacaaagcggcaggatctcttgagcccaggagtttctagaccagtctaggcaacagcaacatagcaagacacccccttctcttaaaaaaaaaaaaaaaagcgcagtggctcactcctgtaattccagcactttgggaggccgaggcgggcggatcacgaggtcaggagacctataccatcctggccaacatggtgaaacctcgtctctactaaaatactaaaaaaaaaaaaaaaaaaaaaaaaaaattgccgggcgtggtggtgtgcgcctgtagttccagctacttgggaggctgaggcgggggagtcgcttgaacccgggaggtggaggttgcagtgagtcaagatcgcgccactgcactccagcctggcgacaaagcgagacaccgtctcaaaaaaaaaaaaaaaaaaaatcagccgggtgtagtggcgagtgcctggtcttagctacccgtgagttgaggtaggaggatcgcttgagcctaggaggtggaggttgcagtgagctatgatcgcgaaactgcactccagcctgggcgacagagcaagaccctgcctctaagaaaaatgaacaacaaaaaataaagtctattaaggagggtctcttggaggcaggagaggaagcagggagaggcacaggtagggtgaggagccgctttagggtgcggctctagggacccagtagtggcttggactagcgtgggggattccgccctggcgctttccctggctggctctcccatgctcgcgcctcgctccccttcctcggtcttcgctatgtgggatactcctgggccgccccggactgacacgtgagccaggcctcggtcacatcccggcccgctccacaactccgaagtagcggccgccgcccctgtcctgcagccggccctggagggtctgggcaggtgccgccccgcaggccccgccccgccccgccccctggctccgcccctcactcaggcccctcccccggcgcccgcgcgccaggactgggcggcgccgacgcgcttggcgggagatagaaaagtgcttcaacccgcgccggcggcgactgcagttcctgcgagcgaggagcgcgggacctgctgacacgctgacgccttcgagcgcggcccggggcccggagcggccggagcagcccgggtcctgaccccggcccggctcccgctccgggctctgccggcgggcgggcgagcgcggcgcggtccgggccggggggatgtctcggcggacgcgctggtgagacgagccgggagggcttgggcccctccccctccctttaactcacccctcccccacccagatacccccgaccctccccaggctcccaccaagctggggtgtgtgtgtgtgttgggggtggggtgtttccgcggaaatgctgcgtcctgggccctctgaggcaggggcgcgcgtaaagctggggggctcttgggcgtccctcgcggctccccaggcctgttgggcctcggagctgggacgggcgggtctcttgggacccgggccaagccgtgcatgatgtcattttgtctcccgcctaattgcgggatgggggtgggccggccggtgtcagctggcagggccttcgccggcgagggaggcgacccctgggagcgagagggagtcttcaagtcccagccagtgggagaccgagcctgggaggcacttgttgcagcctagttttgggtcaacttggtgggtgggctttgctccttaacattccggggagcacagagtcccccaagccctctcccctggactgagaagggtgctgagttgggggctcttttgtctctcccacctgggttccgcgccccagcttggttcggtttgagacctctcttcctgttcccacgaggagttttgggcagctggggttgaaggtgcgggggagagagagagtccctggggcaaaggcaggaactgcggtctccattttacttatttccccagagacttaagtggcagagctgagcccggagccaggtctgtggctccagatccctgtcttacacctgtgcgcctggggcctgagctccaagcttttcagcctgcctgggagacaggacagtggggtcctgacctcttccctgcctggatc

SEQ ID NO: 2168 - DNA, 6000 bp, Homo sapiens
tcacgcctgtaatcccagcactttgggagcccgaggcaggcgggtcacctgaggtcaggagttcaaggccagcctggccaacatggtgaaaccccatctctactaaaagtacaaaaattagccgggcatggtggtgcactcctgtagtcctagctactctactcgggaggctgaggcaggagaattgcctaaacccaggaggcagaggtttcagtgagccgagatcacgccactgcactccaacctgggcgacagagcaatactctgtctcaaaaaatatatatatcagtttctcttcactcctcgattttttttttaaggtgcttaaattctggtttctaggtgcccaacctagaatagaaaccagaatttaagccttatttgggttgagcacagtagctcatacctgtaatcccaacactttgggagactgagtgggtggatcagttgaggccaggagttcaaaaccagcctggccaacatggcaaaaccccatctctactaaaaatacaaaaatcagctgggtgtgttggcacgtgcctgtaatcccagctattcaaggctgaagcagaagaatagcttgaacccaggaggtggaggttgcggtgagccaagatcatgccactgcactctagtctgaacaacagagcgagacgtcatctcaataaataaataaacagccaggcacggtggctcacacctgtaatcccagcactttgggagcccgaggtgggcagatcacctgaggtcgggagttcaagaccagcctgaccaacatggagaaatcccatctctactaaaaatacaaaattagccgggcgtggtggcgcatgcctgtagtgccagctacttgggaggctgaggcaggagaatcgcttgaacccaggaggcggaggttgtgatgaagcaagatcatgccattgcactccagcctgggcaacaagagtgaaactccgtctcaatcgatcaatcaatcaatcaatcaataaaccaaccaaccttatttgtaactccaaaaccgaattcttaaccatgatgctattatgcgtccgagagtacatgaggtgtcccgatttttgttttattatggtcaccataataattacagacgttataagccacctccgatcattttttaaaaagaggaagctctaaaataatagttatcagtcccaccagttgcccggggtgctttgttgtgagaagggggtggggattgggagtatactaagtctctgggaattgggtcccatggtctgccctcggggttggcttagctttctctgaagagattagtgagccctctaagtccaccacgcttggagacaaggacttttggtaagaactgctcaagggccaagagtatgctctgggaccaaatgagaaaagccccttacccgaggctaattttcttacaacttcattccttacagtatgcagctgacccccaggataagcactggctggctgagcagcatcacatgcgggcaacagggggcaagatggtaagcattattcatttgtgccactgccagtgacccaccccacctgggaaccaggattttggctgtgggtgacagcctacctccaaatctgacttccaaagcctcaccaatgtgtgagaagagagacttataaggcctatttcttcatgctgaagagcaaattgtaatcttcaggttcccttccctatccctaggtctcccttccgccccctcacacttttacctcatgcctccaagatcacatatttggatactattagctgtccataggaatagcaggtataagacacacagtactactttttcccactactgcacccactgacagatttcactcattgatcactcttccaccagacacagctatagaatcttttctcaacacagtacttgaggcagcaacccttgtcagtaggagttagcaatgaaatgtgtttgcacacttggcagccccttccagatttacctctacttgaagagttctcagatcatatgaaacagcaaccttaggaaaatcatcattgcatgtgttcaaaaactattgttgagggctttgtccatcacacacaatgtcccccacctgaggactcactcactcccaccacaggtactgctccttttagaatctaagtgccttacaaactgatatgccatctcctttctggcagtgagagctaccttttattttattttactactctatttatgcctatgctttacttcaaaaaagatttcaggtaagcttcatgcacataaaatgcaacattacataaataagaaatagatggtagggggtgggggcaggacctaaaattaagccaccagtaaaagtagttctttaaaaaaaaaaagtgttttttatattgctgacctgggagacctgtgcacttctacagatgttggcaaattcagctgtaggccccactcatggacacctgatctgttatggttcatagtgcccataagatgtagacaaattactcaaggaatacacaattattcctgaccctaacattagaaagtctcccacagaagactttctaatatgatgaatatctcttcctatatgttaagttcacaaaagggccctcacccactgtagaccgaggcattgtgacaaagcatttctacaggccccagtacaatacaggccaattactagacagcagagcagtttatcatgttttccattttgccacaaagttcaaaaccaagttatctttgtcctcagagggagcacatggtttcctcttcctgatttcctgtttccatatatattttgctggctttcttgccattttgttataacccaccttgggtcctttcgtatacttgatcttaaccaaaaggtgtaggagcaatggtggatccctttttttttctttttttcttttttttttttttttcttaattttcaccacaccattcaagagagaaatgggtccttttttaaaagagaaggctataaataagtcaccagtccctactctcccatccatgaagcatctactgtagtaaaagattgtctcaaggaaccattcccatccctccccacttactcttccgtactaaattgtaaaccgcatcccccgcttccacctagtagcaggccttacattaaacagatgtttaatgaagtgttactgagttggagtgaaatgaatcaggcaatgaccactctcccttgctcctgcctcaggcctacctcctcatcgaggaggacatccgggaccttgcggccagtgatgattacaggtaaaaccagtgggtctcctgccccttctcctctccctgcctccaaatagcccctagaatgaggcagggcctacatcctcacttcccccaacttctctcttcaatgtctgttccagaggatgcctggatctgaagctagaggaattgaaatcctttgtcctaccctcctggatggtggagaagatgagaaagtatatggagacactacggacagagaatgagcatcgtgctgttgaagcacctccacagacctgaggccgggtcccctggccacacttggcagccctcctccaaagccctcttcctcacgtggctgaggccaccgctgggactgctcctagatggatctcagcggcattaagctgtgcctgagcgagtttgtagtgactcactgcacagcacccccagactagcatgtggttctatatttgtaaagttattgggataagaaacaattaaacagtttgtagtaaacacagatggtgaacctgctgtgccctctaccttgtgggaattgacagaacatcaagggctctagaagtgggtgtaggaaaaaaggacgagataaccctcacccataacagtatagagccaggcttgataagaccaacctgggagcaccatgtaccctgcccgtcttccctttgcccatttgtagtttccttacccagctaatgtaaggacatggcagaatgcgatggagtttgatgacagatcatatgaaaaatagagttggcttttattgctcccattttacaggttaagatactaaaggacccgccccaaggttacacactacccactggggaggtaggatatacaggatatgaacctgtgttgttggggtttttgtttgtttgaagacagtcttgctctgttgcccaggctagagtgcagcctctggctcaagcgattctcccgcctcagcctcgccagtagctgggactacaggctcgtgccacctcaccagccttttttttttttcttttctttttttttttttttcttttaagtagagacaggtctccctatcctgttgctcaggctggtctcgaactcctgggttcaagtgatcctcctgcctgggccttccaaagtgttcgggattacggacgtgagccactgcgaccagcctgaaccaatgttgcctttttttatttctgtcatctctgcggagatgtatggacctatgttttctaatagggagcctgctgctctggccatcagcctttagtttttcccctcgctgggattttcagatacttaggacgcagcaaaggtgcccaggcgattataatggtgggagggtaccagtgctgcaggattggaggcactccctgcccgagggaaattggatcaaggctgggcgtgccgagtgttcccacgcggagtaagacgtgtagccagaaggaggggttcatcccacgtggacgttttcttggccctttaatggttagcgttttccaacggccaccaattcgctacggattcgttagttaatggcagcatcatctaccaatcggttgtcagaagcgggattctgccgcccaatagcggtgcgccagtgggtaggtctagcagtggcgcagcaatagagcgctccggagcgtctcattggctggatcaaacccaagcgagccattgattggtcgacgcccccagagggttacaattcaaacgcgggcgggcgggcccgcagtcctgcagttgcagtcgtgttctccgagttcctgtctctctgccaacgccgcccggatggcttcccaaaaccgcgacccagccgccactagcgtcgccgccgcccgtaaaggagctgagccgagcgggggcgccgcccggggtccggtgggcaaaaggtgagtgatgcggcctaccactcgccgggcctgccatgccctaggcattggtacccagagcaaagatttctaggaccaccccccgccgccacctcctggagcgggagatctgcgggtgcaggagaacacaccaggagctcggggcctggcattcccctgggcatgggtgtcgagggcggagacttccgggactcccacctccttgcgcgggtgagattcgagagatgggggacaggccaggagctcagaccgctctttgagactctcccgaaggagaatgggagggtaggggcgctgccagactccttccctggtgggcctagatgaagacgctcaaggaccctcgtgacttggccgagacaggggaagggagaagttgagtcgggcaaggaagagatgctaaagcctggggaattaagaacatgccagaatcatcccgagggagtctggaattagggagggtgaggactcgctaggatcgtcctgtggatctggtgagtataccctgagctgagcctgaccttggtgatgtggggagcctccatgacggctccccctgagattcaggtgggagaagatgcaccgtctggaggcctggcccatccagactcccaggtaaccccgaatactcttttttcaggctacagcaggagctgatgaccctcatggtgagtgattaagtgcccagaaccccagccttccatccaattttcagtagcctccttttttccgtcagcttttttgctagacataggggtaatgtaatttgctccctcctgggaaagaagttcatacaccccacctacaccatttcttccagcagtccctcctcccaattccatccccccacacgaagttatctcgaacacttccctgaagtcata

SEQ ID NO: 2169 - DNA, 6000 bp, Homo sapiens
tttctaggtgcccaacctagaatagaaaccagaatttaagccttatttgggttgagcacagtagctcatacctgtaatcccaacactttgggagactgagtgggtggatcagttgaggccaggagttcaaaaccagcctggccaacatggcaaaaccccatctctactaaaaatacaaaaatcagctgggtgtgttggcacgtgcctgtaatcccagctattcaaggctgaagcagaagaatagcttgaacccaggaggtggaggttgcggtgagccaagatcatgccactgcactctagtctgaacaacagagcgagacgtcatctcaataaataaataaacagccaggcacggtggctcacacctgtaatcccagcactttgggagcccgaggtgggcagatcacctgaggtcgggagttcaagaccagcctgaccaacatggagaaatcccatctctactaaaaatacaaaattagccgggcgtggtggcgcatgcctgtagtgccagctacttgggaggctgaggcaggagaatcgcttgaacccaggaggcggaggttgtgatgaagcaagatcatgccattgcactccagcctgggcaacaagagtgaaactccgtctcaatcgatcaatcaatcaatcaatcaataaaccaaccaaccttatttgtaactccaaaaccgaattcttaaccatgatgctattatgcgtccgagagtacatgaggtgtcccgatttttgttttattatggtcaccataataattacagacgttataagccacctccgatcattttttaaaaagaggaagctctaaaataatagttatcagtcccaccagttgcccggggtgctttgttgtgagaagggggtggggattgggagtatactaagtctctgggaattgggtcccatggtctgccctcggggttggcttagctttctctgaagagattagtgagccctctaagtccaccacgcttggagacaaggacttttggtaagaactgctcaagggccaagagtatgctctgggaccaaatgagaaaagccccttacccgaggctaattttcttacaacttcattccttacagtatgcagctgacccccaggataagcactggctggctgagcagcatcacatgcgggcaacagggggcaagatggtaagcattattcatttgtgccactgccagtgacccaccccacctgggaaccaggattttggctgtgggtgacagcctacctccaaatctgacttccaaagcctcaccaatgtgtgagaagagagacttataaggcctatttcttcatgctgaagagcaaattgtaatcttcaggttcccttccctatccctaggtctcccttccgccccctcacacttttacctcatgcctccaagatcacatatttggatactattagctgtccataggaatagcaggtataagacacacagtactactttttcccactactgcacccactgacagatttcactcattgatcactcttccaccagacacagctatagaatcttttctcaacacagtacttgaggcagcaacccttgtcagtaggagttagcaatgaaatgtgtttgcacacttggcagccccttccagatttacctctacttgaagagttctcagatcatatgaaacagcaaccttaggaaaatcatcattgcatgtgttcaaaaactattgttgagggctttgtccatcacacacaatgtcccccacctgaggactcactcactcccaccacaggtactgctccttttagaatctaagtgccttacaaactgatatgccatctcctttctggcagtgagagctaccttttattttattttactactctatttatgcctatgctttacttcaaaaaagatttcaggtaagcttcatgcacataaaatgcaacattacataaataagaaatagatggtagggggtgggggcaggacctaaaattaagccaccagtaaaagtagttctttaaaaaaaaaaagtgttttttatattgctgacctgggagacctgtgcacttctacagatgttggcaaattcagctgtaggccccactcatggacacctgatctgttatggttcatagtgcccataagatgtagacaaattactcaaggaatacacaattattcctgaccctaacattagaaagtctcccacagaagactttctaatatgatgaatatctcttcctatatgttaagttcacaaaagggccctcacccactgtagaccgaggcattgtgacaaagcatttctacaggccccagtacaatacaggccaattactagacagcagagcagtttatcatgttttccattttgccacaaagttcaaaaccaagttatctttgtcctcagagggagcacatggtttcctcttcctgatttcctgtttccatatatattttgctggctttcttgccattttgttataacccaccttgggtcctttcgtatacttgatcttaaccaaaaggtgtaggagcaatggtggatccctttttttttctttttttcttttttttttttttttcttaattttcaccacaccattcaagagagaaatgggtccttttttaaaagagaaggctataaataagtcaccagtccctactctcccatccatgaagcatctactgtagtaaaagattgtctcaaggaaccattcccatccctccccacttactcttccgtactaaattgtaaaccgcatcccccgcttccacctagtagcaggccttacattaaacagatgtttaatgaagtgttactgagttggagtgaaatgaatcaggcaatgaccactctcccttgctcctgcctcaggcctacctcctcatcgaggaggacatccgggaccttgcggccagtgatgattacaggtaaaaccagtgggtctcctgccccttctcctctccctgcctccaaatagcccctagaatgaggcagggcctacatcctcacttcccccaacttctctcttcaatgtctgttccagaggatgcctggatctgaagctagaggaattgaaatcctttgtcctaccctcctggatggtggagaagatgagaaagtatatggagacactacggacagagaatgagcatcgtgctgttgaagcacctccacagacctgaggccgggtcccctggccacacttggcagccctcctccaaagccctcttcctcacgtggctgaggccaccgctgggactgctcctagatggatctcagcggcattaagctgtgcctgagcgagtttgtagtgactcactgcacagcacccccagactagcatgtggttctatatttgtaaagttattgggataagaaacaattaaacagtttgtagtaaacacagatggtgaacctgctgtgccctctaccttgtgggaattgacagaacatcaagggctctagaagtgggtgtaggaaaaaaggacgagataaccctcacccataacagtatagagccaggcttgataagaccaacctgggagcaccatgtaccctgcccgtcttccctttgcccatttgtagtttccttacccagctaatgtaaggacatggcagaatgcgatggagtttgatgacagatcatatgaaaaatagagttggcttttattgctcccattttacaggttaagatactaaaggacccgccccaaggttacacactacccactggggaggtaggatatacaggatatgaacctgtgttgttggggtttttgtttgtttgaagacagtcttgctctgttgcccaggctagagtgcagcctctggctcaagcgattctcccgcctcagcctcgccagtagctgggactacaggctcgtgccacctcaccagccttttttttttttcttttctttttttttttttttcttttaagtagagacaggtctccctatcctgttgctcaggctggtctcgaactcctgggttcaagtgatcctcctgcctgggccttccaaagtgttcgggattacggacgtgagccactgcgaccagcctgaaccaatgttgcctttttttatttctgtcatctctgcggagatgtatggacctatgttttctaatagggagcctgctgctctggccatcagcctttagtttttcccctcgctgggattttcagatacttaggacgcagcaaaggtgcccaggcgattataatggtgggagggtaccagtgctgcaggattggaggcactccctgcccgagggaaattggatcaaggctgggcgtgccgagtgttcccacgcggagtaagacgtgtagccagaaggaggggttcatcccacgtggacgttttcttggccctttaatggttagcgttttccaacggccaccaattcgctacggattcgttagttaatggcagcatcatctaccaatcggttgtcagaagcgggattctgccgcccaatagcggtgcgccagtgggtaggtctagcagtggcgcagcaatagagcgctccggagcgtctcattggctggatcaaacccaagcgagccattgattggtcgacgcccccagagggttacaattcaaacgcgggcgggcgggcccgcagtcctgcagttgcagtcgtgttctccgagttcctgtctctctgccaacgccgcccggatggcttcccaaaaccgcgacccagccgccactagcgtcgccgccgcccgtaaaggagctgagccgagcgggggcgccgcccggggtccggtgggcaaaaggtgagtgatgcggcctaccactcgccgggcctgccatgccctaggcattggtacccagagcaaagatttctaggaccaccccccgccgccacctcctggagcgggagatctgcgggtgcaggagaacacaccaggagctcggggcctggcattcccctgggcatgggtgtcgagggcggagacttccgggactcccacctccttgcgcgggtgagattcgagagatgggggacaggccaggagctcagaccgctctttgagactctcccgaaggagaatgggagggtaggggcgctgccagactccttccctggtgggcctagatgaagacgctcaaggaccctcgtgacttggccgagacaggggaagggagaagttgagtcgggcaaggaagagatgctaaagcctggggaattaagaacatgccagaatcatcccgagggagtctggaattagggagggtgaggactcgctaggatcgtcctgtggatctggtgagtataccctgagctgagcctgaccttggtgatgtggggagcctccatgacggctccccctgagattcaggtgggagaagatgcaccgtctggaggcctggcccatccagactcccaggtaaccccgaatactcttttttcaggctacagcaggagctgatgaccctcatggtgagtgattaagtgcccagaaccccagccttccatccaattttcagtagcctccttttttccgtcagcttttttgctagacataggggtaatgtaatttgctccctcctgggaaagaagttcatacaccccacctacaccatttcttccagcagtccctcctcccaattccatccccccacacgaagttatctcgaacacttccctgaagtcatacaagaccctccctatccagtgtgtccctacttcctagccccaaccaagctttacccacacccaactccccgcccttcttggtatttctagcctatgaatttggttgctttattttggatcagagtgatgagattaaggggaggctgggcgcggtagctcacaccttataatcccaacactttggggggctaaggtgggcggatcacttgaggtcaggagttcgagaccagcctggccaacattgcaaaaccctgtctctactaaaaatacaaaaattatccaggcatggtggtgcatgcctgtaatttcagctactcgggaggctgaggcacaag

SEQ ID NO: 2170 - DNA, 6000 bp, Homo sapiens
tagctgctgtgcccaccatctccaggggagtttatggttccctctccatgagtctgacttctcagctcgaccctgagttccttggaggcaagcactctgtcgcgttcatgtctgtttctttgtctgatccatggtaggtgctccaggaacgtttgttggagcagtctgtccatggaaggtgcagtgctcaacggcaggaatcaatcacagtgtcattctttcgttgttgttttcctttatctccatgcacaatgttatacatacagttggggctcattacatacatgctacattaatgaattatattatgacagtaggtaataaaaataattagacagcaataatgacaataatatgtaacacttagggcatccttactctccgttgggcactatcctaagtgctttgtatatgaattaaaacaattcattgtcttattatgctcattttacggatgagaagacagaggctcaaagaagttaagaacttgcctaaggtcacatagttagaaaatggcagaggcaggactcaactgtatgtatctggcttgagtcatgctcttaatgattgctcttggcctctctgagggatgtctactgagaggttacccggtgtgaaaacaaaaagaagcatttatttattacacatttccattttatttcaaggaactcctttcaaaggctttggtaggcaacattatttgctaaatgaaacccagtaatatctgtaccagacttgatggtttgcagagcagtttcatgtatggttcctcatctgagccctgcaacaatctggtgaggtaggcattgctgtctacttctgtttatagaggaacagaggagaaatctgaggctctgagtggttaagtgaacagggtcaaggtcacccagacagcaaggagcagagcaacgactcaaataaatgtctatcagtttaaaaaacaaagatctgatgcctccaaatatgaagttatttcatgcaacttaaaatcaaataagtaaatagcagcttagccagtttctggcacctggtaggtctcataaatgttaactatcaactatcttcatcaacacctcctgggaagtggaatagtttggctgatgactgcagcctgtctgttgaccctgatggaaagattattattttcattccagttcatccctggtaatgttgaaataatgatcaatctccattatccctggagtaccatagaatgttatgagctggaaggggttgtggagatgatctcatcaggtcctgcatttacagatggagaaattgagtccgagagaggggtcagaaagcaaacccgtggcagaccaagccaagggcaaggcttaggcaccgtgcctggcacatactgcctcctgcaaagctgagtttttacctaaaagggctctcacgtcctaaaggctacagaaaacaattcattcgtctctctgtctgtgagcaccaccaccccagctccgcgcaaaaagcagtacagtattataagctattaaccagaaaacagatcatgtgacttaattccacctctgctaaagggcttaaaatgcttcagtgagtagtctgatattcgtaaatatacacttcaactatttctcaaagaatgattaaccagctccatcagaattggaacttgtgcaatcaaggagaaaaagagctggcaagagaaatttattgaaaaaatttttaccagcattacagatgacttcttgccaccttttttttttttcctaagagttagaggaagaaggaaaggaagaagaatcattacacaataatgaattaagaaaactaattgtggaaaattacaaactcctttcacctcacaaggtagctttcaaacaaacacaacagggtatttgtagaacctaaagacacagacagtattgaaaaggagcagaaagcaggagtgtaaccttcactaacttctttcagagagtggagaggcctgacagtgtatgggcgtgattatctctggtagcccattctggactaacgattctgtgaacctataatttagagagtccataatgtcatatgttcaccttacttatctccctaacccactgagtattaattctcccaggcaggggactagctttttaggccacttgtaagtcttgatcagctttagcttgaggatttgggggtggggagggatgatggacagaaataaggttagggttagccttcaaatggaagaaacgggaatataaaatcctcgtctgtgctgatcatgcttctcaagaaaggctgaaattcaggcccagtgaacacacttgtggccttaacatctctcagaatgaaaggattttcttccttcacaatacctttatcaaattccaactattttctacttttcttccttatacaacccaggcgcacgggttgaaataattttccttaagaaatccaggaagctctggcctggccctccctctagaaaggaaagtccaagtaaagagggatgccacacctggggaagggagagaggatgtgacgacacctccaggaatgcagggcccacgcaggtgcactggcacccacgaacttcctgataaatcagtaccgataacaggagtaaaactcaaccacccaacactcactcacacagagctggggtgctgctcccagggtgtggccttgccaatcagggagaggaggaggagacctaagaacggagctctctaaaggtggtgacatggtatctagtccagccatgatcagagtgtggtctctgggagtccctgagacccctttacgggggtctctgcaaggccaaaactgctttcacaaaactaagatgtcatttgttctcatcattcccattgtctcacgagtatacaatggagttttccagaagggacaagacatgtgatgacatcatcactctgatgactgttggaatgcatgcttgtgtactcccatgttttggacacatccgttttaattctaagataaatattgaaagacattacacataaacaaagtactttggggtcctccatgatttttaatagtgtaaaggggtcttgaaaacaaaaaggttgggaactgctgtgctagtccaaacaggggagttacaggccctgacatgcactttatttccggctgaacttgagtcacctcctatgtgctttcaaacagggggtggaggcagcttgcttatttattatacagcttggattggtgtcctttccacctgtgctgccacaggtggccagaaaaaccttaaatcctcccacaaaacgtctggttacctgaatcctccagagggaaaaaaatgagcttctcgcctttgaacccaagtggggcaaagagcctgcagaagggacaccctcagtggcagcacccagcaaagacccatctgagtacccgctgggagtcgggttctgtgccactcaatgccagcaaagcacaagccgtccctgcgccttcgggagctttcattctaggctggtggcagattactcacaaaactcagatgcacacaaaaatgggaaacctgtaacttgtaacaagtgctgggcaacaggggtacaagtgttaggaggcctccgaggtgggcagggagatgaggggaggaaggtaccctaaccactcttcttgccaaatctcaggttggaccttcccctccacctccattcccctgcccccttcctggcttgcaggtttcaacagctcttggattcccgggtcccacagggagaccttgggacctgggaatctcctccagccaaaagcttcagtcttctcctctcctccccatgacccacagggtctgtgtgaagagaggccgggctctgggacgttcagagaggaggattcagcgttttgttgctctgggacacagcttggtcactccgggaaacgaacacaacctagaggctgtcatttgtagaaacagcgaatggccaaggaatggcgggaggagggaaaaggaagacttttaaagaaaaaaaaaaaaagccctgaaagactggactagaaatcctcagggaggctgggcctgcaaggagccttcccgcgcctcagcccactttccttccctctcgacctgacggacttaaggcgtgcagagtctcttcggacaaaatgaagccaagagagccctaagcttctcccccagcaaccgctgcagaggcgggaaaacttgaattttgcaaccaagagttgcagcgggacgcctaagcaacgataaggggcggtggaggggcgtcgttgggggctgcagcatcccaaagtggaagcgggaagggggcccggctggaaccgaatagccccgcagcgcctcggcaaccggacgggcggcgcatccaatcccctggaccgtgcgtgtgactggcgcgcgctaagcggcgcgagccccggcggagccgggcaaccaggcgcgcgctcgcgcgtgcgcaaaaggcccacccagccgagcccttcttcaggtgcgctcgcgcttccggccggcctccccgcgtgccttcccggggcggaaactccagcacccgcgcatgcgccttctggctctccggcctgaagcggggcggagggccatggcttcaggtgatcccgcccctccctcgtagcgcaggaccaatcgtgcggtggtaggcggggttttgaggaggcagcccgcccacgcaccgcgcgaggcgtgtatcgattggttggcgccgcgggcgcaggtgcgcgctttctattgggtgtgggcggaacgcgagggattgcggcatcttcgggggctgcaggtgagcgcgcgcacgcgccgcggctgtggtccgctcgggtgcgcgcgcgcgggctcgcgggggaggcggcagagggagaggttgcggcgcttgtggcctccgctccgccccctcctctcctccagcgctgtcgccgtcgccgccggggcccggagggagggagctgcttccccgcctgccgcgccaccagtccgaccctcggtcccgccgtgtgagcagctggtggagtggagctcagcgcggacgccggagctgcggccgccccctctgcaggtgcctgtgaggaggcgcccgggccgcaaccgctttccgagatccccagtcgcgcactcgctccccgcgctcctgaggggccgcccggccggaggaggccgtcgcggggctcggcgttcagcatgaaccgcagccaccggcacggggcgggcagcggctgcctgggcactatggaggtgaagagcaaggtgcgcggggcccgggctgggcggagcggcgggcctggggggccggggcctgggagaggccgggccaggctcggagcgccgggggaggcgacgggctgagctgccccggggtctggacggtgcggtcgggagactgtgggtaataaacttgccgaggagggggtggcgggggtcagggggcgctagtgtccgcccctggcccgggcaggaagaagacctagtccagcatttaatctcattccgtaaatctcattcccgtgttcacggacgggagtaggggccaaggtatatccaaggatggcgcacactgagtgaaatgcgaggctgctcaaaaggtgtaggagaatcctgcctgctgggctgtgagtaaagggccctggaccaccccgttgttcccactttctgtggttaaggggcgcatcgagtggcgaaggagagagcccagtgaactaaacagccctttaaaagttcgctttgcttcctgctggcgctctttctagcactaactttggtatgcatttaatctgtaaaattagtactatcaccttacgttggagtagcactttacagtttgactctagatgctcttttcattccatcctgctacctactcacatcaagtgcttttccccttgaccaacggtatgccaatctgctgataattacttcggtattcactgaatttctaaatctcaaggctcagtgagcagggtagtctgtagggagggattagttagggaatgccttccaaagggggttttgagctggaatttgaaggtgatcggcagcca

SEQ ID NO: 2171 - DNA, 6000 bp, Homo sapiens
taaaattctagatccaaactggaaagatgctcaccagtgtcaacctcctatttcttggagccgcgtgacacctaacactttacaaaactgtgtattttgcccatgctattcaaagttcaccacgctgtgaggccacatgggttgctggaaggttaggctccaatagacaaagtcatttccccaggttcttgcctccagagtttactactttatctacaactacagaaactcaaaaaatagcagttctgtagttaaattatccatttttttccattccaaattttaatatttttagggttgagatatattagcagctctgatgctcgttaagttagctacattgttaacatgaatgctagtgaaatgtttttgaaataaagttatttaaaaaaaactggtttatcaagaatatgcatttaaaatttataaataacttgacaaatcaaataatatgttgattagtagaggaaaaattaacactatggatgaacaagaaaataaaaatgaccttgaattttaccacccagagataataactgttaacgtatcggtataaattcttagggatccttccccgtgcacggctgttttatttttcaaaacagtaatagagcaatgctgtgtaacatgttgtgactcacttgttcacttaatcaagcagaacaaaagtgtatcttggctaataaatattcatctatataattatgttatagtattcacttttatggatatttaaaaatttacagctaattccatgttgttggcattgcagtttgtccattttatttccccaggagaaatgctcacaattggcactgccaagtcaaagggtattaacatgtttggtaattcaatattttattgagtgctttctattattagccaggtaggctccaggatatactgctgaataatacaaggtcctgatccttactcaacttgtagtcttttttgacaagggggcagcagtaggtgggaagtgtggaggtaaggatcccatgggaaacagcccaaatgataaaggaaatttcaaaacaactgttataaaacaaatgggatcgctatggcagggtaaccgggaaaatgcacgaaagggtcggattattttaggaggagttaagagaactcagatgacatttgatgtaaaatctgaaggaagtcagtaatatgtctgacagagtgttccagataatgtgtacaaagaccctcaggccagaaccagcttaaggtcttcataatctgaactttgctttaccccttacttactgagctacttcctgaactcatgctgaactacttacttactgaagtacccggctcatactaggtactgaaacaaaacaagaataatcttgaaaaattctgccatatgaaaatatctaaaaccttgccatgggacgtatggatttgtgttcacaatctaccgagtttgatgagatgcaggagctgctccgagggtgcacacacagactgaggcttgatttcattgatgaggccattggcgatgctgatgtagccgtcatatagcagctggctaatgatcagcttgtagagctgctggcggtccttcaagcccactttggttctgtacatcttggagaaaaggaagacagtttccctgccagctgcaaaaacggaaaatggacggtgaagggtacaggctctagtaaatcacagaagcaacataggactctttggtcagacttaatcttgcaggactcaaatcccatctctactagctgcattatctttggtcagtgacctcatttctctaagcctgaggttcttcagctgttaagttactggaagttaaacacggtggtgcatataaagccctgagcacagtgcctggcatacagaaattgttcaagtcatgttagccagtgtttacggtacaatctctcaccaacttttcttctccaccaaactagctacctatgatttttgttctttattgttatcccagaatcttccattacttctgttaattaaacattgactggtacctgcaatatgcaagatagctgctattttgtcaagatctagactgctggttccactagctgagctgtatgtttactaatcttttatgctcattctcaaaacctgttttaaggcaactgagcttgttactgtaattatataatctaattagacagtaaatcaaaatatgaagcaaaaaaaagcaactgtactacaaaaactccaaccgagttaaatgcgttagaaaggctcaaaggtgagctgcccaataaaatattgccaatcaaggtcaaaacaataaaaatgaaaaaaaaaacagtaataatcgggaaggattgtgcatgcactgacttacaagtgtctaagttttccttcagtcttaagagacaaaaaactgtaaatggtttctggcttattcaaaaaagaactccaactgttcaacatgataatttgcttaccaaaaatcaatgcctttatgtatgtgtatgtttggaccaagattaaaaggctacaggtgtctggggacagcaataaagaataaaagtgacctcagagcctgatttcttttttctttttgagacggagtctcgctctgtcgcccaggcttgagggcagtggcgcgatctcggctcactgcaacctccgcctcctgggttcaagctattctcctgtctcagcctcccgagtagctaagactacaggcgcccgccaccacaccaggctaatttttgtatttttagtagagacggggtttcaccatattggccaggctggtctcgaaactcctgacctcaggtgatctgcctgcctccgcctcccaaagtgctgggattacgggcgcgagccactgcgcctggcccagagcctgatttcttacacactgtatgacactgatggtgttaataataaccaataacattaagcacttcctgcatgccagataccgtcatgctaagtactttgtaagcatcagttcactgaataaaatcattcaatgtattcaagtatatgaagtagtacatgaacatagtaggtctatgcttgagtagaaaatcctgggacacaaataaagatgatgaaatgggttcaaggaggtcaggacacctactcaacgtaaaaagtggctgagttacttgtccaaggttaaagcacaccagaattgccaactccagatccctgagcttaaccactgaaggagttcaggaaatgccagcccaaaacaagatgctttggcgggctgattaccttgaactgagggcacctggagaacagcaggcgggaagaggctttccctgtgctttccttacctgcctaaagtctgaccctccaaaaatacctcaattgtcacgaatccttataaaccagggaagattaactcggatcacatgagagattagaggctgacaccacccagaagatcacctattctgtctgcataacaaacttgattcaccatacatttcctccgttcaccgtcccataacttgtgttagagctgcttcccgccccccgcccccaattctctattcattcctttcagtagctcaggatgccatgtaggctttaatcatctgacttcaacttttagtctcgtattttgtgggactcctgtacgtaattaaatatcgtttttctcccatggacaatgttcagttacccgaaaaaaatgggagattcttaagtaccaataaagaatgaaaatcacaagtgggtagtctggcaaagaaaagttgatgagagattctactgttaacgttgggttaatatgactcgaataatttccgtatgctagctcaatgctttacatgcacatcctgtttaccctgcagtaatctgttaattcgtcttatgtgaatttaactcttagtcctaataaggtacctggaaggatggagggaagccatttttggttcccctacaccactgttctatccggtctcttcacttctgctgagcacatcccgggtgtacatacacacacacacacacacatatgtgtgtgtatatatatgtatatgtgtgtgtgtgtgtatatatatatatattttaagtggcccacccctaacttctcaactcccacagaacgttcactcgccaggtaaacagaagcctaattatccccaatttgcaggtgagcacacgaggacaagaacccgatccaggaccggatacatcgcagttggaaaggctagaacacagatgccccctcactatatgcgccgcgaccatctggatgcagaggcgaactaaggactgggtgggaatggaagcgaggcccttcgagaagaggaaggggtgcaggccaagccgggcaacttaggaaacgcaaagtagaggcgcatgccaccttgctaactctcgactcttccagtctcgccccagtcgtttctgtggttttctctaaatgccccagccgaccgcaccagctactctccccgtgtcccagtaccagctggtccggttctcttggtatcccgctctctcctggaaaaatggaggcgcgaatcctgcccaatctaccgctccgagcgcacgttcactgcgcacgctgaaagggcgccaagccgaccgctgcgctatcgatcggtcccactctctcttgcttttctcgccatcttacttactggcacgttcaaaggttagttcacctccttggactttatctccaatgcgtcaagcttgacgtcaaggggctgttgcttcaccgataaatggccgaccgcggagagcaccctggggctgggactgccacaggtctggctggccgttggctccaccacttccgggttcttagggagcaagtgcgcctgcgcgcggtgtgcgcccttaaacgcgactcaaggcgtcgggtttgttgtcaaccaatcacaaggcagcctcgctcgagcgcaggccaatcggctttctagctagagggtttaactcctatttaaaaagaagaacctttgaattctaacggctgagctcttggaagacttgggtccttgggtcgcaggtgggagccgacgggtgggtagaccgtgggggatatctcagtggcggacgaggacggcggggacaaggggcggctggtcggagtggcggagcgtcaagtcccctgtcggttcctccgtccctgagtgtccttggcgctgccttgtgcccgcccagcgcctttgcatccgctcctgggcaccgaggcgccctgtaggatactgcttgttacttattacagctagaggtacaaggggtttgttgagtggtgttgacatgcgcgggaggggtgggtgggcttcagattggattttgtcctccgagatcacctgggtaagaaaagcacagaaggtctctgctgtgttggagttcacgttctagtgggtggggagacagacggtaagcgtacggagaacttgcagctggggtgggtgttacagaggaaaagcaggagtgcggtttaacgggggccgctttagatagaatagcctaagaaggcccttgtcctggctggatgagtgggtgaattgatgaatgagaacctccttgcagaggccttcccggtccgtacttctcagaccgtagaccttggagcagttgtaccgggataacttgcagtgcttgttaaacatatagctccaccgagagcccggtaaatcagaatctctgaggggtaggacccaggtgtctagttattaacaaactctccagatgattcttaggtttcattgagaactagggatgcagaccggtgcatacaaatcgtctggggacgttaaaatgcagaatctgtttttttagacctggggttaggcctcagagtctccatttctaagaaccatccggctgaggtagacgtagccactgtccttaactctcgtaatgtctcttcctcttccgtaaccttccttgtcccttgaattaaacgtttttcagcaacctactcagttcgtccttcccttcatctctgcagacatgcacaggtctgagggaggaaggaataaaccgtataaacctcctgcgctattagcctaacagcttttc

SEQ ID NO: 2172 - DNA, 6000 bp, Homo sapiens
atacaaagtcagttactcctgaaattagcacactgtccacaacgcagcaggcattcagacaaagacaaataaaaagaaacattttaaatatagagcaattttttaaatggccgttatcataggaacttagaatcaaatacagtaattcaaggtagcctttttctaattattttatatttatggccaattttaaaagttttgaactcctgccagatgcattattactattatcctgcatacagtggagggatatagaaacttaagcagccgattataagacaaagcagaacaaaaaagctactctaagaagcagcaaaatgttactgaacacgagaaaagtgactaattcatatccaggatcacagtaagggatctaaatttaaatccaaagtaaaggcggaaagaattcccgacaagaccaacctccatgtgggtttataaatgtgaatgagattacagattattcaatttaccttaacaggtcctgaaatgcagttttctttagatcggtccatgatgcctgaaaagaaaaagaagaacctttaatttgaacaaagccacctgcttaaagtgctgttgctcgataggcagcgttacagttccccaatcaaaaggcctccacaacacaccggattttacatgttttgtccaaatgaagctaatgagggagggacaggcatgtgctttccctgcaaggccaacctccccttgggcactgcgtcccatcctctgtcacggagtcttcactcctgatggtcttgctgctccatcatctctcctctaatggatcacttccatccctgtgcagcctactggcatacctgctaccttaaaaaagtcctctttaggccgggcatggtggcttacacctgtaatcccagcattttgggaggccgaggtgggcggatcacctgaggtcaagagttcgagaccagcctggccaacatggtgaaaccccgtctctactaaaaatacaaaacttagctgagcgtggtggcagtcacctgtaatcccagctactcgggaggctgaggcaggagaatcacttaaacccaggaagcagaggttgcagtgagctgagatcacaccattgcactccagcctatgggaaaagagcgagacttcgtctcaaaacaataaaataaaataaaagtcctctttattctattatcgttgctaacaatgaccccctcctctccaacagcaaagctccagaagaaccgtccacacttgccacctctactgctcctctcccctcccctgagcccatccccacctggcttttttgtctccaccacattgtcaggctcatggctgacacctactgctgccaaacccaagggtcaattccaccttccccgtacttgcatcctcagcagaatctgacaaggttgatcacatcttacacttttttcttcacttcacttccaggtttatctaccacctagtcgtcctgtctttccctccttgctgggtcagtctcatttttgccagatcaagggtctggggtgactcaagaacgagtccctggaccctccacttctccatctacaccttcaccagggatccatatcacccagtgcctcagctctaaatgccttcatgaggaccactcaaagtgcgtcttctgccctagtctctccttggactgtcagacttggatatccaaggatttgcccaggatctcccaaaaatgtctgccaggcacctcaatcctaacatatccaaaactgaacctcttcccttctccacttctcacctccctgttcatgggtgtgccctgagctcaggcctagaatgacttctccatctccaattactccctagccgagtacatccagtctctttgctttcagtaccatctacaggctgaggactcccaaatattcattcttcagcccagacctctcccctgaactcttgatctacattttctactttctatgcaacatctgcacctgattatctgagcggcatctccattctaacatgtcccaaacagaagtcctaatctctccccactctcacctccccaaatctagtctctagacatcctcatctcagtgcatggcaaacccatcctgtcagttgctcaggccaaaagccttggcataataaccctttacgaggttctctctcgcaaacccttcatttaatccaccagcatattctgtaggctctgccttcaagatcactgctcaccacctctactactaccacctggtcaaaccattattctctctcccttgagttttttccaacagcctcccaatggcctccccacttccacccttaccctgtcatggtccattcttaacactgaggccggcaatctcattaacaaatcagatgtgttgatcctcagttcagaagacccccatggctcccaactcaatcaaaacaatgcaaactcctaacctgcatagacaggcctattgaagtctcacagaacatggaccctaactacctctctgacttcatctcctcttcttgtcaaccgtgtaccagccacacaaggctttctttctgcaaataagtcccctgccataagcatttgcacttcttgctccctttattacgcttttcccccaggtgtgtagttcagtctttcatttcactgaggtttctttttttttttttttgagatagagtttgctcttgttgcccaggctggagtgcaatggcgcaatctcggctcacccgcaacctccacctcctgggttcaagcaattctcctgcctcagcctccagagtagctgggattacagacatgcaccaccacgcccagctgattttgtatttttagtagagacagggtttctctatgttggtagggctggtctggaactcccgacctcaggtgatccacccacctcggcctccgaaaatgctgggattacgggcatgagccaccgcgcccggccttcactgaagtttcttatcaaatatccccgcactctggcctgggcaatggagtgagaccctgtctcaaaaaaaaaaattaagattaccattttacaattaagcaaataattccatgatgaagccaggcccagactacaggctgcagcccttataaaaaaacagtgggtaagtaaaagttgataaacagcaacaaggaaatgcacacttgtgttaatcaaatatttaatttcacacatgctctaatgctttacttcccttacaattctaagtagcagtctaatgagatcacataggcctaacaacatttattcaacattcttctgacagaagctacaggcatttgctccaatttattctacctttctttctagggaaattgaataacaagcagaatggaataagattctaatccagaattctggagacaacgccaaggagactgcccttcaggtgactctaatctgcaaccagattgaagaaccagatgactttcacaggatccattcagttcaaaccagaagtcctactattttgaatagaaaagctgttaggctaatagcgcaggaggtttatacggtttattccttcctccctcagacctgtgcatgtctgcagagatgaagggaaggacgaactgagtaggttgctgaaaaacgtttaattcaagggacaaggaaggttacggaagaggaagagacattacgagagttaaggacagtggctacgtctacctcagccggatggttcttagaaatggagactctgaggcctaaccccaggtctaaaaaaacagattctgcattttaacgtccccagacgatttgtatgcaccggtctgcatccctagttctcaatgaaacctaagaatcatctggagagtttgttaataactagacacctgggtcctacccctcagagattctgatttaccgggctctcggtggagctatatgtttaacaagcactgcaagttatcccggtacaactgctccaaggtctacggtctgagaagtacggaccgggaaggcctctgcaaggaggttctcattcatcaattcacccactcatccagccaggacaagggccttcttaggctattctatctaaagcggcccccgttaaaccgcactcctgcttttcctctgtaacacccaccccagctgcaagttctccgtacgcttaccgtctgtctccccacccactagaacgtgaactccaacacagcagagaccttctgtgcttttcttacccaggtgatctcggaggacaaaatccaatctgaagcccacccacccctcccgcgcatgtcaacaccactcaacaaaccccttgtacctctagctgtaataagtaacaagcagtatcctacagggcgcctcggtgcccaggagcggatgcaaaggcgctgggcgggcacaaggcagcgccaaggacactcagggacggaggaaccgacaggggacttgacgctccgccactccgaccagccgccccttgtccccgccgtcctcgtccgccactgagatatcccccacggtctacccacccgtcggctcccacctgcgacccaaggacccaagtcttccaagagctcagccgttagaattcaaaggttcttctttttaaataggagttaaaccctctagctagaaagccgattggcctgcgctcgagcgaggctgccttgtgattggttgacaacaaacccgacgccttgagtcgcgtttaagggcgcacaccgcgcgcaggcgcacttgctccctaagaacccggaagtggtggagccaacggccagccagacctgtggcagtcccagccccagggtgctctccgcggtcggccatttatcggtgaagcaacagccccttgacgtcaagcttgacgcattggagataaagtccaaggaggtgaactaacctttgaacgtgccagtaagtaagatggcgagaaaagcaagagagagtgggaccgatcgatagcgcagcggtcggcttggcgccctttcagcgtgcgcagtgaacgtgcgctcggagcggtagattgggcaggattcgcgcctccatttttccaggagagagcgggataccaagagaaccggaccagctggtactgggacacggggagagtagctggtgcggtcggctggggcatttagagaaaaccacagaaacgactggggcgagactggaagagtcgagagttagcaaggtggcatgcgcctctactttgcgtttcctaagttgcccggcttggcctgcaccccttcctcttctcgaagggcctcgcttccattcccacccagtccttagttcgcctctgcatccagatggtcgcggcgcatatagtgagggggcatctgtgttctagcctttccaactgcgatgtatccggtcctggatcgggttcttgtcctcgtgtgctcacctgcaaattggggataattaggcttctgtttacctggcgagtgaacgttctgtgggagttgagaagttaggggtgggccacttaaaatatatatatatatacacacacacacacatatacatatatatacacacacatatgtgtgtgtgtgtgtgtgtatgtacacccgggatgtgctcagcagaagtgaagagaccggatagaacagtggtgtaggggaaccaaaaatggcttccctccatccttccaggtaccttattaggactaagagttaaattcacataagacgaattaacagattactgcagggtaaacaggatgtgcatgtaaagcattgagctagcatacggaaattattcgagtcatattaacccaacgttaacagtagaatctctcatcaacttttctttgccagactacccacttgtgattttcattctttattggtacttaagaatctcccatttttttcgggtaactgaacattgtccatgggagaaaaacgatatttaattacgtacaggagtcccacaaaatacgagactaaaagttgaagtcagatgattaaagcctacatggcatcctgagctactgaaaggaatgaatagagaattgggggcggggggcgggaagcagctctaacacaagtta

SEQ ID NO: 2173 - DNA, 6000 bp, Homo sapiens
tgcctgcactggtgtaagcctgcattggtgtgagcctgcattggtgtgtgcctgcattggtttgagcctgtcctggtgtgtgcctgcactgatatgagcctgcaatggtgtgagcttgcactggtgtgagcctctcctggtgtgtacctgcactggtgtgctagagctgccgtaacaaaacaccacagactgagtggctaagaaaacagacatttatttctcatagttctggaggctggaagtacaagagcaaggtgttggcaagtttggttctcccgaggcccccttcttggctcacacaaaaccatcttcttgctgctctcacgcagcctttcctctgtgtgtgtccttctctggtgtcttctcttcttataaggacctcagccaggtaggcttgggaccccatcctctcgccatcattttaataatcacttctttggaggccctaacacagtcaggtggcttagttctcccccacccctactgccccccgtggcctttgttcaaactgaattacctctttaaaggtcctacctctaaatatcgtgacattttgtacccccaggtactgggggttgggacttcaacatatgaatttggggggacacagtaatatgcgtatagcccctacctgtgccacatacttcgcaaggccttcctttcctttgagcacattgcctgataagctcatagtgtggacccaccacgaagcaataccacctgcaaaacatgtgcactacagccagttggcagctgggagagcaaagctcacctgtccaccacatggaaatccccaaacatcgggtacaaaaggcataataaatatcattgttacccggaggatgcaagtgaccaagctccacagcaggcactgggggaacccatggctggcccgtcaccacacctgggcatctgtaagagaccgaatggcatttgctacgaggagggcctgggtctcagcaggttttggatgcaagcaacaagacacactctgccccttacatccacttctagcacagcccctggggataaggaggagatgggtctggatggagcagagacagaactctgtagatgaaaaggctggacaggtgcacagcattagttaaagagagaactgaagcccatctgaggaattgagacttgacaaggaggatgagggcccgggagtccactgttcttttcatctgagactaaatgcaagcatcttgccttgcagtctatcttgatcccctaaaaaacagggatggaaggtttacctggtagaaactgctccacacactcagggtacaaataggatcctacctcctacttttctgaacagtttcctgggctgcacaggcctacgagcaggaaatccagcaggtctggcttggagtgcctccccacaaatattatccaagaacgcggggaaggagcaaagtttagcaactgcaggcctgcctcccctgcctgcttggccctctctcctcctcctcatccctccctttccatctatttctctttttaagcccctttgtccccttcaaatttaactcagtttcccctttctctatccctcctcccactggctttatatctccttttaaaacatgccttttaaattggtatttgaaattttctaaacatgattctataatacaaactctgaaaaacttcctagcagcatgtcacagccatcacgcaaaattactcaaggaggcactaaataggtgctgattactcaagcagaaaaactcatttaaatgatttaaagtaagtcattatagcatactactttcccagtgaccttcaaatatttattttctttgtatagtacatatactgtgacggaaaccccagacaccacgcagaaactagggagcgaagaaagtcactggcaagtgtaccagtacccactggtacatgggtgtctttcaaagctgaatttagttctatcttttatattattgaaaatgaaaacaatatttgattatatactattcgcgaatgacaaagagggagctgtggagagcgggcaaacatagaaagcactttgatggatacagaaagttctctggctatggatgggagggaaatccatccccaggactggaagatatgtttaaacaaaagaaggccaagagaaagccatttcttcatccaggtcaattttcgtcactccaggagttttggggtccaatctccaatctcctgtttgccacactttctcctttgagctgttggttttggatttgcttttcgcagcatacaaatatttattcacaatcagcaaacaaaatgccattaagattttgaaacaaaagtgaaaacaaatagaacagtttctggaacgttgtaagctatgccttaaaagaatcagtgaggtacaaattatttcattcactcattggctccaaatttgcatttttaaaatctggttgcaggtatcaacccaacttcttctggagaccatcaatatgattaatttccattaaaagcaattgattgaagtgaaaacacacgtaacgaactgaaccactttagagtgaacagttaagtgggcttcagtccgttcacagtgtggccgcccctccacgtcccccgccctcccacctgccttaaatgagctcctgggaagtacccatgaactccgatgcacccctgctccatcggctgcctcctcaccctttccagcccccacattcctgccctttctctgctcaactcctccgtcttctccctcggacgctcatcctcctccacacccgcctacgttctcccttctttgccctcgtcgtcccctctcttcctcgttcctcgagctccctctgctccctcgagggtactcaggacccggcaactctgcacacctcagtgccccggagccctcggagttcctcctctttcccaccacgaagcctctttttttccatttatttccatccccatttccctacccccatgtctggggtccctgtcaatctccatcacccctgccgccctatctccccctccttccacgtctcctttcctgcacattcccagcccccacctagctcctgctcaggtctctgtggctcacagagggccctcctcaccctccactctgccctgtccagcccaccccaacccatctcctggaacccttgtaaggtctctccccgcccagtccctgctgcgtccatttcccacccaagtctctaagcaccccattccccatcctctcccattgcccctccttatcctccccccgaccccaggtctcccagcgccccctgcaaggcccttcttccctccttacccattccccacccctgccccgcctaggtctcccagcgccccctgcaggccctcctccccttcttatccaagccccccaggttccccagcgccccctgcaggccctcctccctccttatccattccccaccaggtctcagtgccccctgcaggcccttctcccctccttatccattccctccacccccgcccaagtctcccagcgccctctccaggccctcctccctccttatcctttcccctccaggtctcccagcgccccttgcaggcccccctccactccttatccattccccgccagcgtctcccagtgccccttgcggccatcctcccctccttatccatttcccccccaggtctcccagcgccccctgagggccctcttcccctccttatccattccccccaaggtctcccagcgccccctacagggctctcctcccctcctcattccacccctccccccagtatctcagtgcctcctgcgggccctcctcccacccttatccattcccctcccctaggtctcccagcgccccctgcaggaccccctcccctccttatccattcccccacaaggtatcccagcgccccctgcagggctctcctcccctcctcattccacccctccccccagtctctcagtgcctcctgcgggccctcctcctctccttatccattcccctcccccaggtctcccagcaccccttgcaggccctcctcccctccttatccattcccctcccccaagtctcccagcaccccttgcaggccctcctcccctccttatccattcccccacccctcgccccccgcagggctcccagggccccctgcagaccctcctccccttgtcctctcctattcatcccccaggtctcccaagaacccctgcagaccctcctcccctccttatccattaccctcacctcaggtctccccgcccccctgcagggctctcccctcctcattccacccctccccctggtatctcagtgcctcctgttggccctcctaccctccttatccattcccctcccctaggtgtcacaggccccctgcaggcccccctcccctccttatccattacccaccacccccctcaggtctcccagcccccctgcagggctatcctccccgcctcattccacccctccccccctcattccacccctccccccagtatctcagtgcctcctgtgggccctcctcccctccttatccattccccctcagatctcccaggccccctgcaggccctcgtgccctccttacttcccccccgggtctcccagcgccccctgcggggccctcctcccttcctcatccacttcaaccccaaggtatttccgtgcccctgcaggaccctcctcccctccttaggcgctcccccactacccagtcttccagtgccctgcaggctctcctcctctccttatccacccccaccccaggtctcccagtgccctgtatgggaccctcctcccctcctcatccacccccccaggtccaccagtgccccctctggggtcctcctcatccgtgctccccctccccctccctactccccttcccccctgcccccacagtacatcaccccctcccccaaccctgcctggctccgcccccttcacgccccctcttttccgctccgcgcctgcgcactgccaccctccactctcgcgccagcccggcggcggccggctgtgggctgcagcacgcggtgcacgaggcagagcccacaagccaaagacggagtgggccgagcattccggccacgccttccgcggtgaggggccagtcccggtcaagcccacctgctctcctccaagagcatgggctgttctgggcgtgggcggagggaggggctggccggaaaggcccaagggcgggcggcagacgctgaggggctgcctgggagggtcgggtcggggcggggcgtggggggcagggtaaagcaggggccctgccaggcctccgagggagtgtgcttggtctggccgagggctgcttggccaagtctgggtgggctcgaggccactaggcccaaagcctgcctggctctgagggtgctaggtctagaaccgtgcacgaggggaatgcctgctcgggcccgaacctcgctgggcgccgggtgtgcactggcccggggcctgcttggacctgaaacttgctaggcccaggatatgcactggccgagagcctgctgggcccaaaccttactaggcccaggatgttcactgactgaaccggctcaggcctaaccttgctaggcccaggatatgcactgggccagagtgtgctcaggcggaaccttgccaggcgcaggatgtgtgctggccctaagcctgctgaggcccaaacctgttcgttctagggttttgtacaaaatcctgctttagcctaaatcctgcttagccttgaccccctcctagacccaagccagatcagcattgttctgaccctactaagtccaaaaccttttgaggccagaccttgtttcaactccaaagcctgctaggttccagcaccccccgcatccctcctcataccacccccttctcccccctatggaaaccgcttgcttatttttcaaacaggccaagtcattatggcagccactgagatctctgtcctttctgagcaattcaccaagatcaaagaactcgagttgatgccggaaaaaggcctgaaggaggaggaaaaagacggagtgtg

SEQ ID NO: 2174 - DNA, 6000 bp, Homo sapiens
actcaccatttcactaccgagctcttttatcccttgggtacttcaaatacttatgtgcttaccaagtgcctcataaagattttacagtcaacttaggggagccagagaaccactaagtaataaacctcatgacacttactttgaaagcagtgaacatagtattttttaaagacaatgacagcactcaatggcctgtctcgtccattgctgcctcatagaatttttttcaaaatatttttacatttctgatttgtccatctctatctgaatctatgccagttccaaataatgctctagagctcatctgtccccatgcccacccagtcaagcacatgtgctggggataattcttagcccaaagggctaagtggaatatgttttccaacatttgctttcagcaaccatgcagtagcacagcctcccacactcggtcccatttgcatggtgtgagcctgcattggtgtgagcctgcactggtgtgtgcctgcactggtgtaagcctgcattggtgtgagcctgcattggtgtgtgcctgcattggtttgagcctgtcctggtgtgtgcctgcactgatatgagcctgcaatggtgtgagcttgcactggtgtgagcctctcctggtgtgtacctgcactggtgtgctagagctgccgtaacaaaacaccacagactgagtggctaagaaaacagacatttatttctcatagttctggaggctggaagtacaagagcaaggtgttggcaagtttggttctcccgaggcccccttcttggctcacacaaaaccatcttcttgctgctctcacgcagcctttcctctgtgtgtgtccttctctggtgtcttctcttcttataaggacctcagccaggtaggcttgggaccccatcctctcgccatcattttaataatcacttctttggaggccctaacacagtcaggtggcttagttctcccccacccctactgccccccgtggcctttgttcaaactgaattacctctttaaaggtcctacctctaaatatcgtgacattttgtacccccaggtactgggggttgggacttcaacatatgaatttggggggacacagtaatatgcgtatagcccctacctgtgccacatacttcgcaaggccttcctttcctttgagcacattgcctgataagctcatagtgtggacccaccacgaagcaataccacctgcaaaacatgtgcactacagccagttggcagctgggagagcaaagctcacctgtccaccacatggaaatccccaaacatcgggtacaaaaggcataataaatatcattgttacccggaggatgcaagtgaccaagctccacagcaggcactgggggaacccatggctggcccgtcaccacacctgggcatctgtaagagaccgaatggcatttgctacgaggagggcctgggtctcagcaggttttggatgcaagcaacaagacacactctgccccttacatccacttctagcacagcccctggggataaggaggagatgggtctggatggagcagagacagaactctgtagatgaaaaggctggacaggtgcacagcattagttaaagagagaactgaagcccatctgaggaattgagacttgacaaggaggatgagggcccgggagtccactgttcttttcatctgagactaaatgcaagcatcttgccttgcagtctatcttgatcccctaaaaaacagggatggaaggtttacctggtagaaactgctccacacactcagggtacaaataggatcctacctcctacttttctgaacagtttcctgggctgcacaggcctacgagcaggaaatccagcaggtctggcttggagtgcctccccacaaatattatccaagaacgcggggaaggagcaaagtttagcaactgcaggcctgcctcccctgcctgcttggccctctctcctcctcctcatccctccctttccatctatttctctttttaagcccctttgtccccttcaaatttaactcagtttcccctttctctatccctcctcccactggctttatatctccttttaaaacatgccttttaaattggtatttgaaattttctaaacatgattctataatacaaactctgaaaaacttcctagcagcatgtcacagccatcacgcaaaattactcaaggaggcactaaataggtgctgattactcaagcagaaaaactcatttaaatgatttaaagtaagtcattatagcatactactttcccagtgaccttcaaatatttattttctttgtatagtacatatactgtgacggaaaccccagacaccacgcagaaactagggagcgaagaaagtcactggcaagtgtaccagtacccactggtacatgggtgtctttcaaagctgaatttagttctatcttttatattattgaaaatgaaaacaatatttgattatatactattcgcgaatgacaaagagggagctgtggagagcgggcaaacatagaaagcactttgatggatacagaaagttctctggctatggatgggagggaaatccatccccaggactggaagatatgtttaaacaaaagaaggccaagagaaagccatttcttcatccaggtcaattttcgtcactccaggagttttggggtccaatctccaatctcctgtttgccacactttctcctttgagctgttggttttggatttgcttttcgcagcatacaaatatttattcacaatcagcaaacaaaatgccattaagattttgaaacaaaagtgaaaacaaatagaacagtttctggaacgttgtaagctatgccttaaaagaatcagtgaggtacaaattatttcattcactcattggctccaaatttgcatttttaaaatctggttgcaggtatcaacccaacttcttctggagaccatcaatatgattaatttccattaaaagcaattgattgaagtgaaaacacacgtaacgaactgaaccactttagagtgaacagttaagtgggcttcagtccgttcacagtgtggccgcccctccacgtcccccgccctcccacctgccttaaatgagctcctgggaagtacccatgaactccgatgcacccctgctccatcggctgcctcctcaccctttccagcccccacattcctgccctttctctgctcaactcctccgtcttctccctcggacgctcatcctcctccacacccgcctacgttctcccttctttgccctcgtcgtcccctctcttcctcgttcctcgagctccctctgctccctcgagggtactcaggacccggcaactctgcacacctcagtgccccggagccctcggagttcctcctctttcccaccacgaagcctctttttttccatttatttccatccccatttccctacccccatgtctggggtccctgtcaatctccatcacccctgccgccctatctccccctccttccacgtctcctttcctgcacattcccagcccccacctagctcctgctcaggtctctgtggctcacagagggccctcctcaccctccactctgccctgtccagcccaccccaacccatctcctggaacccttgtaaggtctctccccgcccagtccctgctgcgtccatttcccacccaagtctctaagcaccccattccccatcctctcccattgcccctccttatcctccccccgaccccaggtctcccagcgccccctgcaaggcccttcttccctccttacccattccccacccctgccccgcctaggtctcccagcgccccctgcaggccctcctccccttcttatccaagccccccaggttccccagcgccccctgcaggccctcctccctccttatccattccccaccaggtctcagtgccccctgcaggcccttctcccctccttatccattccctccacccccgcccaagtctcccagcgccctctccaggccctcctccctccttatcctttcccctccaggtctcccagcgccccttgcaggcccccctccactccttatccattccccgccagcgtctcccagtgccccttgcggccatcctcccctccttatccatttcccccccaggtctcccagcgccccctgagggccctcttcccctccttatccattccccccaaggtctcccagcgccccctacagggctctcctcccctcctcattccacccctccccccagtatctcagtgcctcctgcgggccctcctcccacccttatccattcccctcccctaggtctcccagcgccccctgcaggaccccctcccctccttatccattcccccacaaggtatcccagcgccccctgcagggctctcctcccctcctcattccacccctccccccagtctctcagtgcctcctgcgggccctcctcctctccttatccattcccctcccccaggtctcccagcaccccttgcaggccctcctcccctccttatccattcccctcccccaagtctcccagcaccccttgcaggccctcctcccctccttatccattcccccacccctcgccccccgcagggctcccagggccccctgcagaccctcctccccttgtcctctcctattcatcccccaggtctcccaagaacccctgcagaccctcctcccctccttatccattaccctcacctcaggtctccccgcccccctgcagggctctcccctcctcattccacccctccccctggtatctcagtgcctcctgttggccctcctaccctccttatccattcccctcccctaggtgtcacaggccccctgcaggcccccctcccctccttatccattacccaccacccccctcaggtctcccagcccccctgcagggctatcctccccgcctcattccacccctccccccctcattccacccctccccccagtatctcagtgcctcctgtgggccctcctcccctccttatccattccccctcagatctcccaggccccctgcaggccctcgtgccctccttacttcccccccgggtctcccagcgccccctgcggggccctcctcccttcctcatccacttcaaccccaaggtatttccgtgcccctgcaggaccctcctcccctccttaggcgctcccccactacccagtcttccagtgccctgcaggctctcctcctctccttatccacccccaccccaggtctcccagtgccctgtatgggaccctcctcccctcctcatccacccccccaggtccaccagtgccccctctggggtcctcctcatccgtgctccccctccccctccctactccccttcccccctgcccccacagtacatcaccccctcccccaaccctgcctggctccgcccccttcacgccccctcttttccgctccgcgcctgcgcactgccaccctccactctcgcgccagcccggcggcggccggctgtgggctgcagcacgcggtgcacgaggcagagcccacaagccaaagacggagtgggccgagcattccggccacgccttccgcggtgaggggccagtcccggtcaagcccacctgctctcctccaagagcatgggctgttctgggcgtgggcggagggaggggctggccggaaaggcccaagggcgggcggcagacgctgaggggctgcctgggagggtcgggtcggggcggggcgtggggggcagggtaaagcaggggccctgccaggcctccgagggagtgtgcttggtctggccgagggctgcttggccaagtctgggtgggctcgaggccactaggcccaaagcctgcctggctctgagggtgctaggtctagaaccgtgcacgaggggaatgcctgctcgggcccgaacctcgctgggcgccgggtgtgcactggcccggggcctgcttggacctgaaacttgctaggcccaggatatgcactggccgagagcctgctgggcccaaaccttactaggcccaggatgt

SEQ ID NO: 2175 - DNA, 6000 bp, Homo sapiens
taatctatgtgaaagtcacttgccaaaaaggttttggttatgaaagtgaatgttatatatttaatattaagtgaacctcccgtgccttttaaaaaataccaacattatgaaatttaaaagcttaaatatatttgcctagttgataaagaggctgtggaacaactgaaggagaactttcagaccctaaaacagttatattacttagatgttaaaattttctagtgggctgtgcaattgctgggttgtccccccaaacatattttaatatgttatttaaaatgattttacccaagcctaagtattaaagtatatgtgcaaaaacagttgtgagccattctattatgcttcagtatgtttttcttgtggcctaattacagaagaccaagctttagaaacttcttgtctaaatcatttcacatgcaagtcttatcctttctacaacactgataaacgtagagccttggcaaaaataaattttgtcattgtgcctcagcgtcagtagcagagttgttgtatgtgtctttgagaaaaggaaatgcaattttatatgccaggtcagcatgaggtatgaagaaagctctaggggaatacagggaatgtgatcattaatgtacttctcttacaacagttaatgacactgtgcaggcagtaatgagtgtctgtctgtctgccttccggatcgtgaccctcacctaagtacaaagtcttgcacatgggggaagaaaacttacatttattttgtcttcccttatttgcttggccacagtgctaagtgctttaaatatgtgatttcatttaattctgaatgttatgctacctggtagacaatatcccctttttcttagctgaaaataaagctcagagtggtgtaagtacagccataggccacataacatttcactcaacagggtaactgtatatatgacgtggatccatggaattataccagatttttttccgtatcttttctgtgtttagatacacaaatacccttgtgttacagttgtctaccgtattcactgcagtaacatgctgtatacaggtttgcagccttgaagcaatagactgtactatatatacctgaggtgtgtagtaggctataccatctaggtttttgtaagtaaacgctaagatattcacacaataacaaaattgcttgaggaggacacctttctcagaacttacccctatcattaagcaatacataactgtaattcacctaaagtcccatagctggtaagtaacaaattgaacattgaaacctgtttcaaagtcaatgctctctctacctgttatatgacatatagaatattgcaaataaatgcttgttgattcagaaagctaaattaattgaacgccacattatgatatttctcttttttgagagaaggtcttgccttgtcaccaacgttggagtgcagtggtgcaatcatagctcactgcagcctccagctcctgggctcaagcagaattctcctacctcagcctccggcgtagagcagctaggtgcacaggcacatgccaccacgcctggctaattttgtttttttgtagagatagggcctagctatgttgcccaggctagtttcaaattcctggcctcaagcaatcccatcaactcagcctcccaaagtgcagggagtatatgtgtgaaccacggcacatagtttccaaattttgattataattgagaaggtttttcatgaaatgccacggtctaaaacctttaaaaaaaattaacagtaaaattaatgatatcctttttttcttccatgttgtagtttacggatgtttactaaataatccgcaggcttcctgaacacatgaagcaataaaaaagactaacatttttcttcaactaaaaagcggcaaggtaaaaaatcatcactattaatttttgaagtgtattaggaaaatttctgtgcgttcgcaactccaccatgaaggatcttagatctattggcggaaaactaggtatgaaaataattatgcaaaattgccaggtcacaattttgaagcactcttcgatcttcttacattttgtgttatacattattagtacttaaacgtataattcaaaagcattgaaagctttgaacatataaaatcccctcaaatccctgcgtacacctgtgtaccttagattgcatatgtaatctgtcagctctgaattaaaaaactaagatatcaaaattaagttcaatgggggtagttacaaagttgtcaagaagttggtaattctagctaagcagaatatttaaaacacctctgagagcttatttactgtgatttgatctgctctggtccacaactgagctttgattctattaccttgtgtttatttttttcaggtgctttccaccgcacatttaaatcttaatcccatatttttaaacaattagtgccttttagataagaaattaaaatgttattaaaatataattttaaattttgatttgaagatacctataaaagtttaactacacatacaattcaacttttaaaaattgatccgacacaaatattaatccaaaggtggtttgctgcagtattatttgtaatagaagtgtaggctcatcagtggaggattgaattcctcggatgaagttaatccacatgattaaataattacgaagctgttagaaagaccgagctgcatctcagtgcacgtggaacagtttccatctcagaacgcgagcacggggaaaacacgcagaagactgagcgccgaacaccgacgccctctgcgagccaaggggcaaggagaccctttcgcggctgtgcctgtctcagaagggcctgcgattttttacacaagcacccgctggctgcataagttaaacggatctcttaaatggaagcgtctgaaagagcctaggaatacacagttgggtacccagctcagcaccccgtctccggacctgcggtctctcccgccctccggcacccgcacccaggagcccaggcggccctgcgccccctgccggcaggagccaggcctcacccaggagtcgtcggcccggcgccctggtcccccggtccagctcgcccctgcagggctggctggagccgcgggtcccagtggctctggggacgcatagcgcggggatgggcttctcctggtcccgcccgcgcttccgtcccttccatcccttcctgctcgcctgtcccgggaccagggccccagtcaaggcagcgagtctcctcgctggcgggggtgactccgctcgcggggcgttcatcaggagagcatagcgcgagaggacgggccgaagcgcggggacagcggggacccactaacctgagggcctggcctgagccgcgcccacagcgtcccccttggctcaggcctcgggcgaccccggcgagcgttggcgggggtgggggggatggggggggcgggacctggctggcggcgacgccgattggacgcactatcgaccgcacctggcgcggattggacgggcgcttcccgccttccgccgttcgccggaggcgctgcggcggtccctgaggcgcagagttgcgacgctcggcggcatagggggcggctccaccgacactacgcggacgcctcctgccgcaggcaggttgagcagagtgcctgggtgggcttcccccacggcggggcgcggagggagggtggggcttcggcttggcctttcaagccggcaggcgagaagcttccgacggttgaggcggagccgttgtggaagctgccgagggggagggggtgcggttctgcggcagtgggcggaggggaggcgccgaggctgggccagggcgtgggctgtgcagagttcgcggcgagggtggctcgcgcaggcgcgaggctccccatcagcacctgcctggccagcctcggcctcggggatgggaaatgggcgctcggagccgcccccgcgcgtgggcgactcggtcaaggtggctgaggcgcggggcggtgcgcttggcgagcggggagcaggcctggggctgcgcgcgtcgccggcccgaggaggctgaggggtgcgggagaagcggtggcgacgggagccctggggaccgctgctcgcctgtctccgggacatctgaaggggggttggcgctgcggcctggggcgcatctcgggtgtgtgtgtgctttgttggttcgggggtgaccctgggaaaagggtcaccgtgccggcggtgggagcagggacttcgccttcggcctcgttgttgccactgccggttccacttagggaagaagggagtgcgcgcaaaaccttcctcctgctcggcgccttcagtcccttctctccctcccgccgtccccacctgcggcctctccttgcggttgaggccgccagcccctccgcgcagctgggcctgatgcgtcccgcggcggctcaatgcgcgacacgtggctccacgtgcggccttttctggaccgggctccaggctggccgagcatctgcgaatacggcagcgtggtttttttttgttgttttttttcccgagacggagtctcgctctgtcacccaggctggagtttagtggtgcgatctcgcgtcactgcaacctccatcttccgggttccagcgattctcctgcttcagcctccggagtaactgggactacttggcgcgccaccacgcccagctaattttgtatttttagtagagacgggttttctccatgttggcccggctggtctcgaactcctgacctcaggtgatccacctgcctcggcttcccaaagtgctgggattacaggtgtgagccacctcgcccggcctacattttttagtaatgatgggaggaggaggacgccttccctccccttcattcacctttaatgtctttttggacaccttagctatgttagttaccagggcagaggggactttgaattatctactgctgcttgcattcattcagcagtttttcctttgggggaaaatctttgcctcccccatctgccaaattgttttctttgttgttgtttttatccgtaacgcttttatctgcctgcagatacacaatcatcatcttactagttctctgtgttgctcgctaaccagtcccccagttcagtagactggagcccagagcctgcttacttgtcaggtaaatccacgcttctcttgaaacattattattctgttctcggtttccgaagtcgttctgttacatagtagtagttcctaaagatcttttaaattgtttccttatgaggctggaaaaaataagtgtataacttttgtttctttttagagttagccttctctttcacttgcaaatgttaacttgtttgatgttgtggatagtgctgtgcttttgactctattgtggcctgtatgcattcagctttgaggcatgcgtgtgtgtgtgtgtgtaacctgattattcagtttgctttccttggtttgtttttccccaactgacttcgtgcaaaagtagattagaaactaaaaccatcttgttagctttatgtgcctctttggctgtacttttttctgtgctgtaattaatgtctcagggcattttgtaaaatacactgtttcaaattgctttagttctgaaaacagataaagcatagctaatgggcaagcctgcctcaacagttgctggccctagggtaagagtataaatggagcccccacaacatattttaagtatttaaagttttaaatcaagttttcacattgtaaaataaaatagtctcaaatttcacaaatacaccttcactgcatcaaaacagaaaactacatgtatggctatgatgattattattgagacagggtcttgctctgccgccgaggtgggagtgcagtagcgtgaacatggctcactgaaacctggacctcacttcagcctcctgattagctagaccacagctgcgatccaccaggccaggctaacttttatttttgtagaaataggatctcaccatgttgcccatgctggtctggagctcctgggctcaagcagtcctcttgcctgggcctcccacagtgctagccaccagcattac

SEQ ID NO: 2176 - DNA, 6000 bp, Homo sapiens
cctggttaggctgtgtgtctcctacattaacagctggggaggagggaaaagcttcagacttttaaactagcaaaacagttatttctctgcattcacaattctgatttcatgtatttctctgtacatgtttgatcattatcaggccattctgtttaagtttgaaactaagcattttaagaagtcttgcctcagttatttcagttttcaggtgactagagaatttcaggcaacagtgccctttgcaattacctttttgatgattaaggtgactatttttatttcttgttaagcatcagaagatgtcagcattcatcttttgggagtccagttacaaggtggaactagaaggtgttttcagcaatagccagagcactggaggaaaaataattgacaaatatttatacttttaaattgttttgaactgtatttacatacatcatgttttatcaggtacccaccaactttatactttctgccttcagatagagtttctaacattttctagtttgtcagttttaaaatataaaattcttttatgtttttaaaccgtcaaccaagaagtcaagaccactgtcccctgctgagttaggcaatcacttaaaactccaaagaactccaggctgaggagttcttttggtgctgaacagtggtctgacaacaggtgctagaattaaggtgtgggaaaaaaaaaaaaacagccaggaaggacaagatctccaatttgtgaagcttatgatacagctgaaaccagtctgatcaattttatgctacctgtcaccaagaaattaactctaaatttttgaatgcttgttggcatctgtcaaatcaatactgaaaggatgcatttcggcttttaaccagtttggttctgatcattgcaacctctgtgcttttataattcaaagaacaaggatagctttcttcggtatcttttaatataagaacactgaattttggcttgaaatattgtgactaaattgcacaatctctggctattagcactgttcactacattaacatgcaagagagagagaagccttgttacatttcctgctatttaacaaactgtccaattaggtcagcaagcctgttagggccttcactgctacgcccctggccccaaaacagagagcaagacagttgtccagagaatttagatatgagttaagagctgccagatttattttaaggcatgtagagaatctcataatctatgtgaaagtcacttgccaaaaaggttttggttatgaaagtgaatgttatatatttaatattaagtgaacctcccgtgccttttaaaaaataccaacattatgaaatttaaaagcttaaatatatttgcctagttgataaagaggctgtggaacaactgaaggagaactttcagaccctaaaacagttatattacttagatgttaaaattttctagtgggctgtgcaattgctgggttgtccccccaaacatattttaatatgttatttaaaatgattttacccaagcctaagtattaaagtatatgtgcaaaaacagttgtgagccattctattatgcttcagtatgtttttcttgtggcctaattacagaagaccaagctttagaaacttcttgtctaaatcatttcacatgcaagtcttatcctttctacaacactgataaacgtagagccttggcaaaaataaattttgtcattgtgcctcagcgtcagtagcagagttgttgtatgtgtctttgagaaaaggaaatgcaattttatatgccaggtcagcatgaggtatgaagaaagctctaggggaatacagggaatgtgatcattaatgtacttctcttacaacagttaatgacactgtgcaggcagtaatgagtgtctgtctgtctgccttccggatcgtgaccctcacctaagtacaaagtcttgcacatgggggaagaaaacttacatttattttgtcttcccttatttgcttggccacagtgctaagtgctttaaatatgtgatttcatttaattctgaatgttatgctacctggtagacaatatcccctttttcttagctgaaaataaagctcagagtggtgtaagtacagccataggccacataacatttcactcaacagggtaactgtatatatgacgtggatccatggaattataccagatttttttccgtatcttttctgtgtttagatacacaaatacccttgtgttacagttgtctaccgtattcactgcagtaacatgctgtatacaggtttgcagccttgaagcaatagactgtactatatatacctgaggtgtgtagtaggctataccatctaggtttttgtaagtaaacgctaagatattcacacaataacaaaattgcttgaggaggacacctttctcagaacttacccctatcattaagcaatacataactgtaattcacctaaagtcccatagctggtaagtaacaaattgaacattgaaacctgtttcaaagtcaatgctctctctacctgttatatgacatatagaatattgcaaataaatgcttgttgattcagaaagctaaattaattgaacgccacattatgatatttctcttttttgagagaaggtcttgccttgtcaccaacgttggagtgcagtggtgcaatcatagctcactgcagcctccagctcctgggctcaagcagaattctcctacctcagcctccggcgtagagcagctaggtgcacaggcacatgccaccacgcctggctaattttgtttttttgtagagatagggcctagctatgttgcccaggctagtttcaaattcctggcctcaagcaatcccatcaactcagcctcccaaagtgcagggagtatatgtgtgaaccacggcacatagtttccaaattttgattataattgagaaggtttttcatgaaatgccacggtctaaaacctttaaaaaaaattaacagtaaaattaatgatatcctttttttcttccatgttgtagtttacggatgtttactaaataatccgcaggcttcctgaacacatgaagcaataaaaaagactaacatttttcttcaactaaaaagcggcaaggtaaaaaatcatcactattaatttttgaagtgtattaggaaaatttctgtgcgttcgcaactccaccatgaaggatcttagatctattggcggaaaactaggtatgaaaataattatgcaaaattgccaggtcacaattttgaagcactcttcgatcttcttacattttgtgttatacattattagtacttaaacgtataattcaaaagcattgaaagctttgaacatataaaatcccctcaaatccctgcgtacacctgtgtaccttagattgcatatgtaatctgtcagctctgaattaaaaaactaagatatcaaaattaagttcaatgggggtagttacaaagttgtcaagaagttggtaattctagctaagcagaatatttaaaacacctctgagagcttatttactgtgatttgatctgctctggtccacaactgagctttgattctattaccttgtgtttatttttttcaggtgctttccaccgcacatttaaatcttaatcccatatttttaaacaattagtgccttttagataagaaattaaaatgttattaaaatataattttaaattttgatttgaagatacctataaaagtttaactacacatacaattcaacttttaaaaattgatccgacacaaatattaatccaaaggtggtttgctgcagtattatttgtaatagaagtgtaggctcatcagtggaggattgaattcctcggatgaagttaatccacatgattaaataattacgaagctgttagaaagaccgagctgcatctcagtgcacgtggaacagtttccatctcagaacgcgagcacggggaaaacacgcagaagactgagcgccgaacaccgacgccctctgcgagccaaggggcaaggagaccctttcgcggctgtgcctgtctcagaagggcctgcgattttttacacaagcacccgctggctgcataagttaaacggatctcttaaatggaagcgtctgaaagagcctaggaatacacagttgggtacccagctcagcaccccgtctccggacctgcggtctctcccgccctccggcacccgcacccaggagcccaggcggccctgcgccccctgccggcaggagccaggcctcacccaggagtcgtcggcccggcgccctggtcccccggtccagctcgcccctgcagggctggctggagccgcgggtcccagtggctctggggacgcatagcgcggggatgggcttctcctggtcccgcccgcgcttccgtcccttccatcccttcctgctcgcctgtcccgggaccagggccccagtcaaggcagcgagtctcctcgctggcgggggtgactccgctcgcggggcgttcatcaggagagcatagcgcgagaggacgggccgaagcgcggggacagcggggacccactaacctgagggcctggcctgagccgcgcccacagcgtcccccttggctcaggcctcgggcgaccccggcgagcgttggcgggggtgggggggatggggggggcgggacctggctggcggcgacgccgattggacgcactatcgaccgcacctggcgcggattggacgggcgcttcccgccttccgccgttcgccggaggcgctgcggcggtccctgaggcgcagagttgcgacgctcggcggcatagggggcggctccaccgacactacgcggacgcctcctgccgcaggcaggttgagcagagtgcctgggtgggcttcccccacggcggggcgcggagggagggtggggcttcggcttggcctttcaagccggcaggcgagaagcttccgacggttgaggcggagccgttgtggaagctgccgagggggagggggtgcggttctgcggcagtgggcggaggggaggcgccgaggctgggccagggcgtgggctgtgcagagttcgcggcgagggtggctcgcgcaggcgcgaggctccccatcagcacctgcctggccagcctcggcctcggggatgggaaatgggcgctcggagccgcccccgcgcgtgggcgactcggtcaaggtggctgaggcgcggggcggtgcgcttggcgagcggggagcaggcctggggctgcgcgcgtcgccggcccgaggaggctgaggggtgcgggagaagcggtggcgacgggagccctggggaccgctgctcgcctgtctccgggacatctgaaggggggttggcgctgcggcctggggcgcatctcgggtgtgtgtgtgctttgttggttcgggggtgaccctgggaaaagggtcaccgtgccggcggtgggagcagggacttcgccttcggcctcgttgttgccactgccggttccacttagggaagaagggagtgcgcgcaaaaccttcctcctgctcggcgccttcagtcccttctctccctcccgccgtccccacctgcggcctctccttgcggttgaggccgccagcccctccgcgcagctgggcctgatgcgtcccgcggcggctcaatgcgcgacacgtggctccacgtgcggccttttctggaccgggctccaggctggccgagcatctgcgaatacggcagcgtggtttttttttgttgttttttttcccgagacggagtctcgctctgtcacccaggctggagtttagtggtgcgatctcgcgtcactgcaacctccatcttccgggttccagcgattctcctgcttcagcctccggagtaactgggactacttggcgcgccaccacgcccagctaattttgtatttttagtagagacgggttttctccatgttggcccggctggtctcgaactcctgacctcaggtgatccacctgcctcggcttcccaaagtgctgggattacaggtgtgagccacctcgcccggcctacattttttagtaatgatgggaggaggagga

SEQ ID NO: 2177 - DNA, 6000 bp, Homo sapiens
aaaaaataacattagaaatctattttgccataaaaaaataaggtctagataaattaactacatgaatgtaaaaagtaaatgtttataaactattagcagaaaattcaggaggctatcactaagatgttccaagaggaaagaatttaaaacaaatgcacaaaacatacaaagtaatagattttaactttttgtgcatcactgtttgtaaaagagaggcagcatactaggaagacatttgcaatggaataagagactaaggattaacataaaaagtattattatgaagaacttaacaaatcaaggaggaaaaaaaagcaataacccaacagcaaaaatggaaaagaagaagaggtcattcagaaagtaaaactcaactggctaataaagaaatgaaaatgctacctccatggtaatcagaatgctagtaaaacaataaccagtcccctctccaccatccaccatattggcaaaaactaaagagactgatactacgaagtcacagtgggaataaaggaaattggaaatcatgtatgtactcctggtgggaagcaaataactgcactttgaaaaagagtttgatagcattgggtaaaaatgtaaacttgaataccatatgacacagtagttccacttctaattttacactttagagaaactcagaagcacaaagggaatataaaaatatttactgaagcatttcttctaatatcaagaaactgaaaactgcctctgtcagtgtgttgggtgaggaggtaaacatgaaatgtggtgagtgatgcaactgaattcagtagctgaatataatgaagaagatctgtatctcagaatatggtgcatctcaaacacaatataaagcataaaaaatgcagaatgagataatagaaattctttatgtaaaatctaaagtatacttaataaaggcttatatgcactgttattgatatgtgtatatctgtgtaacaccagaggatactttattaaagaaggatacaaatactgggcatatgaacattggatgatttgcacaggtaaagaaaataaccctagggatagggaataaaatggaccaaaagacaaaaaaaaaaagagaattttaattatttatttagaggagtgtagtaaagcatggtgtctagactgagaatacaattgattaaattaacttaattctgtttcctaaggttcaacatacactcatatataccctttcaatcaccacaaccattaggacagagcaaaaggggcccctgctatgcgctctatatagtgtaatctctttctcactatctcttattactgagcacacaggcatctctattagctcaaaatccaggactcagccctacccccagaaagtctataaccatgaacacattattcattctcataactctatctttcaggcccctgaacttcctttgcctatgcctatgaaagaagaggactgcaattaattacactattctgcttactttacgtatgtccgaattttccataataataaaaaaaaaatgcttaaagaagtcggggagtgtgaagccacaattgaatacagagaaggtttcagattgtgctaatgctaacattttagtctctgcttcagaacaaagatagcatgtgagcaagtgcttaggtaagagaaaagagatattgtcaaatccttcccctgcaaagcaagaacacagatgattcttgcatgacaagatactacttcttaacagtgccaaatgcccatcttcttccttctctttttactccaatttgtgactctagaaatactagcaaattagtgcacagtatttgcaacagtagcacatggtggctgaggaacattctgtagtagtaagcaatctatattaatatatatgtagatctagacatgaactacgtgaacatgatatggactctttagacagtaagcaaacactaaaatagtgaataaatgtattgttataatatttaataatatgcaattattcaaaaataagcaattccggtgttattaaaattttttaaggaaacaattacaattctacaataattttaatatttaagaattttttaaagaaaaatactttttacacctattttatgtttgtgatataaacccaaatttgatacattttgagtataacacattttgagtaattacagttttaacccttagatcatggctgtcaatagtaaataagtaaaagtcttcattataacatgatttttaaaataaaaatgaactatatatagtaacttatgaattatgtaagtattttatcacttattcaaagattaccagtccatcatcagatatccataataaatgcattcagttatctttggtacttttcaggattcagtcataaaaataatagccttggctggtggcttatgtctgtaatgctggtggctagcactgtgggaggcccaggcaagaggactgcttgagcccaggagctccagaccagcatgggcaacatggtgagatcctatttctacaaaaataaaagttagcctggcctggtggatcgcagctgtggtctagctaatcaggaggctgaagtgaggtccaggtttcagtgagccatgttcacgctactgcactcccacctcggcggcagagcaagaccctgtctcaataataatcatcatagccatacatgtagttttctgttttgatgcagtgaaggtgtatttgtgaaatttgagactattttattttacaatgtgaaaacttgatttaaaactttaaatacttaaaatatgttgtgggggctccatttatactcttaccctagggccagcaactgttgaggcaggcttgcccattagctatgctttatctgttttcagaactaaagcaatttgaaacagtgtattttacaaaatgccctgagacattaattacagcacagaaaaaagtacagccaaagaggcacataaagctaacaagatggttttagtttctaatctacttttgcacgaagtcagttggggaaaaacaaaccaaggaaagcaaactgaataatcaggttacacacacacacacacgcatgcctcaaagctgaatgcatacaggccacaatagagtcaaaagcacagcactatccacaacatcaaacaagttaacatttgcaagtgaaagagaaggctaactctaaaaagaaacaaaagttatacacttattttttccagcctcataaggaaacaatttaaaagatctttaggaactactactatgtaacagaacgacttcggaaaccgagaacagaataataatgtttcaagagaagcgtggatttacctgacaagtaagcaggctctgggctccagtctactgaactgggggactggttagcgagcaacacagagaactagtaagatgatgattgtgtatctgcaggcagataaaagcgttacggataaaaacaacaacaaagaaaacaatttggcagatgggggaggcaaagattttcccccaaaggaaaaactgctgaatgaatgcaagcagcagtagataattcaaagtcccctctgccctggtaactaacatagctaaggtgtccaaaaagacattaaaggtgaatgaaggggagggaaggcgtcctcctcctcccatcattactaaaaaatgtaggccgggcgaggtggctcacacctgtaatcccagcactttgggaagccgaggcaggtggatcacctgaggtcaggagttcgagaccagccgggccaacatggagaaaacccgtctctactaaaaatacaaaattagctgggcgtggtggcgcgccaagtagtcccagttactccggaggctgaagcaggagaatcgctggaacccggaagatggaggttgcagtgacgcgagatcgcaccactaaactccagcctgggtgacagagcgagactccgtctcgggaaaaaaaacaacaaaaaaaaaccacgctgccgtattcgcagatgctcggccagcctggagcccggtccagaaaaggccgcacgtggagccacgtgtcgcgcattgagccgccgcgggacgcatcaggcccagctgcgcggaggggctggcggcctcaaccgcaaggagaggccgcaggtggggacggcgggagggagagaagggactgaaggcgccgagcaggaggaaggttttgcgcgcactcccttcttccctaagtggaaccggcagtggcaacaacgaggccgaaggcgaagtccctgctcccaccgccggcacggtgacccttttcccagggtcacccccgaaccaacaaagcacacacacacccgagatgcgccccaggccgcagcgccaaccccccttcagatgtcccggagacaggcgagcagcggtccccagggctcccgtcgccaccgcttctcccgcacccctcagcctcctcgggccggcgacgcgcgcagccccaggcctgctccccgctcgccaagcgcaccgccccgcgcctcagccaccttgaccgagtcgcccacgcgcgggggcggctccgagcgcccatttcccatccccgaggccgaggctggccaggcaggtgctgatggggagcctcgcgcctgcgcgagccaccctcgccgcgaactctgcacagcccacgccctggcccagcctcggcgcctcccctccgcccactgccgcagaaccgcaccccctccccctcggcagcttccacaacggctccgcctcaaccgtcggaagcttctcgcctgccggcttgaaaggccaagccgaagccccaccctccctccgcgccccgccgtgggggaagcccacccaggcactctgctcaacctgcctgcggcaggaggcgtccgcgtagtgtcggtggagccgccccctatgccgccgagcgtcgcaactctgcgcctcagggaccgccgcagcgcctccggcgaacggcggaaggcgggaagcgcccgtccaatccgcgccaggtgcggtcgatagtgcgtccaatcggcgtcgccgccagccaggtcccgccccccccatcccccccacccccgccaacgctcgccggggtcgcccgaggcctgagccaagggggacgctgtgggcgcggctcaggccaggccctcaggttagtgggtccccgctgtccccgcgcttcggcccgtcctctcgcgctatgctctcctgatgaacgccccgcgagcggagtcacccccgccagcgaggagactcgctgccttgactggggccctggtcccgggacaggcgagcaggaagggatggaagggacggaagcgcgggcgggaccaggagaagcccatccccgcgctatgcgtccccagagccactgggacccgcggctccagccagccctgcaggggcgagctggaccgggggaccagggcgccgggccgacgactcctgggtgaggcctggctcctgccggcagggggcgcagggccgcctgggctcctgggtgcgggtgccggagggcgggagagaccgcaggtccggagacggggtgctgagctgggtacccaactgtgtattcctaggctctttcagacgcttccatttaagagatccgtttaacttatgcagccagcgggtgcttgtgtaaaaaatcgcaggcccttctgagacaggcacagccgcgaaagggtctccttgccccttggctcgcagagggcgtcggtgttcggcgctcagtcttctgcgtgttttccccgtgctcgcgttctgagatggaaactgttccacgtgcactgagatgcagctcggtctttctaacagcttcgtaattatttaatcatgtggattaacttcatccgaggaattcaatcctccactgatgagcctacacttctattacaaataatactgcagcaaaccacctttggattaatatttgtgtcggatcaatttttaaaagttgaattgtatgtgtagttaaacttttataggtatcttcaaatcaaaatttaaaattatattttaataacattttaatttcttatctaaaaggcactaattgttta

SEQ ID NO: 2178 - DNA, 6000 bp, Homo sapiens
actaaatggcgggccaccaagcctccatccaaagtcatgctcacagacaggaagagaaatctgctatttattaaacactgtttctagtgttcggtacatttcctttcctttgtaacggaagaaatgcccagaaggggctgaggcctgaagaccccatccccattagaaacccaaagctgtgtgtacgagctgctctgaggctcagagggaactcaggaggcccggccgggcaaaggggccgttgaaatgaccttgacggtgggtctgacaatgtgagaacagccgggagcctctgccgaatgactgcgcttctgtcccacggcgtgcccacgccagcaccggggagactggaaccgtctctcgccaggaaggcgtgggcagtggtgttgttcggctgcccccagctccaagtgtgggcagtggttttgtccgaccacccccagccccatcccctggaccctggggcacagctgtggaatgcgtggctggtctcgggtgccccatctcatcaagtcccaggtaaagcaaaagcgcccaagtccagcactccctgcgggggctgcagcctcacccagcgaaagcatccatatggggtcacagggctgggcggagtggggggtgtccattgccctctgggctgccatgggagatgtgcccccaggctctggcctcagctgaccactgccagctgcttgccagctggagagcaagaaacccccaaatcacgcttgtaaacaaggtgccagatgctgaattggtttaacttggacagcagcttggcgacgctgagtggctcctggcccagacagcagcttgtcccacagctgcagcccagccccaggcccaggcctttccccagaagcatctcggcacacaccctccagaactggggggctctgcttgctgatggctgcaccctggctctttgctgggccacatctggctgcaatttggggaaagttgttcgcttgaggggatgccactctcacctcattagcgttgtggacactcaccaagggctgttgtaggttgaagggtatcgcccccagaagacagggtgaagtcctaaccccagtacctgtgaatgggacctcggatggaaagagggtcttagttgaactgtgtcgccccctgagggtcttagcagatgtcatcaagttaagatgtcacaggttaagtcctaatccaatgactggtgtccctgtgaggaaatcaccacatggagacacagacacgcaggaacagtgcggcacggaggcggaggcagaaactggagccacaagcccgggagtgcgtggagccaccagaagtgggaaaaggcaggaaggatcctccctggagcctgcagagggagcgtgggtctgtccacaccttgaggttgggcttctggcctccagagctgggagaggccacgctggtgccgtaagccaccgggtttgggaggagggggcggcggggaggaggctgcaggcggaacaccccagcacctgctcaaacccagctggggaggcccagagttcccacttgcttttgggcattaggcaatggcaaagttaaaagtgaaaataaacctggttggaagttctatgaggaaaacaaggattctaatgattcactcactggttcaacacaaagtgccacaccaggctgagcctccctgggaaagaataagtattaggaccgagaagttactgttccctgagcagccttgttgtaacaggaggctccatttgactgggtgtggcggctgccacctgaaatcccagcacttgggaggccaagacggatcacgtgagccagagtttaagaccagcctagacaatatagtgagaccccatgtctgctaaaataaaaacttagcagggtgtggtgtgtgcctatagttccagctactgggaggctgagacaggataactcgagcccaggaggtagaggctgcagtgagctgtgattgcgccactgcactcctgcctgggagacagagagagaccctgtctcaaaaaaaaagaggctctgctcatctcacactgactcctgccacatacctcaccaagccctgggcacgcatctgacctctgacctcagggaggccatgcttagtgcttagtgtgaacccgcttctcagaggagattgaggctcagagaggccatgtcacctgctcaaggtcacagaggtactgaacagtgcagctgggattccaagccaagtctgttcccagagcccaggtcaaaccaccacactcacaagaccaacatcagggctgccttcaggactttcagaattctctccatttcctgaaaccaactcatcctagaactctcaagccaggagctagcagccccttttgccggggcagccacccttccctcgatcagcagccaggcccagggaacgcagggtgaaatggacgtcctcacgctggggtctacctatcagggaggggccatggccctcagaaacaaggtcagcaccacgaacttggcagcagagccccaggagggacgcctccccctccaggaacagagtggggttcaggaaagacctgaacagggacatgggggccaaggaggagggaagggaggagacagccctgggcaaggcaaggggtggtggcgcttgggcccatggtgggtacggcaggaggactgcaggcacccagcccatgccacgtcccatcctgtcccagggatgccggccacagcgcaccttctaacaatcccacagggcagggatgtgctgcacgtgggcagcatgctgcgctcagaactgtcaccatggaggctctgggcctgcagggggtgccttctcagtcacaggcacttccctgcgcgtcgccacgctctgcctccctccactcaagtgggctccactccacgccaggcctggtgcacacaggggtgcatgaactctgtggaaggagggcctatgacagcacccagtctgcctggtgtcaccatccggttctggacactcaacatgcaggactgagggagaaagctgtttccatgtcaaacaacagggcccggggttagggaaaagcccaccacacctgcggagctcggcccgttggggtgagcccgcttcccctggagtccacaccttagggccttgccgctctgccctggagagtcaccaccttgttccatctctcccgccttcctgaaggagctggccatgccaaatgcatggggcctggctgccacatttgggcaaatccatccctctgccccaatcatccctctgaccctccctggagcagcggccaggcatgtccgtggggggacatcttgtggacaggcctgggtctgcaggcaccctcagcctggctacggccaggaacacttccaaggatggagtgcaccgcgacctgcgtgtgacgcaacctgcatgtgacgtcatagtctttgaggacagagtgctgtgttctgggcccaaacttccccaaccaaagaccttagaggaacccaatgcctccacctgcccgaaggccaggggcgtggggcaactctgatgacctccaggtaagcaaggagcacgtgccagccttgacccaagagctctgtgtcggcccctttgctgcacacctgcaggggctgcctctgggaacagccgcccagcaggcacttggacctgtggacagtggctccctttgagaaggaaccgcaacaagcagccagtcctgggcccagagcccacagtcactcctggaggtgagggctgtgggaggcagggtcacccaggtcctgtggtctctgggagaaggacacagggtgtcgggcagccaggggccatctgggcagggggcacacgctggacaggcagggctcatggttggggttgccctgggatgggctgaggtggttcccagaaatggaatcaaggcagggggagcagtggagacccagggtgtgacagacccaaagataccgagctgagagtgatgtggggaagggcggggctcagcagggaagtgacagggagaggaggggtgccagagaccagtggctgtgggatgggagatgtggctgtgcaggggcctctgggaacaggtgtcagtgacagtgccaggaggaccccggcccacatgctgggtctgaggaggtgggcatggacggtgtggcccggttcaaagaatgcgaagagatgcacagggctgtccatgtgtccctgtgtcccgggcactggtaccagtggatgggggtgggggcatgtccagaacccacagggctgggggtctcaggggtaataagggctgaaccctaaaacccatttcagagcactgacaacgtggagatccagaccccgtattcaggggctgggagaattcaggggacaatgaaccctatgtgtggggggtgacagggcctgaggaaaccctcagccagcccaggaacccccagttctgtatccaggactgacaaggtcccaggtgaacccaacccctgtgtcctgggctgatgagggcccagactgaccctgacccctgtgtcctgggttgacaggggctcaggtcacctgaacctctgtccagggctgacaaggccccaggtgaacccaacccctttgtcctggcctctgtccagggctgacaaggccccaggtcacctgacccccttgtcctgggctgatgaggccccaagtaatcctgacccctagtcctgggctgatccggcccccgtccccgtccctgtaccccgcgtcctgggctgacctggccgggcccccactcacctctggcgctgcccatccaggccgaggccggtgggcacctgcgtggggctgagcaggccctggggcgcgggggtcctggcgggcagcccggtggggggctccggcggcggcggcgctggcggttcgcgggcctcggcgggcggcggcgggggcttctctccgcccgggcccaggctcgggggccgcccgtccagggagatgttgttgaggaagaaaagcgcggcctggcggcgccgcgagtccccgcgcctccgcagcgcctgcggcggggcccgagcggccgaggtcggcgcggcgggtggcgggggcccggcggggccgggggccgggcccggggctccaccggccgcggccgcggccatcctcagactgcgcccgccgccgcgaagcgccccaccccctgcccgcgcgcccgcgcgcccgccgcccattggccgcggcgcgcccacatgcaaatgtatcgccgtcgcgctctcccattggccagcgaggtgccgcgctcagggcgctcccctgggtcctagaggcggtcggacgcagcagcagggagtcgggagctgcgcgcctccccgccggttcgagtccccgtcttgggacctgcggccgcggggctctcgctttctgttccctttgctgtatggcggccttcgcggatggcctccatcgagcgcacattttaaggctccggacccagggcggcgtgggtgaggccccagcacacttccctgtccggaggtgtgtctgggcggcgcttcagcgggcgcagggcggcccctggaggagccccaccgcttcccggaagggcccgcgtgccatctggcctccttcattgacagaagggaacgagggtctgagtggagaaggcacctgcttgggatcaaagccccaggcagagtcctgcacttcctgcagtagcaaagtgaccttgagcctgccttgtgcccaggcctgtttcctctctgtgcctgggtgcccctgacttcagaacctgtgagcccgtggcaccgggatggtcagggcctgcctctggagcccgggagcctgtctgcagtctggaggggaacccgctgtatctttgtggagggactcaggaccttgcacccacctctgtgtcacctgcctgctctgtccagctttctttcatgggtttacgtatctttaaagaggggacaatgatttcagcctcagggtactgtcaggatgaaactggctcagtgagggggtcgggctgtggccggaggccaggcacatgcagtggtcagtccgcg

SEQ ID NO: 2179 - DNA, 6000 bp, Homo sapiens
acaaggagcagatccccagggccccttgtccacctgcagacagggtcagcgcagaaggcacagccccgaggggcatgggggcacgtttgctcccctggggaattgcggacggctccagtgtttgccaagggcagtgtccttggacccagctcctcccagtaatgccggcaggagcctcggccctggtccgagggtatcgggacaacttttcacttcctgctctgggctcaatggcagctccagctggggtccaggagcccatgagagactttgaacacctaattgtatggccctggtttttctccgggcaaggcccgcaggcagcaggcggggtggtgccgccactgtgtgccattgttgccggcaggtggccatggcctgcgtctgcccggagcggcagtagagaccagcacggcccttatttgaggcacttcctgctgagtgggtggaaatggccccggggggtgcagtctgtgagccagcacacccttgtgctcctacctgagccgggaccagggacgctggcaggggctcctgagaaactgctgtggcgatcagtgagagcaggtccctgcccagcatgagcacagctcagcgccagagccagcatcctcgtgcctagtgccccagaagagtgggtgcagctgtggctgcctgtgagccttatgaccctgcccagcaggtaggatcatcactgtttggctggtgcagaaattgaggctgagaggggagaggtcacttgcccaaggtcacaggtctgggacttgtgtcaggattcaaacctgacccattcaactcagagcctgagcttgctgtgcctcagagatggcctaagcccagcatctcggcaggatccccgtccccggaccatcgcaggaaccaggcgcccctcccatgtggccctagcccgggggcaggcctgctgaggcccgcagccagtgtcaggccagccagtatggcctggctccctccaaggcaggaagggggccactggggtcagtgccgtgttcggggtcacacaatggggagagtgtccaccctccacccaattctcagggttcaccctcagatcgggctacccctgctctgggcaccggtttctgtaggaacaagggtggccagcaaacttccccaagcacccagctccccgtgcccagaggagacccaggaggccctaggtgagagccagtgttgcctcaaaggaaggcacacagctccggcctgacctccggccacttcccatagcctccaaaaagccatccagagggagaaggaaactgacagccactgaggggcccgggagcccaagggacgccgaggaccacagtccctcccccaacagcagcccctgggaggagacctagccagcctgcaccagggtccacagcgagcccggggcagccctccacctgcccaccagggcctggagagggcacaccatccaaccagcaggcagccctgcacagaaccctgggagaagacctagccagcctcagctgaacccacagtgagcccagggcagctctctgcctgctcaccacagcctggagagggcacaccacccaaccagcaggcaaccccgaagagccggtgacgggcacatcctggcccacttcaagaggggctggaggaccgagaggggtctcaggctggcgattcaccccgtctccacccacctgggaaatgctctgcggcccctcccacagcccagcacctgctccctgaggggtgtggggactggaggcgggatcactcaggctccagcccagccctacccctgctgtgcactgcagccgttcccaggcagtgcccacgctctgggaggcaacggaccactcggacccccacccctgcccgccaagctccaagcacaatcttggacgccccctcgtgggctgacagcaaacagatgtctggcagtgagggtggagggagacagtgggcggcagcaccctcgaagaccgggtcccctgagtgacggagaataaacacttgaagaaccgtgcatgtgtctggcagggccccaggacaccactgactgtgccagggactggaggtcacccccttgcgggagggcagaataaaaccagctcctctgcagagtctgcagcgggaagggaccagggcaccctcggggaagtgcctggccacagcggcggccgtgtgcacctgcccctcctcactagtccctggcctggcagccacagggcagctcgccaggactccaccgggagcactcaaggctgtctgctcctcgggggaggatgagtatcagtccctcccagcttcgtgggaggagcttaagaaatagattcttgggcccaaccccggatccactgaaccaggactttagaggtgagcctggagtctgtgttttaagaagctcccagaggtaattctcctaaatgtgaagtctgagaactgccccttacagggcagagacactgggcactgacacctctgctgggcatcagggagcggtgggcaaaggagcaatggcaccaagtcatggccagtgttgggggacggggaggagagcaggtgtccctgggaggtcaaggcaggtggcacctgcaacccaaatttgggttctgagggatgaacaggagtgtgccaagtaggcaaggagctaggatgttctgggaagtttgctgagaccccaactctagaaaaatggacaaggatcaggcagaaaggaaaggtgggggccacggaggggtgccagggcaagggggaaactaagaagtcagcccaagggccaggcctgcagtcaggagcatccagacagagccctgcgcttgacacctgctcagagttcagggtgagagccaaagaaaataaggagcgaaactcatgagcagggccctctgcagccaaagcaccaaggtgagctgggcatttaaaaccacgcatcacagggatggcaggacacgggccaacgactgggctgggtgaggcctgggccagactggggtgcgggcctgactcagggggcactgcctcccacctgcagcctgtgacatgtctgcctgttgtcctgagaggccagagggactgaactcccaagagggaagtccaggtgtgttaaaggttgctttaatttctccagaatcacacgaaacaaaagccgtgtgttccctacacactgcccgcaggccaggttggcttttggccacccatcgacaccctggggaggggagaagactggcagcgggagcctagcaagggggttcaccagacccaggaagagaccccgttccttcctcagcattcctccttgtccctcaaagtctagcttagcgccagcaaagaagaactggctaggggcccccctactgcacagccgatccccaggacccggcgctgcagccagcacggacagctgcctcctgcctcctgcgtcctgccctccaccctcactcgcccctttctgttctcatctgacaccagattctctgcaagctgctggtgtatggcccaccctcccctgtcaggcccctcctcctggtgatagccagcagggatggagggcccactgtgtgcctgccccagcctcagcaccctacagcgctggacacactcactccccgctcacgggagcccccaggcacacaagtcagcaccccattctgtggatccagaatccgcagccacccctctgctatgccacccagccccgcgttctcctagacaggacagctgcccaccttcccctaggcctggcagaggccttggaggccaacttggaagggcggagggaaaggaaatggaggtgctgcatgctgcgtgagccccaatggtggcccgtgaaggcccacaggagggagcaggcaggcgggaggtgggtaggggcctgaagggcaggggcccatgctaggggtggtgatgaagaccctgtcttgcccactcgcccactgccttgttggccatcatgctgcctccccacacaccaggtgctcctagggccagcgctgtgcctgtcggtcccaccgggtccccagcacccagcacaggagaggctgggcgcatgcgggcaggtgcgaggtactgcagcgcattcgcggactgaccactgcatgtgcctggcctccggccacagcccgaccccctcactgagccagtttcatcctgacagtaccctgaggctgaaatcattgtcccctctttaaagatacgtaaacccatgaaagaaagctggacagagcaggcaggtgacacagaggtgggtgcaaggtcctgagtccctccacaaagatacagcgggttcccctccagactgcagacaggctcccgggctccagaggcaggccctgaccatcccggtgccacgggctcacaggttctgaagtcaggggcacccaggcacagagaggaaacaggcctgggcacaaggcaggctcaaggtcactttgctactgcaggaagtgcaggactctgcctggggctttgatcccaagcaggtgccttctccactcagaccctcgttcccttctgtcaatgaaggaggccagatggcacgcgggcccttccgggaagcggtggggctcctccaggggccgccctgcgcccgctgaagcgccgcccagacacacctccggacagggaagtgtgctggggcctcacccacgccgccctgggtccggagccttaaaatgtgcgctcgatggaggccatccgcgaaggccgccatacagcaaagggaacagaaagcgagagccccgcggccgcaggtcccaagacggggactcgaaccggcggggaggcgcgcagctcccgactccctgctgctgcgtccgaccgcctctaggacccaggggagcgccctgagcgcggcacctcgctggccaatgggagagcgcgacggcgatacatttgcatgtgggcgcgccgcggccaatgggcggcgggcgcgcgggcgcgcgggcagggggtggggcgcttcgcggcggcgggcgcagtctgaggatggccgcggccgcggccggtggagccccgggcccggcccccggccccgccgggcccccgccacccgccgcgccgacctcggccgctcgggccccgccgcaggcgctgcggaggcgcggggactcgcggcgccgccaggccgcgcttttcttcctcaacaacatctccctggacgggcggcccccgagcctgggcccgggcggagagaagcccccgccgccgcccgccgaggcccgcgaaccgccagcgccgccgccgccggagccccccaccgggctgcccgccaggacccccgcgccccagggcctgctcagccccacgcaggtgcccaccggcctcggcctggatgggcagcgccagaggtgagtgggggcccggccaggtcagcccaggacgcggggtacagggacggggacgggggccggatcagcccaggactaggggtcaggattacttggggcctcatcagcccaggacaagggggtcaggtgacctggggccttgtcagccctggacagaggccaggacaaaggggttgggttcacctggggccttgtcagccctggacagaggttcaggtgacctgagcccctgtcaacccaggacacaggggtcagggtcagtctgggccctcatcagcccaggacacaggggttgggttcacctgggaccttgtcagtcctggatacagaactgggggttcctgggctggctgagggtttcctcaggccctgtcaccccccacacatagggttcattgtcccctgaattctcccagcccctgaatacggggtctggatctccacgttgtcagtgctctgaaatgggttttagggttcagcccttattacccctgagacccccagccctgtgggttctggacatgcccccacccccatccactggtaccagtgcccgggacacagggacacatggacagccctgtgcatctcttcgcattctttgaaccgggccacaccgtccatgcccacctcctcagacccagcatgtgggccggggtcctcctggcactgt

SEQ ID NO: 2180 - DNA, 6000 bp, Homo sapiens
ttgccacagccaccccgaccttcatcacccgccacactgatcagttagcagtcaccagcatcgaggcaagacctcaaccagcagagagattaggactccctgaaggctcagatgatcattagcatttttggcaataaaatattttttaattaagtactttttagacacaatgctactgcacacttaatagactacaaatagtgtaaacataactttaataggcacaggaaatcaaaaagtgtgtgacttgcattattgcaatattcacttaattgtggtggtttggaactgaactcgcaatatctccgaggtatgccggaatacctatattcttattatattcttaattttgttgcactaaaataaagataggagttgtgctcgcttcggcagcacatatactaaaataaagataggagtttatgcattactcactaataaaagtcagtttctctgctggcatggagaataggagagtattgccaaacaacaacaacaacaacaacaataatggcacctctcctgccaagctgggaaattttactccagggatttccaatatgaagttctacctaagcatagagtgtctggcccacttgagtgtcataacttatacatcaccctaacctagttcacataaatcctaaccaattaccaaacaataatatgaaaagtttgatcaaagcattttcttctgaaaaagatgagccaagtttgaggcctctttgaggtagggaggaaagtttccacagttaatgcaactcaaaataggaggttggtgtgcccagtttccattgcctcattcatcaagagagtttgtgttttgacttttggaagtcagttttatggcatgatgtaacggagaaaataatgaagattgcaaattttctttatgcttatactttaatcactgctgctttatggatatttaagaagctaatgcaagagaagtagatttagtcttttttaatttagttacatggctaagttctggaaatttttgaagaaatgtgttgaagtgttcttaaaattatagtctcagatcttacttgctggacctccaaaggccccagaaggctgcacacacttttccttgatgttacatagcataatgtaacatatgctatgtaacgtaacatcctctatgttacataccagtttctctacatagctaatgcaactaacataacacaaaatcctccatgtccattataaaagtgactgttttggcagatcatgaggtcaggagatcgagaccatcctaggtaacacagtgaaaccttgtctctactaaaaacacaaaaaattagccgtgcatggtggtgggcacctgtagtcccagctactcaggaggctgaggcaggagaatggcgtgaacctggcaggcggagcttgcagtgagccgagattgcaccactgcactccagcctgggcaacagagaaagactctgtctcaaaaaaaaaaaaaaaaaagacttttgtattcagattcaaacttgacaagtgaattgagaagatggtacccaagactgtttttttttccttcttttcttttttagatagtgtcttgctctgttgctcaggctggagtgcagagcacgatgatctcagttcactgcaacctccacctcccaggttcaagccattctcctgcctcagcctcctgagcagctgggattacaggagcatgccaccacacctggctaatttttgtatttttagtagagatggggtttcaccatgttggccaggctggtctcaaactcctgacctcaggtgatccacctgcctcagcctcccaaagttctgggattacaggcgtgagccaccacgacccgccgactgttttgcttttaatgctgaactcttgagttcaaaggattttaaagactcacatatttagtgaaaataagtcctaattttgaaagctatttcacagattttgttgattctaagttgcattctctgcaactctgagacacaaccacaggatgtgtgtgatgattcctgtgattataaagccctagacatattagagtggctcattttcataagaaaccacttgtgctaaaagcaaactacaccattaacacacaatagaagtgaatatcttaaagttagctgtgaaatggaaatacatattaatgagtatagtagttccctcttatccctggtttcattttcaccagttttagttaccagtggtacagtacaataagatattttgagagagagcgagcatacattcacataacttttattacagtgtactataataattgttctgttattataattattgttaatctcttactgttcctaatttataaattatacatagggtttggtaccatgtgcagtttcagacatccactggggatcctggaacatatcctaccgtggataagggggaactactgtaattatttacatcagctctgctcctgtcttattccaggatgctataacagaatactatagactgtgtggcttaaacaacagaaatttctcacagtttggaggtagggaagttaaagatcaaggtaccagcagatccagtgtctggtgaaggtatgctttctggtttgctgtcttctccctatatcctcacttggcaagagagcagacagagtgatcatctctctcatgtttccacttacaagggcactaattccattcatgaaggttccaccctcatgacctaagtgtctcccaaaggccccacctccaaataccatcacattggggatttagtctccaacatacgaatattgcgagggacacaaacatttagtttatagcagctctcctctttcagtcccataaagaggagggctctgccttgccataccaattcatttgtgattttgtgattccaactcacaaggaaagagagctggggcaaagcatctgaagcacacaagagtagggcaagttttgaaagagacataaaaacaaatactgtgtgtgcaagggaagtggatgagagaaaaagtgtttaagagacattgtttgctatgtgtctatttcacagtgttcagctatgagaatttttttttctttttttagacagagtcttgctctgtcacccaggctggagtgccatgatgttatcatagctcactgcagcctcaatttcctgggctcaggtgatcctctcaccccagccttcagagtatctgagactacagctgcatgcaaccacacctggctaatttgtgtattttttgtagagattgggtttcatgatgttggccaggttggtcttgaactcctggagtcaaatgatcctctctccttgacctcccaaagtactggattacaggcatgagctacagtgcccagcctgagaattttttaaaagtcattttgaaattgggtttcaggttcttgcctgtattttttgaatatggtactgctctaagactggaaaatgtggaccacagatttataaatactacacaaaatactaatcctaaactatagaaatttctggacaaattttgagtaatgtgggtggttacctagctattttatgaaactgcagaattaaaggcctttatctgtaaaaataacctcatcagattgttatgattttaaaataaaaacaccttcacacctcctagaagactccaaggtgtaaatatcctctttaaatgtaccagtaagtagactaagtcctagaagagtataattttttttttttacaaataaagtttattgtactgtttgggggatggtatatttattactgctaaaaaaattaccattttgaattgctaattggctataacaaagatcagtaatacaaatttaaaacattcataaaactgagctgaaaacatgctcccaagcctagtgggcagtaaggaatctggccaatatactgtacaacttgaacattcagttcttaagtagtttacaacatggtttagccctcttttaataataataataaaaaggtaggaatatcttgtattcctcccgctagttggatgtattaaagtgctttcacaaaactaagaccatggtgttaactcaatataaaaggttgaaaagatgttccttcttttcttcagaaagttaatgttccctctccatatttgtatttgctcaaagatgaagctttgcatctgggaagtccttgagtagagtgtctcagaaatagaaagcctggactctcaaggcttcattcctttggccaacatctttggagcctctcctttatgcaaaacacagtggccggtgccagggcagcacacaagcgtccacaggaggcaggccctgctgtgaggggccagggaagggcccaactaggagtgccaacaaccgcctaaaatacagcagggcggctgcacggttaacgtgcgtgtaattgactacagcaagaaggatgaggatctgtccataaatgccaagttccccttcccgtcgagtccgtgtcccccatgaagccccgggtctagagagctgggtctagaactcgccattccgccctgagggtgtcaagtgcagcgtggagagacctgagggggaaacaaaaaggccgagacagccgaaaggaccaagcccgcgcgacccccgaaggcgctgacgcacgtagggcggccgggcgggggtcccacaggccttcagcgccgctttttgccggggagggaagcccgcggttctgcggaccgcgccgtcgcggtcgagggtctgcgccaggctcagggtagggcgagggtgtgtcgcctcccgtgcggctaggcccggggctcgggggtggcctcgcggcgaagccccgcccccggcaccgcccctcaggcgcgcgagccgatcccgcgcgcgccaaccctttcccgggtcatcgcccctcccctcttccgggccgcgagccccctgcgcgccgctttggggctgcgctcactcgtgtgcgcgctcgtccgcccgccagtcctctcaacgcgcgcttggccgcccgacgacgcgggagccgcacgcgccggacgaggctcgctgcgctccctgttgcccagcgcgggcccgttgaggcggagccctcagttcccggccaggacacggtctgggccgccgaatctccggccgaagagcggcggcggcagcggcggtgaggagaccgggccggggaaaggcagacatggcggggctgtgggtatcgggggagggtggtcccgtcgcccctgcggccacgtcgaaggctcgctggcgggcggcgcaccggggacaggggaggggcaggggatggaaccaggttgcatgggctccggctcggcgccagagcggggctgcgggccgcgagggcggcccgcgaggctttccgcgggaccctcggcgggcgcctgaggaaaaagacgccgcctcagggctcctgccacgtttcccacagcgcgttacattccgcctccgggtgggcgacaaccccgcggcttcccaccctctgtccacccccttcgcgtcggtgttttttctggagctccgcttgtttgctggagagtcgcgcctccgggaagccgggtcctcgaacccagggccgcccgccggggacagcggacccgcggggcaggcgcaccctggcgaggatgttgtcggggaggctgggcattgggcgccagggcccttccccttgaacttggggaaaaccgggattgcagaagttgggcgcagctcaaggcggttctttcaagagcgggtggagatgtttgatccctcctcacctacctctctcaaaaccccagcgggagagcctagcagcaggtttcgatggcttcagaaagtccaactcttagccccttggaaaattatttcccctcttcatggctttgtggcgccgctgaggtcgggccggggctcctcaccccacgggccagtcttctcgcgccctccaccttgggaacgtctatcaggagaaaaatgtgttcctagaaacgtttgcgattagcttttcgttacaagggagggaaaagtacaaaagttataaactcctgcgaggccgagctt

SEQ ID NO: 2181 - DNA, 6000 bp, Homo sapiens
tttcagtagaaatggggtttcaccatgttggccaggctggtctcgaactcctgacctcaggtgatccaccggcctcggcctcccacagtgctgggattacaggcctgagccaccgtgcccggccggagtttttctacttaatacctctccatgccaaccccgttgtcatttcccagcggccgcctctataacgggcacttttcagggacaaagaattggtccgttaatgttcctcaaattcgaacgcgcctaggaatagttcggggatcctgttgaagtgcagatcaggattccgtaggtaggggtggggttccaaattctacatttctagtatcttcccacacgatggtgatcctccttgtccctgaatcatggaggagggcaattagggagatgtgagcctggatgcatggtggccttggctatcttaggtgttcttgcccattaaccaagctgggaggaaccgtgtgaatgcatatctatccctgttaataaaagggtagtttgaaggagatgctgacaggagaataattagaaatgtttttcttcccaatccaactatatgcaatacactttataatattcattttagaaatgtcatagataagatttgtaaacattgacatttagcaatactaaatatcactgctaggtctcccctccactttttttttttaaacaaaaatacgacagtatgtattgtaggtcttcataaactacgtcttctgcatagtgtttcatgagcgtttttcaatgtcataatttattttttcctccaacatttattatgaaaaaattcaagtgtaaagcgaagtcgagagaattttacagtggagcagacctcaagagaaggggaaggatggatttcccctctatttagcagtgtctgaagacattttgggttgtcacaactggaaggatggtattggcatggggtaggtagagcacagggatgttcctcaacttcctacaatgaacaggacatcccccgacaacaacaaatttgctggtccaaaatgttgatagtgttgaggttgaaaaacactgacctggagagtacagaattttactctaccagctttgtcacatacctcatcaatctatctgttttcatacatttaaaagtaaactgcagacagtacgcttctaagtacctctaatgcacatcattggagttcaaattaaggattttttaaggtaaaaatgaaatgcataccttaaatacacatcagtttttaaatgcacacgcctatggaactcaagccatattaacatatagaacgttaccatcaccctagaaagttctttcatgccctttcttagttcccaaccagttctccccaaaggtaaccactgttctgattttttcccccaccatacttatttttcttgttatagaacgtcatatggttggagtcatgcaatagatatttttgtgtaagggttctttcactcagggtaatattttcatctgatatcatgtgtatcactttcttttgattgctcagtagtattccatcatatgaatataccagttccattcttgttttgatagaaacctgggctgtcttcagttttttggctattataaataaagctgctgtgaacgttcttatatagcattttattgctcatgactttcttttcaataaatatttatcgagcacttactatattccaggcatttccaggtactaattatagccatgaacaagacaaagatgtcgcatctctcaaagagcttatatttgcacatttctgtgtatgtatgaagagggctaaacataaaggtaaaaataaaagaaaattatgggccgggcacagtggctcatgcctgtaatcccagcactttgggaggccaaggcgggcagattacctgaggttgggaattcaaaaccagcctgaccaacatgaagaaaccccgtctctactaaaaatacaaaaattagctggacatggtggtgcatgcctgtaatcctagctactggggaggctgaggcaggagaattgcttgaacctgggaggcggaggttgtggtgagccgagatcacgccattgcactccagtctgggcaacaagagcaaaactgcgtctcaaaaaaaagaaaaaaaaaaaaaattatggctgggtatgatagctcatgcctataatcccagcactttgggagaccaaggaggatcacttgagcccagggtttgagaccagcttgggcaacagagacccctaactctacaaaaaacacaaaaattagccaggtgtgggggcgtgtgcctgtaggcctgtagtcccagctactcaggaggctgaggtaggagaattgcctgagcctgggaagttgaggctgcagtgagctgtaactgcaccactgcactccagcctgggcaacagagtgagactctgtctcaaaaaaaaaaaaaaaagaaagaaaattaccagatagtggataaactgctgggcagagaagtaaagtaaggtgatgtgagtgatcagatgactgtgttacttagattgccctgtaactggaaggaagtgacttttaaggcatgtatagaagctgggtgtggtgactcacacctggaatcctagtgctttgggaggctgaggctggagtatcgcttgaggtcaggagtttgagaccagcctgggcagcaggcttttgtagagacacggtgacttcaaaaaaaaaaaaaaaaagttagctgatgaggtggcacacacttgcagtaccagctacgcgaggctgaggcatgaggatcacttgagcacaggaattcaaggttacagtgaactatgactgcacttcagcctgggctacaaagccagaccctgtctctaaaataaataaattaaaaataaggtgtgaacagaatgacaataagataccaaccccggaagatcagggggaagaggctttctgacaggaagcacgtggtacaatgaccctaaggctctgttttaaaatgcgtgggggcaaaaagcctgcatttctggagcttggagaagaaagctttaaaaaattatctcatcccactcctgttcttttttgcatgagagctggagcctatgccctaccacacatccgtggatatgcccaggatttgacttgggccttcgaactttgcacagtagctgctactaactttttgagataatacattcgtgggggctcagtcctgcctcatctaaatcaccagagaccaaacaaggaccagcccaatatctcttggactgtaatgtcataatgttgtcagaatacagagaaagatgaaactaagccgggtccggtggcttatgcctgtaatccagcattttgggaggccgaggcaggtggatcacttgaggccaggagttcaagaccagcctggccaatatgctgaaaccctgcctctaccaaaaaaatacaaaagttagctgtgtggtggggtggcacgtgcctataatcccagccactggggagggtgaggtgggagaatcgggaggtggaggttgcagtgagctgaggtcgtgccactgcactccagcctgggtaacagagtgcaacccggtctcaataaataaataaataagtaaataaaacaaaaattatctcagcagtaaaaagcaagagagctagttttcccccaaatttaaccaaatgttactctggtggttagtatgccaccatcttaaactccttttatctgattagtaaggatggacatttattttatgaccaattgttcttttatggtgaattacctgtttacatatctatttttctatagctatctgcaactcccccgacccccacggtagcgattactatcttctctactaaactaagactccagggcagagaggcctatgtttaattcatttgaggaaaggcttggcacaaagtgtgcacttacatattttctttttttctttttgagagggagttttgctcttgttgcccaggctggagtgcaatggagtgatcttggctcattgcaacctctgcctccagacttcaagcgattctcccccttagcctcccgaatagctgggattacaggcgcccgccaccacgaccgactaattttttgtatttttagtagagacgggatttcaccacgttggccaggctggtctcgaactcctgacctcacgtgatccacccgcctcggcctcccagtgttgggattacaggggtgagccaccgcgccagggctcgcacttacaaattttcaaagaatggacagtaaatatttgaaaatcccctcctcccccgcaatttatctgacaccgtctttcggttttgctttaaaaattcactctcgcggccgggcgcggtggctcacgcctgtaatcccagcacgttgggaggccgaggcgggcgcatcacaaggtcaggagttggagaccagcctggccaattggtgaaaccccgtctctactaaaaatacaaaaattttagctgggcgtggtgccgtgcgcctgtagtcccagctactcgggaggctgaggcagaagaatgcactccagcctgggcgacagagggatattccgtctcaaacaaacaaaaaatcactcgctgcgttttttattctgacatggtgcaggaaggtaaattcaagacaacttaggtactcagttttagaagtcgacaggacagaattacggaaacaaatttaagcgttcccccttttagctccaaatataatgtgttccagaaaggtaaccatctaggaaactccaaggctcagaccaccaccggatgcccacacttcaggagcatttatataacttcgtggttatgtcagagacgagaaaacccattgacaaccaaacccctaaacccgaacatccggcgcaagccgcacgcaggcgcagatttactagcgtcagagccgatggtcccgggaggtgggggtggggtggtggtggcctagccacttcccataatgccgcgttccggaagttattgctttccaggggtcactctggcttcgactccgtcgctctcaattcgtcaccaggaggaagacggagctggctgcccagcccaaaggcccatgaggggatgcagttatgggctctgtcgccgtgggtgagttctggtcccactgcctggcagtcgtcgctcgcctggctttctgcgctgggagagctcctgttttccgccccaacttcgttctcttcttgaaggccgctctccttaagcacgtaacccggctactttccggtactgcgatctcattggctgcatgttctgtcagttccagaagctggccaatgagatgccgctgctggcggccttctcgaccccgtggacccagaggttcccccgtgggatcggagcagttagaaggggaggagagggaaggtgtggcaggcgccgagcaaatgggtgggtggcgcgtggcagggacttccctatgggttggagctggatttgcagccgtgttcatacggctggtaggaaaagcaggatctgtcacttatccaattgactatatctaggaggggattgatatacgcaaaacttgaaagccacgttaacacctgctgacaaagttttccacacgcttacatttttaatggaaccgagtaggcaggggaagactgggagggcagagagtgaagagacttggaataatatgagaaccggcaagactatctttgatttagattttgtatggagtcctgcgaagagtcatttcactaagacgttaatgctcatccgatgacactacttgaaaagtgtattaagtttattgatgttttatagctgatggaagtcacaatatgctctcctcatgactcattagttgcctttatagttgtcagaactttactgaggctctttccgcagcactggagtgacccctctgtcctctgcctgcagtaattaacaattcgtctttcaagttttcctatggagtctaagctgctgcaatcctcaaaccagatttactagtgctgtcttcactactgcagacttctgacttctcatttttcacccttttctttttcacc

SEQ ID NO: 2182 - DNA, 6000 bp, Homo sapiens
gaattagaaattaccaatgtatatttcttctccaaagtatatatttagcggcaatggaaacacgaccggttgttgtactgtgatccaaaagttgatagactggttccagtagatacacagtgaagatatgtttctcagcagtgatctgactagctgaaagcagaagtttaggtcatgttcttttatgaataagcctatacatcttttaggtaaaagtctcccatttacttgtttaaatagtgttttttgaccacctcctgtgttctagaatatttggtaatagattaagtctactgccttgagcctttgggatttatagaccaggtgagaaaggatataaatatcaataacgttagtacaaggtaaaaaataaggaatgccactaggaattcatgccatgttttatagaatttgtttaaaggaaggagacagtattttctcatctgggagataagtataggcttctgggaggaggtggcttttgagcaagatcttgaagagtgggtgggatttggttaggtagcagtgttcataaaggattctggataaatagaataatgtgaacaaaattgcatagttgtgaaaagcgctcagtgtgtttttagctggtcgttggtatgtgaataagagaatgtgggagttaacactggagagatatgtcggggtcagaggatgtcaggtttgtttattaggagtttaagagtgcaattcataatttttgaatggtgtatgaacagagctttgttttaggaacactaaactgaaagaatatgcatgtgaagaaggaggctgaagttaggggaatgtttaggagactgttaaggaatccaaaccagacttgactgcattagtgtggtttaatctgggctggaaagttggacaagaagagtactttgagtgcatggttttctttttttttttttttttattttgagatggagtttttgctcttgttgcccaggctagagtgcaggcccagacgtgatcttggctcactgcaacctccgcctcctgagttcaagcagttctcctgcctcagcctcctaattagctgggattacagatgtgcgccaccacacccggctaatttttgtatttttagtagagatggggtttcaccatgttggtcaggctggtctcgaactcctgacctcaggtgatcccacccctggcctcagcctcccaaagtgctgggattacaggtgtgagccaccgcgcctagcgagtgcatggttttctaaatacttgttgacttaaatgttctcagttgcctgtgcatatgtaagttttaacaaaatattgattctagagtctaacattttcttttcaagattgtaagaatggcagaatttcatgagccacttccttgtttatgatagattatgcattctcccctcttgctgagtttttatggctttgaggtttatgattatgatttttttagggctgtggcagaaattctcaggagcagcatgccttgaagcactatctgacgccaagatctgaacctcactgtctggttcttagtttggacaactggagtgtatggtgagtttcagttcctctgcctcttgggtggaaattatttgaaatattagagaatggaaatgtttaaatatgtttaagaagaaagcaatttaaaatttttgtagtatgttttaaaataccatcactttcacaaagctaaagaatgcagtattatgagaagcttttacttggacgtttgcacaagcacaaacattgtaacatagaagacttaagaatctttacccctttgtttttcttgcttgtgatattataaggcatatagtggagatagggacgctaagaacaaatttcagataaaattgtaataaaattttggctatgaatttgcatgaaaataaatgtcagtctggtatgttatagatgctgcattgtaacatcattaaaacagatttttacgtcttaaaaatcattttcacagtagtcttcactgaatgacatcttttttttttttttgagacggaatctttctgtcgcccaggctggagtgcagtggtgtgatctcggctcaccacaacctccgcctcccaggttcaagcaattctcctgcctcagcctcccgagtagctgagattacagggatgcaccaccacgcccggctaatttttgtatttttagtagagacggggtttcaccatgttggtcaggctggtctcaaactcctgacctcgtgatccccttgtgatccgcatgcctcagcctcccaaagtgctgggattacaggcatgagccaccgtgcctggcttgaatggcatctttcaattgtaaaagttgttacttttgtctggctaacacgttgaaaccccatctctactaaaaatacaaaaaaaaagtagctgggcatggtggtgggtgcctgtagtcccagctactcgggaggctgaggtaggagaatggcatgaaccagggagctggaggttgcagtgagccgagatcctgccactgcacgcagcctgggcaacagagcgagactccgtctcaaaaaaaaccaaaaaacaaaacaaacaaaaaaaagttgttatttttgttagtgttattctgtattttaaaatatatgtaaacaatcttttgacttcaatgttataaccagtaaagtaaaacgtttggagtatttcatcatactacttatatgcagccataattctggctaattttattaataataaaccagagttaatatgcatagtcttcttcaggaaaacagaatttttacgttcggtttctttaatagaataagttggcagttacacactttgattccaggaattattatttgtctccccctttttagttgtcattttgtcatttttcatctctgatttttgggtcacaggtgttacgtatgtgataatgaggtccagtattgtagttcaaaccagttgggtcaagtggttgattatgtcagaaaacaagccagcattacaactccaaagccaggtaaaataatttgtttctttaatatacaccaaatgtcgatttgtgtatctgctgatacttagatttgttatactacctagcattacatacagctgagtaacattagttatggttgattgcaaactatgaaactatttttggtttaactataaggtattagaagggatatgagaaatgatctagtcagatgtgatgaaggccatagactaaggtaatggccattaatgctaagactaaggtaattcccataaccctagccaggcttactatagacctgccttacactgttcttactgtcgtacattttgtaatagcaagatttcagtctgtctgctgggataacataaagcatttgtgattccttctaatggtcagatatttcttaggttctttccatgcataattaaattaattggctgacatacagcatttgctttaagcatgttttttaagtttttattgtcacaagtatctttgtcagagccagaattatttgttttttactttaggattgatttttgacccacagaattcattaaaaaatttatttcatgtccatgttcttgattgttttatattcttaatttcacaaggtaagatgtgttcatttgtaaagaattttcgtgcagtaaaaaagggagatttataccaaagcacatactgtttggtttcatttatcaaactaatgcttactttaggtctgagtattttttgtttactgggttttgtgttttttttctggatggcaatttacctgtatctatttaaaatcaaatgggtgggtgggttggaaagaatgacttcaggtaaactcacaaactctagtactgtttcccaagtatacttctgcattcgatatgactgtattacacattttgctaaatcttttctttttttaaagcagagaaagataatggaaatattgaacttgaaaataaaaaattagaaaaagagagtaagaatgaacaagagagagaaaagaaggaaaacatggctaaagagaatcctcccatgaattctccttgccaaataaccgtgaaaggactcagtaatttgggaaacacatgtttcttcaatgcagttatgcaggtacattgtcatttttttccctttaaaaaagctgtccttttcctcatagaatctgctacttacattattgagttttttccacctgagtaatttatttctatgtatccaaagaaaactttttttttttttttttttttttttgagacagggtctcactctgtcactcggctggagtgcagtggcacgatcgtggctcactgcagcctctacctcttgggctcaagcagtcctcctaccttagcctccagagtagctgggactacaggcatgcgccaccactcccagctagtttttgtatcttttgtagagacagggtttcgccatgttgcctaggctagtcttgaactcctgggcttaagccgtccaccccctttggccacccaaagtgtttggattacaggcgtgagccaccatgcctggccaaagaaaacttaaggaaagttttattgcatgacagtaagagagtttggtgagcactcgggtgcagtgggtttgaaagaaatattgctgcttctttcatggagcttgcacttgggtggaggaaacacaggataacctcatatagaagcaaatacgtacctacaggtagtggtaagtggttgtgagagagtcatggtggaggattggggatagctacttctgattgggtggtgggagaatgccccactgaggtgatgaataagctcagaactgaagtagttatgacccaaatagagtagggagagaagcatctgtaacttttcattttccaagtatagagttttcagtgttggtcatgattttctgttttgatagaatagacacttaagaagtgtcagagttgatttgcctttaaataatttttctctttttttttcaccctacattctagaacttgtcacaaacaccagtgcttagagaactactaaaagaagtgaaaatgtctggaacaattgtaaaaattgaaccacctgatttggcattaacagtatgttctttaaacttttctagtctgtaactttcctctctgaatgtgtgttttctaaattattttaaataactgacactcatttccactgtttttgtttgttttgttttactttaggctactaacttaaacagtttcaggctaatagaagttataaggaggcattacatctgtttgctgtgtgtgtgctctgtttttctatgctcgagtgttaagcttccttcttgggaatgtgtatatgtttgagaagccttaggcttacattattatttttaacatctttaaggtgacttaagagctgtgtaaccaaataaatattaccttatccatttttattatttacattttgctttggctctttcaattcttaggtagtaagtgttccagataatctaaaactaaaatagtagagctgaattctgcataagacagtctgtgaccaaacagtttctatctcttttgatgtacattttaaacttttaaatggggcagttctgtcaggaacattggtagtatatgttaactaattagattttagtaaagtcagtgattccagaatttgactgaagaaagtaatttcttttcccatattcaggaaccattagaaataaaccttgagcctccaggccctcttactttagccatgagccagtttcttaatgagatgcaagagaccaaaaagggggttgtgacaccgaaagaactcttttctcaggtctgtaaaaagtgagtatccacttcgattgtgctttcagtgcctcagtgagatgctgagaaataatattaatattaaatagtaaaatataaaaatattaatagcattacatttagtcaaccctctatatacaaaaggcatagttttttttcatttggattttaaaatatattttatgtgatagttaaatctcccaagggtgttaatggactaaacggaaatttgtagaaaccagaactctctgaga

SEQ ID NO: 2183 - DNA, 6000 bp, Homo sapiens
tggtgtatgaacagagctttgttttaggaacactaaactgaaagaatatgcatgtgaagaaggaggctgaagttaggggaatgtttaggagactgttaaggaatccaaaccagacttgactgcattagtgtggtttaatctgggctggaaagttggacaagaagagtactttgagtgcatggttttctttttttttttttttttattttgagatggagtttttgctcttgttgcccaggctagagtgcaggcccagacgtgatcttggctcactgcaacctccgcctcctgagttcaagcagttctcctgcctcagcctcctaattagctgggattacagatgtgcgccaccacacccggctaatttttgtatttttagtagagatggggtttcaccatgttggtcaggctggtctcgaactcctgacctcaggtgatcccacccctggcctcagcctcccaaagtgctgggattacaggtgtgagccaccgcgcctagcgagtgcatggttttctaaatacttgttgacttaaatgttctcagttgcctgtgcatatgtaagttttaacaaaatattgattctagagtctaacattttcttttcaagattgtaagaatggcagaatttcatgagccacttccttgtttatgatagattatgcattctcccctcttgctgagtttttatggctttgaggtttatgattatgatttttttagggctgtggcagaaattctcaggagcagcatgccttgaagcactatctgacgccaagatctgaacctcactgtctggttcttagtttggacaactggagtgtatggtgagtttcagttcctctgcctcttgggtggaaattatttgaaatattagagaatggaaatgtttaaatatgtttaagaagaaagcaatttaaaatttttgtagtatgttttaaaataccatcactttcacaaagctaaagaatgcagtattatgagaagcttttacttggacgtttgcacaagcacaaacattgtaacatagaagacttaagaatctttacccctttgtttttcttgcttgtgatattataaggcatatagtggagatagggacgctaagaacaaatttcagataaaattgtaataaaattttggctatgaatttgcatgaaaataaatgtcagtctggtatgttatagatgctgcattgtaacatcattaaaacagatttttacgtcttaaaaatcattttcacagtagtcttcactgaatgacatcttttttttttttttgagacggaatctttctgtcgcccaggctggagtgcagtggtgtgatctcggctcaccacaacctccgcctcccaggttcaagcaattctcctgcctcagcctcccgagtagctgagattacagggatgcaccaccacgcccggctaatttttgtatttttagtagagacggggtttcaccatgttggtcaggctggtctcaaactcctgacctcgtgatccccttgtgatccgcatgcctcagcctcccaaagtgctgggattacaggcatgagccaccgtgcctggcttgaatggcatctttcaattgtaaaagttgttacttttgtctggctaacacgttgaaaccccatctctactaaaaatacaaaaaaaaagtagctgggcatggtggtgggtgcctgtagtcccagctactcgggaggctgaggtaggagaatggcatgaaccagggagctggaggttgcagtgagccgagatcctgccactgcacgcagcctgggcaacagagcgagactccgtctcaaaaaaaaccaaaaaacaaaacaaacaaaaaaaagttgttatttttgttagtgttattctgtattttaaaatatatgtaaacaatcttttgacttcaatgttataaccagtaaagtaaaacgtttggagtatttcatcatactacttatatgcagccataattctggctaattttattaataataaaccagagttaatatgcatagtcttcttcaggaaaacagaatttttacgttcggtttctttaatagaataagttggcagttacacactttgattccaggaattattatttgtctccccctttttagttgtcattttgtcatttttcatctctgatttttgggtcacaggtgttacgtatgtgataatgaggtccagtattgtagttcaaaccagttgggtcaagtggttgattatgtcagaaaacaagccagcattacaactccaaagccaggtaaaataatttgtttctttaatatacaccaaatgtcgatttgtgtatctgctgatacttagatttgttatactacctagcattacatacagctgagtaacattagttatggttgattgcaaactatgaaactatttttggtttaactataaggtattagaagggatatgagaaatgatctagtcagatgtgatgaaggccatagactaaggtaatggccattaatgctaagactaaggtaattcccataaccctagccaggcttactatagacctgccttacactgttcttactgtcgtacattttgtaatagcaagatttcagtctgtctgctgggataacataaagcatttgtgattccttctaatggtcagatatttcttaggttctttccatgcataattaaattaattggctgacatacagcatttgctttaagcatgttttttaagtttttattgtcacaagtatctttgtcagagccagaattatttgttttttactttaggattgatttttgacccacagaattcattaaaaaatttatttcatgtccatgttcttgattgttttatattcttaatttcacaaggtaagatgtgttcatttgtaaagaattttcgtgcagtaaaaaagggagatttataccaaagcacatactgtttggtttcatttatcaaactaatgcttactttaggtctgagtattttttgtttactgggttttgtgttttttttctggatggcaatttacctgtatctatttaaaatcaaatgggtgggtgggttggaaagaatgacttcaggtaaactcacaaactctagtactgtttcccaagtatacttctgcattcgatatgactgtattacacattttgctaaatcttttctttttttaaagcagagaaagataatggaaatattgaacttgaaaataaaaaattagaaaaagagagtaagaatgaacaagagagagaaaagaaggaaaacatggctaaagagaatcctcccatgaattctccttgccaaataaccgtgaaaggactcagtaatttgggaaacacatgtttcttcaatgcagttatgcaggtacattgtcatttttttccctttaaaaaagctgtccttttcctcatagaatctgctacttacattattgagttttttccacctgagtaatttatttctatgtatccaaagaaaactttttttttttttttttttttttttgagacagggtctcactctgtcactcggctggagtgcagtggcacgatcgtggctcactgcagcctctacctcttgggctcaagcagtcctcctaccttagcctccagagtagctgggactacaggcatgcgccaccactcccagctagtttttgtatcttttgtagagacagggtttcgccatgttgcctaggctagtcttgaactcctgggcttaagccgtccaccccctttggccacccaaagtgtttggattacaggcgtgagccaccatgcctggccaaagaaaacttaaggaaagttttattgcatgacagtaagagagtttggtgagcactcgggtgcagtgggtttgaaagaaatattgctgcttctttcatggagcttgcacttgggtggaggaaacacaggataacctcatatagaagcaaatacgtacctacaggtagtggtaagtggttgtgagagagtcatggtggaggattggggatagctacttctgattgggtggtgggagaatgccccactgaggtgatgaataagctcagaactgaagtagttatgacccaaatagagtagggagagaagcatctgtaacttttcattttccaagtatagagttttcagtgttggtcatgattttctgttttgatagaatagacacttaagaagtgtcagagttgatttgcctttaaataatttttctctttttttttcaccctacattctagaacttgtcacaaacaccagtgcttagagaactactaaaagaagtgaaaatgtctggaacaattgtaaaaattgaaccacctgatttggcattaacagtatgttctttaaacttttctagtctgtaactttcctctctgaatgtgtgttttctaaattattttaaataactgacactcatttccactgtttttgtttgttttgttttactttaggctactaacttaaacagtttcaggctaatagaagttataaggaggcattacatctgtttgctgtgtgtgtgctctgtttttctatgctcgagtgttaagcttccttcttgggaatgtgtatatgtttgagaagccttaggcttacattattatttttaacatctttaaggtgacttaagagctgtgtaaccaaataaatattaccttatccatttttattatttacattttgctttggctctttcaattcttaggtagtaagtgttccagataatctaaaactaaaatagtagagctgaattctgcataagacagtctgtgaccaaacagtttctatctcttttgatgtacattttaaacttttaaatggggcagttctgtcaggaacattggtagtatatgttaactaattagattttagtaaagtcagtgattccagaatttgactgaagaaagtaatttcttttcccatattcaggaaccattagaaataaaccttgagcctccaggccctcttactttagccatgagccagtttcttaatgagatgcaagagaccaaaaagggggttgtgacaccgaaagaactcttttctcaggtctgtaaaaagtgagtatccacttcgattgtgctttcagtgcctcagtgagatgctgagaaataatattaatattaaatagtaaaatataaaaatattaatagcattacatttagtcaaccctctatatacaaaaggcatagttttttttcatttggattttaaaatatattttatgtgatagttaaatctcccaagggtgttaatggactaaacggaaatttgtagaaaccagaactctctgagatttgggatatgatcctaagattttctaaaaatagcttcagagcttagtagactgaagattgcttttctgtctttttgtttttctctagagcagtgcggtttaaaggctatcagcagcaagacagccaggagctgcttcgctacttattggatgggatgagagcagaagaacaccaagttagcatgttatgaccattgtattttatgatcttatcttcataagctttctgtctcatttgatatcttacgagttaaaacaatgaaagctagttattaaggccatcatactttaaaattttttcttacaccagctttttcaactagtatgttttcaccattagaatgaatccagagaattagcagtaattctctttctcatgatggcttaagtttagttgatgtttacagcattaatgttctttaaagattctgttgtactaacctatacgaagagagctgccaaatattggaaattgtttctcccaaacccaggtgcagcacacccttacttttaattctgagtctgatttaatactgttttttgaacctaggaagtattttcattttgtaagagtcagggaacattggttgcattttaaaatttttgttacttgccaggatataaaaaaatgtatttggggtatgaattaatgagtactaataatagtgataataactaatatttatttcgcacttatttttatgccaatcactgttttcagtg

SEQ ID NO: 2184 - DNA, 6000 bp, Homo sapiens
tttctttgccgctcagattttggatttgggaatttctacaagtcaggagagcctctgtccacgtggtgtgggagccccccgtatgccgccccggaagtctttgaggggaaggagtatgaaggcccccagctggacatctgggtaggagccctgtgcgcgcagacccccttcccgaggccgcgttccccgagggcgccgtgttcccgggggcaccgccctggcgctgatgtggctctgtggtcctcaacagagcctgggcgtggtgctgtacgtcctggtctgcggttctctccccttcgatgggcctaacctgccgacgctgagacagcgggtgctggagggccgcttccgcatccccttcttcatgtctcaaggtgagtcgtgtggtctcgcctgggcaggggcctgtgtctcctgcagccccttcgtggctggcttctgagtccttgttgagtctgggaatcaggcccaggttactgtgggctgcgggagaaacccagcccatggatgccttctcagtgccctatttcgagggtggacgggtgcccttgctgcacaggcttgtgccttgcgcctgccgtccccgcccagtacccgcacccagggtgctggcatcatccctgagtccaacccactggctgtggctcacccggcttttctgtgtcataaagatgcctgtccacctggtgctcaggtgtggggcacggcagaagggtgaacctaagtggttctctgtgtggtggacacaaagtgtggcagcccccagggtctggatccctggctgatggctccccttgggtggcaggactgagccgatggcccggcccctgctcctgggccctggcgtgtcaaaccacgtggggcggtgggtgggagcgcagccgaggtcccggccgccctggctcagcctcctggcccctccacagactgtgagagcctgatccgccgcatgctggtggtggaccccgccaggcgcatcaccatcgcccagatccggcagcaccggtggatgcgggctgagccctgcttgccgggacccgcctgccccgccttctccgcacacagctacacctccaacctgggcgactacgatgagcaggcgctgggtatcatgcagaccctgggcgtggaccggcagaggacggtggaggtgagcctggccacacttgccctggcctcacccgcaggggctaggcagctgtctcaggggaagcaggcactcaccagctgagttaaaacgggagcacaggctaatttaggggccggcttgtccaccccactaaaggatattctcagtcacccaagaataacctgggatcgggtgggccctggggctccccgccatccccatgctgatctctgctcctcttgttcccagtcactgcaaaacagcagctataaccactttgctgccatttattacctcctccttgagcggctcaaggagtatcggaatgcccagtgcgcccgccccgggcctgccaggcagccgcggcctcggagctcggacctcagtggtttggaggtgagggggaggagtctcctcccaggccccaggctccctcccctgtcaggcaccggcttggagggcggttccttgcgtgggcagtgggtcccaggcctcgtggggaagggggtgccagctgctgggggctggactctgcccagaggccacttgtccctgactcatccctggggccggcctgtcacgccaccttctggcagcgcagcaccagcacctggtcctgagcccagcctggccagccagtgtccctccgtcagctgtcatgcccaccagcgaggcagcttgcactccagacagaagccagcttgtttcttctcttgatggcgctggtggtccggagtcgctcccctgacagcgtctttcccgtctgccggccccaggtgcctcaggaaggtctttccaccgaccctttccgacctgccttgctgtgcccgcagccgcagaccttggtgcagtccgtcctccaggccgagatggactgtgagctccagagctcgctgcagtgggtgagtgcccacagcgggtgtgcagagggctcgcctcagcccagccctggtgcccccggtgtgcccgggtcacctggagtccgagaagtcactggcttgtgtctctccaacgcagcccttgttcttcccggtggatgccagctgcagcggagtgttccggccccggcccgtgtccccaagcagcctgctggacacagccatcagtgaggaggccaggcaggggccgggcctagaggaggagcaggacacgcaggagtccctgcccagcagcacgggccggaggcacaccctggccgaggtctccacccgcctctccccactcaccgcgccatgtaagtgtccccgggggcccaggaggacaccggtggataggcttacggtcgacgtgagggtgggctaatttagaatggacgttttgcccggcagcctctcaggttggacttctcaggatttgccatttgttttaatccctgagaccacacagttgatgtttagagcctgccctgcatgtggtcgttccagtggaggatacagcatggggtctggcctccagcagggtcctccccaggccgcccctgggtgccgggagggcagccccttggcctgaggcccactatgacctgccccctgcagctgcaccgtgatggtggcttgcctttgtggctccctgggctctggtggcctcgagccctcttcccaccaggttgatggtggggatggggaggccagcgcagccatgtgtgcccagcagtggccgggggagcctattcctttgcactgcagcatcaaaagcgctgtcctccccccacaggtatagtcgtctccccctccaccacggcaagtcctgcagagggaaccagctctgacagttgtctgaccttctctgcgagcaaaagccccgcggggctcagtggcaccccggccactcaggggctgctgggcgcctgctccccggtcaggctggcctcgcccttcctggggtcgcagtccgccaccccagtgctgcaggctcaggggggcttgggaggagctgttctgctccctgtcagcttccaggagggacggcgggcgtcggacacctcactgactcaaggtgagccacgctcctcccacacttacctccaccttccccaggggaccatgtgtgtctctggcagtacgtgactttgtccgtgatggcagatggcaccccctgttctccaccgggcctgggtgggaccctcagtgctctgggcaggctggggtgctcagtgctctggtggctcggggcgtcacggcctgctgggatagacacacatgggtccctgagcacgcggcctccatggctggttctgaaagcacaggagacgactctgtgctgggcagcacctcccgacttggaggagggagggcccctggctgccggctgcctccacgccatcctggggcttaggtgccagactcctgtccagacgtgcttgtgtcacccgtcctttccttacccccaacctgaggcttggaaaccccttaagccaagggccgtggatgctgggctgagagccgggtggccgttgacctcctgattcattctccctgcagggctgaaggcctttcggcagcagctgaggaagaccacgcggaccaaagggtttctgggactgaacaaaatcaaggggctggctcgccaggtgtgccaggcccccgccagccgggccagcaggggcggcctgagccccttccacgcccctgcacagagcccaggcctgcacggcggcgcagccggcagccgggagggctggagcctgctggaggaggtgctagagcagcagaggtagggcctgcccccgccctgggaccccgggtgggcacacggcaggttatctcctcgaggaacctcatctgctaagtggttccctcctctctgtagcccagtgcacacccccgctcccagccagggagatgtgtggggcgtaggtcctaggtgctgagccatgggggtgcagcaggcgggcgtgtcctttaaagtccctgggtgggtgagggtggcggggagcgagggcgccttgtggccgcatctctgagctgctgagaaaccgggtggagaatgaaaggtggggcgcggtcagggatcagccacgcacctgccctcggcagccgcggctggcagctcctcgggcgggccctgccacacgggcactcggaaacccgagaaccctgcgagccggcgcagtgaccacctgtcctctgttcccacaggctgctccagttacagcaccacccggccgctgcacccggctgctcccaggccccccagccggcccctgccccgtttgtgatcgccccctgtgatggccctggggctgccccgctccccagcaccctcctcacgtcggggctcccgctgctgccgcccccactcctgcagaccggcgcgtccccggtggcctcagcggcgcagctcctggacacacacctgcacattggcaccggccccaccgccctccccgctgtgcccccaccacgcctggccaggctggccccaggttgtgagcccctggggctgctgcagggggactgtgagatggaggacctgatgccctgctccctaggcacgtttgtcctggtgcagtgagggcagccctgcatcctggcacggacactgactcttacagcaataacttcagaggaggtgaagacatctggcctcaaagccaagaactttctagaagcgaaataagcaatacgttaggtgttttggctttttagtttatttttgttttatttttttcttgcactgagtgacctcaactttgagtagggactggaaactttaggaagaaagataattgaggggcgtgtctgggggcgggggcaggaggggagcggggtggagggaacacgtgcagtgccgtggtgtggggatctcggcccctctctctgggttcgtcgtggttgagatgattacctcggacgtctacggaaacgagcgggcgcattgttgtccgcttgtgtgtgtgtgtgtgtgtgtgtgtgtgcgcgtgcattgattactatccatttctttagtcaacgctctccacttcctgatttctgctttaaggaaaactgtgaactttctgcttcatgtatcagttttaaagcagcccaggcaaagatcatctacagattctaggaattctctcccctgaaatcaaaacctggaagacttttttttcttattttagttgagaagtttcataaactgctcaaggattagttttccaggactctgcggaggaacggcaggaagaacctcagagagggcagaggtgacttcaaagtgctggggactccgtcctgagggtcacttggccctgagcccctgcgtgcccttgcggaagcccagaagcttcttcctgctgcacctcccgtttccgctgctgctgacgtttatgcatttcatgatggggtccaacaagaacacctgacttgggtgaagttgtgcaatattggaggctgactgtagggctgggcagctgggagacaggctcatggctcatggctcatggctcagggcggtgcctgccctgggccgggacccccctccccaccccccacctaggctttttgggttttgttcaaggaaggtaaagtgagaggtttaggtcagtgtttttaagtttttgttttttttttaaagcaaatcctgtatatgtatctacatgggagacaggtagacactacttatttgttacattttgtactatacgtttgtgttccaggtttcagcttccctcgctcctgttgttaagaagcgtccctgtcagcacaggtgtgcattgaggaaggggccccagggccttcgctccctcagcactggggtggaggcggcaggaaggggcggcccttacctggcaggtctgggcgcacctttagcaggtggactccgtggggctccaccagccagaagcctctggaaggcaacgaaggcaatgctgctccctgagtcca

SEQ ID NO: 2185 - DNA, 6000 bp, Homo sapiens
cagaggcttctgctctgcctctggggacctttgctccgtttgcggatgcggtttccttcttcctacagagaggcaggtggtttactccagcgctgcctgctcagcacagggtgacctcctgccaggctgtccatggtgctcttcctaagtgagcactcccccccgggggaacccctggctctgtttggggcctggctgactctcgctggggctggccccttcctgcacccccctcccccgccgtccgacctcagcatatggctcagggacacagacacccaaaggcctcttgggtcctcagccttgatatcggccacagccctgcttaaatgtcaagaaaacgcattggccacatgaataattcctcactaacggcagcgacagaaaccggaaccagaaaccctagagggctggagcggggagggccgactggcccgtgaacaggcacgtttctgctgctttgccggccttcgtggtccatttaagcagcccgtggaaggcctagcctgaaagtgggtgctgtctgagatggggaggggccctgggcccggtaggatccacacaactgtggcagccacggaaccacagggagccaagtgtaggaggtgaaggaagcaatgccctgggggcggacgctgggactgggcagtctctggtttgacctgttcgcgggggattcttgacttaacctgtggacaactgggccattccctgagggtggagggggctgggggcttttctcctacctgccctcttcccaggccagggccgtggcttcctgacctagtgcacacatgtctgtctgtcaagctctccagatacaatggggcaaaatgaccaacgtggcccccgggtccctgagaaggatgccgctgcagtggttaatctgattttctggcacctaaagccgctaggctgaagcctaaacaaaccaaaacaaaatttaaaaagtacaaaaccacctgaagcaaagccaggaagacagggaagggccttaggcgtcgaagatgggagggtagggtcgggaagaggaactcgtctgactcctggctgcactgggagattccttcctcacagagggcggcactggggccagctgggcacccatccctttgcaaaaatgctgccccacgctccattctctgtgtttatcaattgattttgagagttttgtgacatgccagtggccagcgttacaactatgaataataaatggacccatttcctgttggggtttccagtcttaaggcctaaaaaacaagatgaactccagaaacacggcaatcataagacaagctgaagaaagtccatgtggaaaggaaaactgacttgccgttttccacaaatctgtaataatatgcaaaccataataataaagtaccgttcctgcagactttgggagcattccttccattatgttcagtgaggagcttctccaatcatttgcttgtaccatccttacactcacaccatgtgttttatttttcctcgtgttaaaggcacggaagaccagaaaacagaaaagaaatcaaagcttctgagaggaaatacagcctcggggggtcaaggacacaaacaacaacaaaagacattgggtaacagagaccaggttgaagcacagacttagttatgagggtgccaggggttcccccagtggggagacgggacagccgttccaagcttggccttttcctctgtgcttcctgcctttctctgcagagcgagctccttgcccacgggcccagggaagggaaaacaggatggccatggttggcacagggctgttctgggttttggaagctcagggctgggtcagggtgaaaggtcaagtgcacctgagtttggggacctgttctgcggaggcagttttggctgcagtttttatttggtgctgatgcaatgtttccaaacagccagccaggtgtttgcaaatacctaagaccttttggaagactctggctagggtgggaggggtggggaagcctgcttcctggatgcggggggcagtatttcaagtcacaggctgagggactgaatggtgagtgtgatcaggggcctggtttctcccccaccccgccttttatctttgttcttttttgagacagggccttgttctcttgctcaggctggagtgcagtggtgcaatgacagctcactgcagcctcaacctcccaggctcacgccatcctcccacctcaggctcccaagtagccggccccacaggcgtgtgccaccacacctggctattttaaaagtattttatagaggtgaggtcttgctatgttaaccaagccggtctcaaactcctgagctcaactgatcctcctgcctcagcctcccaaagcactgggattacaggcgggagacacgacgtccagccttgtttttgtttagttctcctaggagcggattaacagggtgttgggacctccaaaaggaaaaaaggcagttgtacactgttcagctgaaaggaactaaaaatattcccccgtattcttggtatataaacctgggacaaagaaaaacactctgaacgattaaggaaaactttgggactcttcatttccttgaaagcctttgaaaaccaactgactcccaaacaacccgtgtgtgtgtgtgtgtgtgtgtgtgtgtgtgtgtgtgtgtggcgattgggaaatctgtggtcagaccctcgggcgaatgaggagaagctcatcctcgtttctccgggccctcctcccaggcgtccgtccaggcaggaaagcctcccgagaagggttccaagttttgtgccaactcccctgaattctcgttcccccttctgtgaagtagtgttatttaacacaaggaaaactgaccctaggctcgatccagaatctaactcccaaatgggtcctcaggcttaaaaaataccttcgcccacagcctctgtctcccctgaagaaaacgttttccgttcggatgaggcatcggccacgggcaagcaagtggtcccgcgcccccgtcccctacccaggcggccggcctggctccgtcaccgcccgcagcgtccgcccggggcccgcgcgggaagagggtcccagccccacatgctgcgggggcagccccgggacgcgcagacgccagcgccgctgagggccggggccgggaccggccgcgcggcgggggcttccagagcggccggtcacgcttccttaggtttcaagtttctaacttgctgaacatttcagattttaacagcaaaagcggctgacgtccccgcgggcaagcggcctctcggggtctgcagcgccccagggcatccgcgccgccagccccacgcgcgagcccgcgaggcccccgggcccccgcacgtcccgaggctctgagtctggacgaacgcaggccgcgtggaggggccggcgacccctgcccgagagccgtcccctcctggagggagcgagcacaaggcgcccgcgggacccggcccgagtgcccgagcgtggaggggcgggcgcgccctcggcggtggggccgcccgcagtgcccccagcgcccgggagggggcgcccggcggagcgcaggcgggcgggcctcgggcggcgggcgcccctgacgtcaccggcccgcggtcgccagggcaacggcctcatcccgcgcgcgtcagagccgccagtctcttggcaaccgcccgatctcccgctctccctccgcccggcgctcggccgcgcgtcgctctggcgtcaaagcgacgtcaatgggcggcccccgcccgggcggcgggggcggggcagggggcggggactacggggggcgggccggggcgggccggggcggggccgggcgccgcgtgcggcggagcgcggcggctccgggctgacatgcggcgcggccccggaggcagcagcagcggcggcggcagccggagcagtaggcacccgagcagcgccagcggccgagcgggcggcttcctggcctgggcgctccggtggcggcggaggtgaggcggcggcagcggcggcagcggcggcagcggcgggctccgggcgggcggaggtggccgccgtgggggctccgcgcgggcgccgggccggggctcggggttgcagccaccgcgcagggtccctggccttgcgcgcgcggggttcgcgggcggggttggcggcctggccgccctcgggctcccctttgttggggggccggggtaggagtgagtccgcggggctcaggggctggggagccgggggtcaggttggagccgaccgcgggcggagataccgggtgtggggggcgggtccgcgatccccgaggtgcctgggatgtcgggggtggggaccggacggatcgcgggcggcgggggcagggtgtgggagcggggcaggggacggtcctgggatccggatcgagccgacctcgggtggcagggccaggtgtgggagcgggtccgcgcccagaggtgctaaaggggtcgagggtggggacggaaccgacagcgggcggcgggaggcgagtgtggaatcccggctcagggggtcccgggatcgggacggaaccggactcgggcggcaggggcctctatgagagcgggtccgtgcgccccgcggggctcaagagggtcgggggtccgggtggagcgggcggcgggggcgggtccacacctcccacggggctggaggggcccgtggatagagtgggggcgacaggcgtgggagcaggtccctgcgtcccgtggggactgggggctccgcgggcacggatggagccgaccgcgggcggcgggggcgctggtgggctctgagctctgtgcggccccgcaggtgcgcgcggagccatggttatcatgtcggagttcagcgcggaccccgcgggccagggtcagggccagcagaagcccctccgggtgggtttttacgacatcgagcggaccctgggcaaaggcaacttcgcggtggtgaagctggcgcggcatcgagtcaccaaaacgcaggtgcgtgggggcggtgggacccagccggcggggcctccccactggacccggggcgacccgacctttggcgggtggaccccatgcagattcactgctccaggcttgattgtcgtggtgggtaaatagtaaccgtttttagttcggtaaagaaaaataatgctttatattatgttgctgcataatttggacatatattgggagaaagcagagaggataatagcaaaaaaaaggaccaacctaagattgcagtggttcatggactcagagctaaaccctgtaaagtgagcctgcaaatacttaagtcacttacttaactctgattattttaaataacattagtggttactttggttatgttttcccaacttcttgtgaccttctggagacagagtgttgagaaattaacttgcaaaaaatgaaatgtgtaaattaggttgagggtttcttttctttttttaaaaaaacccacagaatatcctttttctttttaaatttgtaggttgcaataaaaataattgataaaacacgattagattcaagcaatttggagaaaatctatcgtgaggttcagctgatgaagcttctgaaccatccacacatcataaagctttaccaggtaaggggtcagcttgcctttctctgctaatcctggcaaatgtgttatattttatttccaacagcataagtctgcaatttctgaaggtggcttcccttttggggagtgtgtggaagttgggcatttggttgtataaggtaaatagattgatttttataggctgtgcagatatatttacaattattttattgcttttggatcataattgagatttgcttcattagaattttatttagtatcctaacctgatccagttttaaatgtgtagaagtctgttgtaaatttgctttactatgaaaacagacaaacttatctgtaggtattgccacaggtcacgcatttagtataaaaggacaaatttgagtgaaactggaaacttctgcctttgcagataattattaaactttaaagccagctgctcttactggttttcatt

SEQ ID NO: 2186 - DNA, 6000 bp, Homo sapiens
tcccccatggtccgggcttggcttctctgggctgtgagatgcacaagtgaaacgcttcaatctccaaggccagagaccttccacccacaggcctcacgctccttcctgccacccgcttcccatcgcagctccttgctcctcagcttggctccaacagccccaagtccctgcctccctttccctgtcatcctcgcctggccgtgtcaggccgtgaagccgggacagaccacactgctctgtgcacaccccgggcaggcaggcgctgggcagcaggttgcagatggatgtggacggcgccaaggacccccactgggtctgtcttcccaatcgtggcctctgctcttcttcccctctgctgagagcctctgctcagcattcagagagggaaggtgtgggtggctgcctcctgccccatgccccccgccggggctccacctcttctctctcctggagcagttggtgttctcagggaaggtcctcgctcagtccacgcctggcaaatcccacggagaggcccggaagcagttccctccatggccactttcctgccagcattcttttcttactcatcatcttatgctgttactgtctccgcaactggaaccaacggtcctcgagagaaggtgtcttgtgtccctcctactgtgcccacaaccttcacgcagtgcctgacacacagcagggcctctcgagcctttgtggacatctggaggatgactccgaactcaccctcgcgttgcaccgtctcacctctctctggggacctgtcccttcccacagtgaacttcgaagcatgtctgtctgtcaccatgttctggcacagtctggccatgctcacctgtgtccacccgctgactcattgcagctggcacacttgttgcaaatggcagaaactcacattattttgcataagtaaatagtaaccaaaaaaaaaaaagatggtttaccatgctctacactagcagccagcatgtcacctggaaacaccgagacctgagctgacactcagacgtctccatctcccgggagccacgctccgtgtggccctggcagagtgcccaggataaagagcacggccagcacctgctccagtcctggtccccagtgtctgcacaaagctgcagcatcccagaggcttctgctctgcctctggggacctttgctccgtttgcggatgcggtttccttcttcctacagagaggcaggtggtttactccagcgctgcctgctcagcacagggtgacctcctgccaggctgtccatggtgctcttcctaagtgagcactcccccccgggggaacccctggctctgtttggggcctggctgactctcgctggggctggccccttcctgcacccccctcccccgccgtccgacctcagcatatggctcagggacacagacacccaaaggcctcttgggtcctcagccttgatatcggccacagccctgcttaaatgtcaagaaaacgcattggccacatgaataattcctcactaacggcagcgacagaaaccggaaccagaaaccctagagggctggagcggggagggccgactggcccgtgaacaggcacgtttctgctgctttgccggccttcgtggtccatttaagcagcccgtggaaggcctagcctgaaagtgggtgctgtctgagatggggaggggccctgggcccggtaggatccacacaactgtggcagccacggaaccacagggagccaagtgtaggaggtgaaggaagcaatgccctgggggcggacgctgggactgggcagtctctggtttgacctgttcgcgggggattcttgacttaacctgtggacaactgggccattccctgagggtggagggggctgggggcttttctcctacctgccctcttcccaggccagggccgtggcttcctgacctagtgcacacatgtctgtctgtcaagctctccagatacaatggggcaaaatgaccaacgtggcccccgggtccctgagaaggatgccgctgcagtggttaatctgattttctggcacctaaagccgctaggctgaagcctaaacaaaccaaaacaaaatttaaaaagtacaaaaccacctgaagcaaagccaggaagacagggaagggccttaggcgtcgaagatgggagggtagggtcgggaagaggaactcgtctgactcctggctgcactgggagattccttcctcacagagggcggcactggggccagctgggcacccatccctttgcaaaaatgctgccccacgctccattctctgtgtttatcaattgattttgagagttttgtgacatgccagtggccagcgttacaactatgaataataaatggacccatttcctgttggggtttccagtcttaaggcctaaaaaacaagatgaactccagaaacacggcaatcataagacaagctgaagaaagtccatgtggaaaggaaaactgacttgccgttttccacaaatctgtaataatatgcaaaccataataataaagtaccgttcctgcagactttgggagcattccttccattatgttcagtgaggagcttctccaatcatttgcttgtaccatccttacactcacaccatgtgttttatttttcctcgtgttaaaggcacggaagaccagaaaacagaaaagaaatcaaagcttctgagaggaaatacagcctcggggggtcaaggacacaaacaacaacaaaagacattgggtaacagagaccaggttgaagcacagacttagttatgagggtgccaggggttcccccagtggggagacgggacagccgttccaagcttggccttttcctctgtgcttcctgcctttctctgcagagcgagctccttgcccacgggcccagggaagggaaaacaggatggccatggttggcacagggctgttctgggttttggaagctcagggctgggtcagggtgaaaggtcaagtgcacctgagtttggggacctgttctgcggaggcagttttggctgcagtttttatttggtgctgatgcaatgtttccaaacagccagccaggtgtttgcaaatacctaagaccttttggaagactctggctagggtgggaggggtggggaagcctgcttcctggatgcggggggcagtatttcaagtcacaggctgagggactgaatggtgagtgtgatcaggggcctggtttctcccccaccccgccttttatctttgttcttttttgagacagggccttgttctcttgctcaggctggagtgcagtggtgcaatgacagctcactgcagcctcaacctcccaggctcacgccatcctcccacctcaggctcccaagtagccggccccacaggcgtgtgccaccacacctggctattttaaaagtattttatagaggtgaggtcttgctatgttaaccaagccggtctcaaactcctgagctcaactgatcctcctgcctcagcctcccaaagcactgggattacaggcgggagacacgacgtccagccttgtttttgtttagttctcctaggagcggattaacagggtgttgggacctccaaaaggaaaaaaggcagttgtacactgttcagctgaaaggaactaaaaatattcccccgtattcttggtatataaacctgggacaaagaaaaacactctgaacgattaaggaaaactttgggactcttcatttccttgaaagcctttgaaaaccaactgactcccaaacaacccgtgtgtgtgtgtgtgtgtgtgtgtgtgtgtgtgtgtgtgtggcgattgggaaatctgtggtcagaccctcgggcgaatgaggagaagctcatcctcgtttctccgggccctcctcccaggcgtccgtccaggcaggaaagcctcccgagaagggttccaagttttgtgccaactcccctgaattctcgttcccccttctgtgaagtagtgttatttaacacaaggaaaactgaccctaggctcgatccagaatctaactcccaaatgggtcctcaggcttaaaaaataccttcgcccacagcctctgtctcccctgaagaaaacgttttccgttcggatgaggcatcggccacgggcaagcaagtggtcccgcgcccccgtcccctacccaggcggccggcctggctccgtcaccgcccgcagcgtccgcccggggcccgcgcgggaagagggtcccagccccacatgctgcgggggcagccccgggacgcgcagacgccagcgccgctgagggccggggccgggaccggccgcgcggcgggggcttccagagcggccggtcacgcttccttaggtttcaagtttctaacttgctgaacatttcagattttaacagcaaaagcggctgacgtccccgcgggcaagcggcctctcggggtctgcagcgccccagggcatccgcgccgccagccccacgcgcgagcccgcgaggcccccgggcccccgcacgtcccgaggctctgagtctggacgaacgcaggccgcgtggaggggccggcgacccctgcccgagagccgtcccctcctggagggagcgagcacaaggcgcccgcgggacccggcccgagtgcccgagcgtggaggggcgggcgcgccctcggcggtggggccgcccgcagtgcccccagcgcccgggagggggcgcccggcggagcgcaggcgggcgggcctcgggcggcgggcgcccctgacgtcaccggcccgcggtcgccagggcaacggcctcatcccgcgcgcgtcagagccgccagtctcttggcaaccgcccgatctcccgctctccctccgcccggcgctcggccgcgcgtcgctctggcgtcaaagcgacgtcaatgggcggcccccgcccgggcggcgggggcggggcagggggcggggactacggggggcgggccggggcgggccggggcggggccgggcgccgcgtgcggcggagcgcggcggctccgggctgacatgcggcgcggccccggaggcagcagcagcggcggcggcagccggagcagtaggcacccgagcagcgccagcggccgagcgggcggcttcctggcctgggcgctccggtggcggcggaggtgaggcggcggcagcggcggcagcggcggcagcggcgggctccgggcgggcggaggtggccgccgtgggggctccgcgcgggcgccgggccggggctcggggttgcagccaccgcgcagggtccctggccttgcgcgcgcggggttcgcgggcggggttggcggcctggccgccctcgggctcccctttgttggggggccggggtaggagtgagtccgcggggctcaggggctggggagccgggggtcaggttggagccgaccgcgggcggagataccgggtgtggggggcgggtccgcgatccccgaggtgcctgggatgtcgggggtggggaccggacggatcgcgggcggcgggggcagggtgtgggagcggggcaggggacggtcctgggatccggatcgagccgacctcgggtggcagggccaggtgtgggagcgggtccgcgcccagaggtgctaaaggggtcgagggtggggacggaaccgacagcgggcggcgggaggcgagtgtggaatcccggctcagggggtcccgggatcgggacggaaccggactcgggcggcaggggcctctatgagagcgggtccgtgcgccccgcggggctcaagagggtcgggggtccgggtggagcgggcggcgggggcgggtccacacctcccacggggctggaggggcccgtggatagagtgggggcgacaggcgtgggagcaggtccctgcgtcccgtggggactgggggctccgcgggcacggatggagccgaccgcgggcggcgggggcgctggtgggctctgagctctgtgcggccccgcaggtgcgcgcggagccatggttatcatgtcggagttcagcgcggaccccgcgggccagggtcagggccagcagaagcccctccgggtgggttttt

SEQ ID NO: 2187 - DNA, 6000 bp, Homo sapiens
tcagcctcttgagtagctgggactacaggcgcccgccaccatgcccagctaattttttttgtatttttagtagagatggggtttcactgttagctaggatggtctcgatctcctgacctcatttcgtgatccacctgccttggcctcccaaagtgctgggattacaggcatgagccactgagcctggcctggtgaattaattttaattctggctgggcgtggtggctgatgcctataatcccagtgctttgggaggccaaggtaggcggatcacttgaggtcaggagttcgagaccagcctggccaacatggcaaaactctgtctcctaaaaatacaaaaattagccacgcgtggtggtgcacacttgtaatcccagatactcaggaggctgacacaggagaatcgcttgaaccagagagacagagtttgcagtgagccgagattgcgtcactgcactccagcctgggcaacagagtgagactctgtctcaaaaaaaaattttttaaaaaaaattctaacacaagacaaaggagcattttgattaaaccagtatttattaacagcatgcctgattctgtggaaagcagacttgaaccctggtcattcctactctcaggggcagcatgttaaggatagcagcctgcaagtctatctcttaaactccacttgtgtgtacaccttggtgatgtcattgtacctgccttcagggggttggtagttagggatcggtggtgtgtaatgtggcccttccttctcaaaggggaacaggttaggatcccgcttgatggcctcagcatggagcttcggggattccagttgcagttcctccagagcttcctgctgggcttctagcatagccctgatggtgtccctctccatcttacgctcttgctgcttgtacaaggaccacttcttcagaagcagagctctcctctcagtctcctcaaaggtgagctccacctgaggccgctctctgcaaagaagctaagggttaccaatctcactggcatgtaagtctgtgactgcaactgacacaagtattcccattgccagacacagacaggacttaggagataaaacaagtttgggacaaattaagaaatggaatgttgaatgtggctgcagctgcaactgatgcttggaaccaaggtcatttgctctctgtcaaaagaacagatgatctgaggagactggtagcacttcctctgcccaagcaaatactcccttgggtgagagaagacttttaacacctgcccctttatagatggtgcacactgcttacaaaacggcagcaggagctgttaaccctgcacacagtagaatcccaacaaataccaaccaaagatatctgcatgataaaacaggaggccaagggttttctactgttaggatgaggcgagggcttcagactccaggcccaagggatcagaaacagccaagactcctcatgcatgacagcaacaacatgaactccagagcagtgcttaagcatctggattattagatgtcttaggttctttcccacccagagccattcaagagtaccacccaaggatgctttctcctgcttccaaaaggagcaaggactcattagggccaagtcagctcaagcctactgaccaatgactatcacaggtgtgaactacagacacaactacctgaagttgatattactcctttgtcctgaggacttcatccctagagaaggatccttaccttgctttatccaagaactttagaggggtaataaaatcttcaataggaattagctcttgagtagccttttccagttttcggatcttccttttcaagcgctcctttgcttcttggtcttttttaggatctaccttcttcttttttcgaagaggttctgatctaatagataaagcaaatattaaacattttcctctttggtctcatgaacctactgagagacaagatggtaagtaccccatactgacctctccactgggggaaggagctgtgcatgactaactcatgagctcagcgtggtgaggaggtactccaccccacagtacttgtgagaactgtgtaggtgccatcaattacaagaaatagtacaaaagcagccgggtgcagtggctcaggcctgtaatcccagcactttgggaggcaaaggcgggcagattgcccaaggtcaggagttcgagaccagcctggtcaacatggcgaaaccctgtctctactaaaaatacaaaaattagctgggtgtggtggtgcgcacctgtaatcccagcttctcgggaagctgaggcaggagaatcacttgagcctgggaggcggaggttgcagtaggacaagatcgcgccactgcactccagcttgggtaacagagcgagactctgtctcaaaaaaaaaaaaaaaaaaaaaaaagtacaaaagcaacaagaggcatcagggtataaaatcgggaagtgttcctctttattgctgggattcaggtgtgccttgggattacactcaaaagtgaaaataccaaactgttagattagaagcttattactattaaaattgatttgtggactgggtgcggtggctcaggcctgtaatcccagcactttgggtgctgaggtgggtggatcacctgagatcaggagttcgagaccagcctgaccaacatccaacatggtgaaaccccgtctctactaaaaacacaaaaattagccgggcgtggtagtgggcgcctgtaatcccagctacttgggaggctgaggcaggagaattagtttaacccaggaggcgaaggttgcagtgatccgaggtcacaccactgcactccagcctgggtgacacagtgagactccatctcaaaaaaaaaagaaaaatcaaatcctttactatcaagattgactgaatcaagtatctacaaagagtcgagagtgccagatggaaatacctttaatacttgcatcttccccacactctccagggcctccgaatgggcagggaagaggaagggtcatggagaaacagaaacttaagctgtgtcctttaaaacacacaagaatcccttcaaggagaatacttacttcttgagaaactgctcaaattttaaaaattacaaacaacaatctatggtttggaaaatgttggaaaaacagaaaagcatcggcctaaatttaactgagaaactttgtaggctgttaattttgcaaaccacacatccagcattcttgctttgttctctacacatagactgacacctttacccccagaggtcaggccctcgattgagttttacctcatgggaatgagttcccagaaagacaacaatgacgctcgctggtgagtctctctaagctgcgtctgccaagttcccagaagcctgaaagatacaagagtatgtataaatatctgcttctccaggctaggcgcggttgctcacgtctgtaatcccagcactttgggaggccgaggcgggtggatcgcgaggtcaggagttcaagaccagcctggccaacatggtgaaaccccgtctctactaaaaatacaaaaattagccgggcgtggtgttgggcgcctgtaatccgagctactcgggaggccggggcagaactgcttgaacccgggaggcagaggttgcagtgagccgaaatcgcgccactgcactccagcctgggcgacagagcgagactctgtctcaaataaataaataaatatctgattctctcccacttcacaggaaaataaaaaattgcaatgctcccaaacccggggcacttctaactacttgatatgacagcaaggtcaacgtggaaggtttttcaaaatctttcgttcagaccacagaggacttaagcaggaccgctgctcgccagggtgctcagattttcatgcataagagtcacgaccagatggctcatccctgagatattcgtggactgggaggcgagcagggagcacaggcgagtcctggcggacagtcgcgaagaccccgcacgcgccctgggcactccgctatccggccagcgtccgcactcacccgctagtcgggcgcagggctagcgagatacttcgcagcacggaggccgtcatggctaccctcgccgcttccgggcgtgcgcccctccacagtccggcccgcggtgccccctgctgaggtccggcagaccaggcgcccagcgctcaggcgttccggctgcgtgggctgggacgcgcctgtccccgcccccgacgcagccccgcctagggtgtcagctgcgcacacacgagggccttgcgtttcacgcggctcggggtcctcccttccgtccccgccctgtgctgggagcgcgcctctgcagcgggcacagtctagccagtcaggccctagccggttggtcggtctgcgccctcgcgcgggcctcggctccgcagtgcagccggagcggccgagggggcgtccctctgctcctccgagtccaaatgttcatgtctaggcaaacggccccgatcttctaataaacgcgtccgccccagcctcccccaccagggttggctcgtcccccgcattcgttcgagtccgaagcccggatcgcattccggcgccggcgcggagcccggcgctcgcaagatgcccaatagcgcgtgttgatgaatgacggaagctagttaataagtcggactcagactggcgaggcagagctggtgacgggcggtccacgccacctgggccccgcctgcctctgcgggcggcccgggttgcaactgcaggccccgctcgctgtccgccgtccaggcgaaccgccctttctggggcgcccgcgcccgggcccgacccgaagcccctgccagcggaggagccggggcggcccagtccgcgtggggagcggtttcccgccggggcgatttggcaggtgcgcgccgtgacttccggcgttgcccgggagccgcctgaggaggagcggcgcaggggatgcggctgtggtggcggcggcggcggccgagcgcgggtggcggctgtggcggcggaggggggcgcgggccggcgatggcgcggcggccctgagggcgcggggcgggcggcggccggagggcgggtggcgcgggaggaagcggcggcggtggctccatggcccgggcgcgctgagggacccggcgctcgcctcagcccggcggcggcggcggccgaacaatgaagctcctgaagccgacctgggtcaaccacaatggtgagtgcgcgcaggggtcgcgggaggccgagcccggagtcgggtcggggtctggagtcgagtcggggcgcgcgcaagtcctgcctgtctcgcccctgacgcccggtacccggtgcccaagccaagaagccggcgggagcggactttgtcctcagcgcggagaggctggtgagccccagcacgtgctccgggttgaccgcagcgagggccatcttcgcccctggctcttgctctgagtcttccgctgcccacctgtggtccttggaggggccgcggcctggctcccaggagcgggccttggtgccagccagtgccttccactggtctgcatcgcccgagaagtgctcagacggtcctgaaggtgaaaccgggatgaaatcccccttgtggcctttcagtggcaggatgaagatccgaaatctgcaagagggactgttactgcccctctggatctggggacagtgcccccagttggggaattgtggtccctaaataggagggtttgggggccccgggcccccgcgaaggatccacgattaatgctgagctgggacatcagggtgaactagggttgggcagatagggcacaggtgtgttctagcagaggggcttcttagctctgtggcagtggctccaaagcacacccttggggaacggactcatccaccccatatcttgactctgatacagagaggctagtggtaatcagtttcgtcatagttctgccttgttggcagaactgctgcaggagttggtgtttgctccccgggtagatgaaaaaagcgcgcctccccctcccccaccccactctgctgacagcactgtagc

SEQ ID NO: 2188 - DNA, 6000 bp, Homo sapiens
ccttagcactattgatatttggggctagataattctccatgagtgggctgtcctgcatgctatacgatgtttaacagatttgtcccctacccacttgataccagtagcacgtaccctgcccaaccctgttgtgacaaccacaaatgtctctagacattgccctgtagaaccactgatctaaagcaactgccatgtttatctctcaaccactgcaatcatataacctcaccattaggatcctttccctgccaattctcagacataggtctgcagtgccctccggcagcaggctggaccttacccacccactcctaactttatcattatatgattctgcctacattttcccttcaagctgaattatttaattttcatgctgatgtctcagtaggacagcttcaaatccttttcagaatgacacaaggtaggggtaaaaataatccaatcgcaggacaggagaaaatacacaccataaggccatgtgattaccagcaaattaccctgttcttgaaaatttcccaaatcccttttcataacactgccatcaaagtgtgaaccaaaggccaaaggtggacaagagctctttcagtcctggccctcttggttagaactggcttcaccaaagagctgagcataagcgctgtctgcccaggcatgagaattccagaaaaaactcaggagcaaaggcccagagttgggaagagccatgaatctcaacgagattttctaaacatacaaactccatatttctacaaactttaaaaccagaaacctagttgtttttactttctgaccttaacctaacttagaaataaagcttattttggtcaattctaaaataaaatatatagagaatactgtatccaagaacacgaagtaaaatgtgtatgtatgaacaataactgacacatcttctatataaatgatagctattatatttcaatttaacaatcttttatatttggtcccaggataaaatggaagaggtaagtcttattttaccaaggcccagaagtagagttataagtccaagaatttacagctagtaaatgatgcagttttgaacccagtctgattccacattcaaggctcatttcactacaacgtgacaacttcaagattaacttattgataaccttagacaagtgcttctcaattgggggtgattttggctaccaatggacattggcaatgactggagatatttttggttgatacaactagaagttgtatcaacttactctaagaaggtgtttgtgaagtgctactggcatctggtgggtagaggccaaggatactagaaacattctataacatagatgacaatcacacaattttatggcccaaaatgtcaacctgctgaagttgggaaaccctaccttagaggtgtctctattatcagccaagaaaatgaagaccaaagtacacccacatttcaataaatacttcttctcctgttctagctaccctctccactttgaatggattccctgccacaccagagaaaaatgctgagctgtctgctacttccccctttagactctcgaaaaacagaaaaagtatgttcatgctgggtgcagtggctcacgcctgtagtcccagctactcaggatgctgaggcaggaagatcccttgagcccaggtatttgagtctagcctgggcaacactgcaagatcccatttctattaaaaaaaaaagttatgtttgtgcttcacaaaattggagacatgaatatagaacaaggaagccagaaagtgcaatgatggctttacaaaagcaagcacaattttactggccactacccacccctcaggcttccggctgagcagcccctgctcccagcagccaccaatactcctacagtatttaaaggcctgctcggtagtgattcagaccagcatcatctcctccagggcagtggtaatttacctcttgacagtccttctgaacattccatgagattttaaaagaaaggaaatttaacaaagaacaagtttaaaagaagttaaatcccatcctgccagagttgccatatctttttttttttttttttttttttttgagatggagtctcactgtcatcaggctggagtgcagtggcgcgatctcggctcactgcaacctctacctcccgggctcaagcgattctcctgtctcagcctcccgagtagttgggactacaggtgcgtaccaccacgcccagctaatttttgtatttttagtagagacggggtttcaccatgttggccaggatggtctcgatctcttgacctcgtgatccacctgcctcagcctcccaaagtgctgggattacaggcatgtgccaccgtgcccagcctctttttattattacttattatctcagatttctaaagcacttaacagtttggggagcatttttatatctacgctcccaactgagtatcacaagcatactatgaagtggttagagtagatattatcatgctccattctagggctgtagagaggccctcagcaataagggccactgttgtgcttgctctgccaggctgatgcacttggctgctgatctgagtgtagtctcttattcatttgtacctagttcgtcacttaagcatcttgacttacttatgtttacatagcataaaacttttggcctacaaaggagcttatcaaaaaggaacaagttatatgacagtagaagagaggctggagaagggtaggctattcacaaaaactgatttaggtaaagcattttaaaataaaaattctatcagaccttcacacagtaaactagttcataataacatttttcctttcctaatcacaagcatcataattcataattacaatatttgtccagttctccagggaaagatctgcacagtacacatcaggaaatgctcttggagatcaacaggagaaatgaaactaaaactcaaggcttcggctttcatgcacagtaaacctaacttcatcttgataaattatgaaaacctcagctttcttacctgttttagccaatatttatcacatacccatcatgtggaagaggttgttcaatgcagtagggcatacagaagggactgaggcagtccctaccctgggggcatatggaaagtaccctcacaccttccatgccaggcaaaacacacagacagtgatacagcacatctaccggggtaactcaggatgaacagtttcaaaagaaacacgtgaacctagtccctgaaaaatgggaaagatgtcacacaagatggaaggagagagaggtggcaggaggagaacacacacatgatcagttcagtttagttgtggtagtagagagcatcctgggaccaaattcaaaacgaaaaagccacatgttaaaatatctattctcgctcctaaagaaaacggtagcaccctgtagtcgcactgcaaagtagaaatgaggaacaagacagcatcagggtgaccctttgcctgtcaacagtcagacaggccagaatcaggccctgggctggaggagtctccctgggttgatttctgtgctacagtgctgtcagcagagtggggtgggggagggggaggcgcgcttttttcatctacccggggagcaaacaccaactcctgcagcagttctgccaacaaggcagaactatgacgaaactgattaccactagcctctctgtatcagagtcaagatatggggtggatgagtccgttccccaagggtgtgctttggagccactgccacagagctaagaagcccctctgctagaacacacctgtgccctatctgcccaaccctagttcaccctgatgtcccagctcagcattaatcgtggatccttcgcgggggcccggggcccccaaaccctcctatttagggaccacaattccccaactgggggcactgtccccagatccagaggggcagtaacagtccctcttgcagatttcggatcttcatcctgccactgaaaggccacaagggggatttcatcccggtttcaccttcaggaccgtctgagcacttctcgggcgatgcagaccagtggaaggcactggctggcaccaaggcccgctcctgggagccaggccgcggcccctccaaggaccacaggtgggcagcggaagactcagagcaagagccaggggcgaagatggccctcgctgcggtcaacccggagcacgtgctggggctcaccagcctctccgcgctgaggacaaagtccgctcccgccggcttcttggcttgggcaccgggtaccgggcgtcaggggcgagacaggcaggacttgcgcgcgccccgactcgactccagaccccgacccgactccgggctcggcctcccgcgacccctgcgcgcactcaccattgtggttgacccaggtcggcttcaggagcttcattgttcggccgccgccgccgccgggctgaggcgagcgccgggtccctcagcgcgcccgggccatggagccaccgccgccgcttcctcccgcgccacccgccctccggccgccgcccgccccgcgccctcagggccgccgcgccatcgccggcccgcgcccccctccgccgccacagccgccacccgcgctcggccgccgccgccgccaccacagccgcatcccctgcgccgctcctcctcaggcggctcccgggcaacgccggaagtcacggcgcgcacctgccaaatcgccccggcgggaaaccgctccccacgcggactgggccgccccggctcctccgctggcaggggcttcgggtcgggcccgggcgcgggcgccccagaaagggcggttcgcctggacggcggacagcgagcggggcctgcagttgcaacccgggccgcccgcagaggcaggcggggcccaggtggcgtggaccgcccgtcaccagctctgcctcgccagtctgagtccgacttattaactagcttccgtcattcatcaacacgcgctattgggcatcttgcgagcgccgggctccgcgccggcgccggaatgcgatccgggcttcggactcgaacgaatgcgggggacgagccaaccctggtgggggaggctggggcggacgcgtttattagaagatcggggccgtttgcctagacatgaacatttggactcggaggagcagagggacgccccctcggccgctccggctgcactgcggagccgaggcccgcgcgagggcgcagaccgaccaaccggctagggcctgactggctagactgtgcccgctgcagaggcgcgctcccagcacagggcggggacggaagggaggaccccgagccgcgtgaaacgcaaggccctcgtgtgtgcgcagctgacaccctaggcggggctgcgtcgggggcggggacaggcgcgtcccagcccacgcagccggaacgcctgagcgctgggcgcctggtctgccggacctcagcagggggcaccgcgggccggactgtggaggggcgcacgcccggaagcggcgagggtagccatgacggcctccgtgctgcgaagtatctcgctagccctgcgcccgactagcgggtgagtgcggacgctggccggatagcggagtgcccagggcgcgtgcggggtcttcgcgactgtccgccaggactcgcctgtgctccctgctcgcctcccagtccacgaatatctcagggatgagccatctggtcgtgactcttatgcatgaaaatctgagcaccctggcgagcagcggtcctgcttaagtcctctgtggtctgaacgaaagattttgaaaaaccttccacgttgaccttgctgtcatatcaagtagttagaagtgccccgggtttgggagcattgcaattttttattttcctgtgaagtgggagagaatcagatatttatttatttatttgagacagagtctcgctctgtcgcccaggctggagtgcagtggcgcgatttcggctcactgcaacctctgcctcccgggttcaagcagttctgccccggcctcccgagtagctcggattacaggcgcccaacaccacgcccggctaattt

SEQ ID NO: 2189 - DNA, 6000 bp, Homo sapiens
tgctaacttttccacttcccactgccctcagtacaccttggcctggcaggcttcaggatgacctccgacctctgggagtgcaagttcctctgggatagctgtgagagacccaaactcacctcttctaaccgtgtgcgcttctcagaaggctctgacccatcactgtcatttcctgaatgctcttcatcctcctcttcatccctgaagatgtcttcataggcgggaacttcaaggtcatcatcttgtttaatgagtaatttgatctaagttcaaaacaaaaaggaattaagcctctcctctttctacggaaaactatacaatatgttcttctgcagaatcttatcatttcctaataagctgactcagtttcctgttcatacaaatagctacctatttaacaagagttccaggcttctaaggaattttcttgttttcattaccagtgaggcaccagagttacaccatacgtggtatgcagaaattatgaaaatctgaaaacagttctttgagaaccatctagtctacttaagtctggaaacacagcatcctcttacgtcatacaccaataaaatgaacgccccacaacttggcctctgtctgatataggacatgaagatgtgtaacccctaagtggtgactaaaactcctgtctgaaagcaactccaggctgatttttcttttcttttttttttggagacggagtctcgctctgtcgcccaagctggagtgcagtggcacgatctcggctcactgcaagctctgcctcctgggttcatgccattctcctgcctcagcctcctgagtagctgggactacaagcgtccaacactatgcctggctaattttttgtatttttagtagagacggggtttcaccatgttagccaggatggtctcaatcttctgacctcgtaatccgcctgcctcggcctcccaaagtgctgggattacaggcgtgagccaccgcgcccagccaagactccatttcaacaaaaataaaaacaaatatttgctgggcgtggtggcatgtgcctgtagtcccacctactaaggaggctgaggcaggaagggtcagttgaacccaggagtttgaggctgcagtgagccatgattgtgccagtgtactccagactctccttaaaaaaaaaaaaaaaagatgacaaagaccaagttcttgtgttcaggctgttcccagtcccacagggtagtcagacacacaccttaccaagaacaccaggtgagacattgtacatggcataaaaagtacagacagtttgagggcatagcacaaaaagtacctgggtatcgttgtatacattgacgacattgactggcctatgggtgtcacacacaaagaatatagtgtcttcatcaggttgaagaatatccaataggtctacattagctccacagtttatgagaataaaataatgaaactgaaaaaaaggaagatattgtaaagtagctatatcgaggaggccccttttccttcatcactaagcctctgagttgttctgcttaaactcactcagtccctgacatgtggcgaggcccacgtggcaagggactccaaaaaatggccaggctggcatgctaagtgctttagcatggtgacacagcagggtgggccctggggctcccagttttccccaggagcacgctgagactcagcaagcccaagtctcgtggacaggctcaagaaactaatgaggagcagaccaagacttcgagcacgtgattgggtctctccagacctcacagtactatgctgcgtgcctctccaggctaatggcatcgtacaggtttaagtttttagcaaatactttatgggtacttaaatattaagtcctttatcacactctatcactatagcactttctttccttataaataccaagctggtgcgggtccttgacataataacaggaacatcaggagaggatttgtctctgccaaaacaatcctagatatggctagggactccagggaccctcttccatgtcccatcccctctctgtggggtgtacaatgtcccatctctcatttggccccatgcagaggtgggaggaatcctggcatctattgtttaaatttattcctggattttaagttggaaaccaggatgcattttctcagagaaataacataaaatagtagtgtattctaaaataattttaactaattccagcactttgggaggctgaggcaggcggatcacttgaggtcaggagttcgagaccagcctggccaatgtggcgaaaccccgtctctactagaaatacaaaaattagccaggcgtggtggtgggcacttgtaatcccagctagttaggaggctgaggcaggagaatcgcttgaacccagaaggcggaggttgcagtgagccaagattgcaccatgacactccagcctgagtgacaaagcgaggttccgtctcaaaaataaataaataaaggctgggcgtggtggctcatacctgtaatcccagcactttcggaggtgggcagatcacaaagtcaggagatcaagaccatcctgactaacatggtgaaactccgtctctactaaaaatacaaaaacattagccaggtgtggtggcgggtgcctgtagtcccagctactcaggaggctgaggcagaagaatggcatgaacccaggagacacagcttgcagtgagccgagatcgtgccactgcactccagcctgggcgacacagcgagactccgtttcaaaaaaaataaaaaataaaaaaataaaccaaaataaaataaaataattttaactagaccatattaaaaactgctagattccaagcaccttacaatcaaatttctgcaaaacaagttaaaacaagttcaaagttggggctatccacattcattatctttttttgctgtcaattttgcttctacaacttgggcgtggtaagtcaccagtaaatacagcatgtttttctcttccatattgcctaatgtagctgatacttaaatacacgcttaatctatcgtggaaatagaatgctgtgtcaagaaattacaattgagtaaaaagccacgttattctaaaacgcatcttcaatacctgttctttatgctcaagaaatgcagtttcaagttcttgccacccagaaactggaaccagcgtatattgcacgtggtcacactggaacaaggcctggagagagagtgttttcaaagcctatcttatttaggacattagcaatttaccttgaaaagaaactgaggaagattagacgggttgagagacaaaagacacgggataacattaaagctagtgaaatgcttacgggaaaagctaggtgctagggatatgagcgtttaccataccattctgtgaattttgcaaattaccaaagtaaaacatcggggagaaatgccgatttaacttccaggccttctgaaaagttcctgatccaagggcctgaccaaaacaacgtaaatactatgccctattcaaaaccaaactaacgatcttccctaatagactaggggctcccatattcccagcaacacctgtgacacgactatacccacagttgtcacagattcctctctctcaaatcccccatttgagaggccacgacagatccaaagtttcccccaaatgcaactgctgtgttcacctattaatattaatagcttattgcaaaaatacaaactagtctctttaccttttacttaatcctttatcccaccccacaccgttgggacagggaggcaacctctcctccgagtctctctcctctcacttgctgttcacctcctgccctgctccctctcccaccctaagccctcagcacccatcctgacactctgcccgccctgcgcccccacgcagcaccctcacctcgcgcgccggccccgccctcctagggtccgcagaactcacctgaaggatcttgcacgcacacagagcatccacgtccgaggccacgaagagaaggaccctctatcggggaagagcagaccggctgaacacggcgacccgaaccccggccctcccctgcctcccggtcacccacggtcgctccccctcatcccttccccaccggcaaggcctcggcgggggtcccggactgggcgtcacctggctctggaccacctcgtagaactctttgcggaaatcggacacgaacatagccacggcggccggacgcctggcgctcgcgctgaggtaccaagagcccggcggcggtcaagactcccgccaaatcacggctcctccgattggtccagggatcaccaaccaatagcttcttagttcccagccttcctttctttctgattgggccacattggaggcggccattagcgctctgccattcacggccagaaaactccagcccgcccccaaagaagcgtcacctctgaggccgaacgcaaacactgttgcccccttcaactctgactcgcttttacccagaaaagcgacgctgggcggacatctttactttgggaagagaagcctactgcctcccactgggaaccctcagggaaagtatacttctaaccatacattaaactcagtcacatacccaatggggcagcatttacgtttgcaataggtttttggtgtggtttgaagaaggatttgtagcttagttccgcccgagtcctcgatggctgaagcagaggcagtctgggtagtgcattgtgggtagtgtagtcgtaaggacaatgggccctactaaattcgtctggaggggaatactgtcaacacgtaatttaaaataacgtttaaaaatacctataaaaggggaaataaatcacgaaagggcattttaatgcttctactgagggtgttttagagcctagcgtcttcgcctggccttttctcttttgcagccgacgctttgtcccgggcaccccccctccgggtctcgggtccggcacttccggtgagcctctggggcgtaccggcttggcgcggcggcagcggcagcggcggctgggagagcggtcggcggggtttcttcgttgcattgcctgagaggagcggagtctgccaggtggtgtccatcatggtaagcgctgacgggcagcgggcgggggctgggccttggcccggggcctgaggtagggcccggcggggcagggcggggcgggacggcggcggaggtgccgagtcacccgggcctgagtccggcctgcaggctcatcggccgcaccgggcacaagcaggacccttgaccactaaccgcctgtggtcgcgtccgccggtcctgaacgtggctcgcattctgtctcagccggacttgccctccttgacgaaagaaaggaaggtttgtgtccattcacgggtttcccaagtgctggacgcgcaacaggtttccataaacccaaagttagttgcaaggttgctggggatgggaacagaatcagggcgctccccagggagaatccgtagtgggcatcccccgctcttgggggacacccagctcttgccccagctccgtgagctccgtgcctacgggttcgtgccttcgaatctgtacagcggtgttgtgttcggtaatgataacgatggaagctaatacctgctggtacatttcctgttacacagcttttaacacctgtactccctcatcgcggcttatttcttttaatccctacaatccctttggaagcaaggatgatgatgattttaaacatgagaaaactaacgtttacagaggtactttattcgagtcacagaagtagggactggagagttgaagccaagtctgtctggctgcaaagcactctacggtattgtcttcctgtcacctgtttattttagtaaagacaaggaatgattgttagattttatcccaagtgtgtcactgtcaaaccctggcttatttctattcttgagttcatccactcaagaatacctgatatgttccaggcagtgtgctaggtctcgggattgaaaaggaaagtgagagatgggatcgggagcagcaaagaaggggcagaaggtcgggttcatgggtaaactgc

SEQ ID NO: 2190 - DNA, 6000 bp, Homo sapiens
attcacaaccagatgctgacaaagggcactggtgtctggatgtactgaggagcccatgctgactcttggtgtccatatgtacattatctaagtccttaagtcactcagaagatacttactgagttggtccagggccgagggtggcataattactgtggaaagaacatttaagaaatattaaaaaataaaaataaaaaggacagaccaaaggcaagatgcagtttctttatatctaacaaaaagccttaaactgtttttagggtagccagaatgtcccagtgatctttcatgaagaatcttacttgatgtaatttattttgggaactgaatggttatcagccataaacctaaccataattagcaccccaccccaacagagcaagtcagggataaatcccagcaccattttcacagtaacactagcttctgactcccacatgcaaagtaagtactgttgaaggctacagcattgcagacttagggcaggaaaagttactattcaaataaaaacaagcacatactcttccctcctttctccacatctgacctgtcattaggccctgctagcatggacacagagaagcagcggtactgtgtggagaagcggttttggaagaccctgggaatagggtggtcgaacatgttgaaagagaactagaaggaggaaagagaaacaagtattaaaacaaaggtacatttcttcatgtcaaaagccaaaacatgtcagagtaattaatgctactaaacattgtcagagaacacaatgtactgaaatcttcaatgtaatcttactaaatacaaaacaggccatgccaagcctgtcctgaacctttttcagggctatgctcccatcttcatcctcaggatcaaggcccaacctcttgcatacctcagagacttgtactgacagccccacagactcctgcctgggctagttcctctgccttgaacacttttcctattatcattaatctaaacaatatttgttaattgaaacatctctttattgagtgcctactgtctgccaggctctgatatgagcacaagggaagcaccactccagtgatgtctgtccactaacaaaatagataccacccctgtcctggtgaaaatgacactcaaagcaagagagatatacactccaagcaacggacacacacacatgtgtgtctggcagttctgaagacaagcagcagggtaagtagacacagggctcctgggaatgctattttaaataggtggttaggaagggactctgcacaaagacctgaatgctatgagagggagccaggcaaaaaagagggaaagacattccaggcagcaggaagaacaggtacccagtggttgcaccccttcccctgggttccaattaccatcctttcctttccccaggaagcctctcttgctctgctgagggtcaggtctagtgcctctccagcgtgctctcacagcacaaagtaggtacacgttacactatgttatgatgctttcttacagcaacaagcaaagctaaaacatgatgccattaaaaagataagatcctagatcttaaactgtagactaagatgaggcttagcaaacatgtatcaatttgaaggttttctcaaagtacagtattcctcccaccccccacccccatatccacaggggatacattccaacatccccagtggacgcctgaaaccacagataatactgaaatctatacatactatgttttttcttatacatatctacaattttcttatacatatctacaataaagtttaatttataggctgggtgcggtggctcacgcctataatcccagcactttgggaggcagaggcaggtggattacctgaggtcaggagtttgagaccagcctggccaacatagtgaaaccctctctctactaaaaatacaaaaattagccgggcgtggtggtacacgcctgtaatcccagctactcaggaggctgaggcagaagaatcgcttgaacccaggaggtggaagttgcagtgagccgagatcgtgccactgcactccagcctgggcaacagagcaagactccatctcaaaaaaaaaaaaaaaaaaaagtttaatttataaattaggcacagtaagagattaacaattaataataaaacaattacaacaatatactgtaataaaagttatgtgaatgtggtttctattttaatatttttggaccatggttgacctcgggtaactgaaaccacctaaaatctcacaggaggatatatattcaaaagaactggaggcagaatcaagaagagatttttgtacaccccgtattcatagcacaattattcataatagctaaaaggtggaagcaactcaagtgtccaatgacagatgaatgaataaacaaattgtggtatggtatatacatacaatgaaatattattcagcttttaaaaggaaagaaatcctgtcacatggatgaaccttgaggatatcatgccaagtgaagtaagtcagtcataaaaggacttatattttatgagtccgcttctaggaagtacctagagtaggcaaattcatggagacaaagtggaacagagattgacaggggctgtgaggagcagaaaatggagagctattgtttaatgtgagtagagtttcacttttgcaagatgaaaaagttctgaaaatctgttgctcgtgaatgtactcaacactattgaactatagactgaaaaacggttaagatgataaaaatttggtttttttaaccacaactaaaaaaaaatctgtattagagaaaatttcttgacttgattccaaatatatatttagtagaaggaatgccacctactgacaaagcagtttactagcaactccaaaattagcaagctgaattagccatctcccaaaatgcaaacatagcatgttcccgcctaaaatctgggatggttctttactccctggcactctaacacagtaatttccaatcttttgtctttcttcttttaagcagcataactgttcagctaaatcttggccagaaccataacacaggaaatagcgtttctgggtgaacaaggccagaacagggtaggggcttgcttcccttgagtgcttctcactagccaacctatgtaagccatttcttctctttgaatataaaaggtaaatccgcacaaaggggcaacatacttaacaacctgcctgcagtttacccatgaacccgaccttctgccccttctttgctgctcccgatcccatctctcactttccttttcaatcccgagacctagcacactgcctggaacatatcaggtattcttgagtggatgaactcaagaatagaaataagccagggtttgacagtgacacacttgggataaaatctaacaatcattccttgtctttactaaaataaacaggtgacaggaagacaataccgtagagtgctttgcagccagacagacttggcttcaactctccagtccctacttctgtgactcgaataaagtacctctgtaaacgttagttttctcatgtttaaaatcatcatcatccttgcttccaaagggattgtagggattaaaagaaataagccgcgatgagggagtacaggtgttaaaagctgtgtaacaggaaatgtaccagcaggtattagcttccatcgttatcattaccgaacacaacaccgctgtacagattcgaaggcacgaacccgtaggcacggagctcacggagctggggcaagagctgggtgtcccccaagagcgggggatgcccactacggattctccctggggagcgccctgattctgttcccatccccagcaaccttgcaactaactttgggtttatggaaacctgttgcgcgtccagcacttgggaaacccgtgaatggacacaaaccttcctttctttcgtcaaggagggcaagtccggctgagacagaatgcgagccacgttcaggaccggcggacgcgaccacaggcggttagtggtcaagggtcctgcttgtgcccggtgcggccgatgagcctgcaggccggactcaggcccgggtgactcggcacctccgccgccgtcccgccccgccctgccccgccgggccctacctcaggccccgggccaaggcccagcccccgcccgctgcccgtcagcgcttaccatgatggacaccacctggcagactccgctcctctcaggcaatgcaacgaagaaaccccgccgaccgctctcccagccgccgctgccgctgccgccgcgccaagccggtacgccccagaggctcaccggaagtgccggacccgagacccggagggggggtgcccgggacaaagcgtcggctgcaaaagagaaaaggccaggcgaagacgctaggctctaaaacaccctcagtagaagcattaaaatgccctttcgtgatttatttccccttttataggtatttttaaacgttattttaaattacgtgttgacagtattcccctccagacgaatttagtagggcccattgtccttacgactacactacccacaatgcactacccagactgcctctgcttcagccatcgaggactcgggcggaactaagctacaaatccttcttcaaaccacaccaaaaacctattgcaaacgtaaatgctgccccattgggtatgtgactgagtttaatgtatggttagaagtatactttccctgagggttcccagtgggaggcagtaggcttctcttcccaaagtaaagatgtccgcccagcgtcgcttttctgggtaaaagcgagtcagagttgaagggggcaacagtgtttgcgttcggcctcagaggtgacgcttctttgggggcgggctggagttttctggccgtgaatggcagagcgctaatggccgcctccaatgtggcccaatcagaaagaaaggaaggctgggaactaagaagctattggttggtgatccctggaccaatcggaggagccgtgatttggcgggagtcttgaccgccgccgggctcttggtacctcagcgcgagcgccaggcgtccggccgccgtggctatgttcgtgtccgatttccgcaaagagttctacgaggtggtccagagccaggtgacgcccagtccgggacccccgccgaggccttgccggtggggaagggatgagggggagcgaccgtgggtgaccgggaggcaggggagggccggggttcgggtcgccgtgttcagccggtctgctcttccccgatagagggtccttctcttcgtggcctcggacgtggatgctctgtgtgcgtgcaagatccttcaggtgagttctgcggaccctaggagggcggggccggcgcgcgaggtgagggtgctgcgtgggggcgcagggcgggcagagtgtcaggatgggtgctgagggcttagggtgggagagggagcagggcaggaggtgaacagcaagtgagaggagagagactcggaggagaggttgcctccctgtcccaacggtgtggggtgggataaaggattaagtaaaaggtaaagagactagtttgtatttttgcaataagctattaatattaataggtgaacacagcagttgcatttgggggaaactttggatctgtcgtggcctctcaaatgggggatttgagagagaggaatctgtgacaactgtgggtatagtcgtgtcacaggtgttgctgggaatatgggagcccctagtctattagggaagatcgttagtttggttttgaatagggcatagtatttacgttgttttggtcaggcccttggatcaggaacttttcagaaggcctggaagttaaatcggcatttctccccgatgttttactttggtaatttgcaaaattcacagaatggtatggtaaacgctcatatccctagcacctagcttttcccgtaagcatttcactagctttaatgttatcccgtgtcttttgtctctcaacccgtctaatcttcctcagtttcttttcaaggtaaattgctaatgtcctaaataagataggctttgaaaacactctctct

SEQ ID NO: 2191 - DNA, 6000 bp, Homo sapiens
taaagggcatgtaccttttagaggtttttgtttgtttgtttgtttgtttgttttttgagatggagtcttgctgtgtcacccaagctggagtgcagtggcgcgatctcagctcactgcaacctccgcctcccgagttcaaacaattctcctgcctcagcctcccaagtagctgggattacaggcatgcgccaacaagcccaggtgattttgtagttttagtagagacagggtttcaccatgttggtcaggctggtcttgaactcctcctgacctgtagtgacccacccgccttggcctcccaaaatgttgggattacaggcatgagccaccacgcctgcccaaccttttagagttttaacagatgttgctccgtggcctgagaatgcctgtttccccacactttctccagcactagatttaacctaatctgttgggtgaaaaaggttgtcttattgatgccttaatttacattctatccatgacttgcaactttaagcatcttttaaaatgtttattggttacaggcaatcttcatgagaacattgtatcctctgtctgtttttcttttgggtttcctttatttttccttaatggagttgaaacagttctttgcaggatctggcagttgattgacagcttcttaattctaagaatgcccccaacttaaaagcagccctggagggtccccttcttccgtgtcacccccagtgtcttgtgtgagttgtcaccgggccccacttgttttcctctgaagcattctgacagctctgctcgtggcccctgcgtttaagagacatgctgggccgggcgcagtggctcacgcctgtaatcccagcactctgggaggccgagatgggtggatcacgaggtcaggagatcgagaccatcctgcctagcatggtgaaaccccatctctactaaaaatacaaaaaattggccgggcatggtggcaggcgcctgtagtcccagctcgggaggctgaggcaggagaatggtgtgaacctgggagatggaggttgcagtgagccgagactgcgccactgcactccagcctgggtgacagagagagactccgtctcaaaaaaaaaaaaaaagagacatgctgcaggccaggcatggtggctcatgcctgtagtcccaacactttgggaggccaaggcgggcggatcacttgaagtcgggagtttgagaccaccctggcaaacatggggaaaccccgtccctaccaaaaatacaaaacagctgggcgtggtgcctgtaatcccagttaactcggtaggctgaggcaggagaattgcttgaacgcaagaggtggaggttgcagtgagtcaagatcatgtcactgcactccagcctggacaagagtgagattctgtctcaaaaaaaaaaaaaaaaagagagagagagagaaacatgctgctgcagagcacccctgcagtgttcccgaggtgtgaggtgacagagccctagtctctgattctgtgacagcttcagagggtgacactctgtgtcgggcccaaaagggctcccctgggctgtcagtgatgagcttctctggtcacctttggggggtgccgtaacctcacctctgttcagtttctcagatggccagtcagggaaaagagtggccatcaacatatcatgaaaatgttctatttgaaaatgcagagtacagttcctggggacacggggatctcccagtgctcggtgcttcaagaccctgggcagttcatattagacaatgtcacaggaaggtgtgagtcattctgggcggttgctagtgtgccgtgcctgtgggcttggtgctggggaggccaggcaggcttggtggtggggaggccaggcgtgggagtgatgctcctgactatgccttctctcccagtcactcctttctgggttttgttaggggagggggtgtctagggcccaggccatcaccagaagcttggccccctgctcttgcttctgccaaacactccacagttcagctggaagcgccctcagggttgtccaagctgcctgcagttggttgtgcctccgactggctctggccccgcctcccagcctccgtagctggttcctgagccctactcctggggccgccagcctctcctacttccctcctctctctctgcttgctttgcagcagctttactgagatatgattcacataccctacaattcacccctcggaagaagagttcttagtagagttttccatcatttttagtctgttcacagagttgtgtaaccatcaccatccagtttagaatatttgcatggccccaaaagaagcccagtactcatgaatcagtcactcccatttccccctcacctacctcctctctcagcctctcccagcctctcacaaccaccagtctactttctgtccctatggatttgccctttctggacatttcatgtaagtggaatcagatggtatgtggccacttgtgtttagagtggtgagcagagcccaggctgcggcagacatccagaccaaggcggtctgggccaggtgacagcctggctagggtttggcgaggtcagttcctcctgcctccgtggggcccatgagccgcagtccccagggatgcatccggagggcatcagaggcaggacgccgagcaagctgatacccaaggagtcacagccaccctgggagcttaaagggccgatgcagggattgggaggccgtggtctgggtcagttgggaactgggggtgatcagggatggccactcatagaacctctggatcctgtaatctagagagacacggaacatgagctcccctgttggtgtctctcctgaacccattccctcaatatagacacgcttctcctttgatgttgtagacagtctgagatatattctactaattttaccagttaggctttccgtgaattgatgccttgttaaagttctctagagggttttgacattcattttcattcattcacatcttagggtgaattattttaatctaggtactttcttcctaacagaagaatcaagttaatgaaactggaagtccctagtctccttagatttcataattggcctcacaatgtcacaagaaccctgatcctggcactcgtcctatcaggtgctgtgcaagggaagcgctgtgagtgacagagcaaagccaggcatctttcagtcaaggattttctctccagttgtgtgcaagataagaagtgactgactctgtgtagccaggaggctgaggcaggaggatggcttgaggccagcggtttgggaccagcctaggcaacatagtaagactcggtctctacaaaaaatttaaaaaatatccgggtgtggtggtgcgtgcctggggtcccagctgctgggaatgctgaagcaggaggggattgcttgagcccaggagttcgaggctgcagtgagccatgattgcaccactgcactccaatctgtgtgacagatgagaccctgtctcttaaaaaaaaaaaaaaaccaaaaccaaaaacaaaaaaccacctctctagattatgttgctcctctgctccacaccatgctgtggcttctgttcacagtcaaaggtcccaaagtggccatggcctgtgctgcctgctgccgctctccacaccctggccgctcggtccccaggagaccaggcatgctcctgccacagggcctttgcactgggtgctctctgggtctggaacaggccccacacccactcacttcccccaagtctgctcagatgccacttccacacttcctaacaaaaggaagctgttggtgagcagatgctcagtaacttatgtgtggccagaaggagcgagtggctccagcctgcgcgtggaaagctggctctcctgggtcactgctctcactgagcctcgggtttctgctgcccagaggactgcgtggctctttcttgtacctggcagttctgacactgctggaattgggaagaaaagggaccctgagactaggtcactccctcctggggtctcaaggggccctgtccctggggctggaggctgagcttcctcctccttgtccccaccctggggatggcctgtgttctgtcttccttgtgctcaccactggcgcctgttggctgaggcaagagggcctccagctgggttcttcctgtcctctagttggtgcctgaaggccccagttgggtggggtctctctttaccctctggtcatatagcaaactgtggctggtgtgtggtgagtcagccctgtgtgcaggcagggtcccatttccctgtgtgcaggccacagtctgtcccagtgcctgcaaggcctctgccccagctggcctggaccccccttgccagactctgctctttgtggggctctgcccacatctactgcccagtaggacgcccagtctccactgctctttggaggtaaaagagggcctggcacactggcacggggtactttcccaaaggtcaaagatgtgttgagtgaacgaaggtagagagttcatttctgagacctttgctggcctaattcagctcagtggggtgaagttattactgttgagatgcttgctgttttgattgtctttagagagcattcttaatatttggatggtttaaaataccaaggagaaaaaagggaggagaggcttcttttttaaaaataccaacttcattatgaaaacacacaaatgtacacacaaatagaataatataatgacacccctcccaccaccacacggcctgtttcagtctgtgtccacagcgaggcttctgaaggaaaggctgtggagggggtgagctggtggagcccatgttctcccgggcctggccgggatgtgcttgccgctgtcacagctcccccatctccacccgtcacatgacatcgaatgaggccggcctggctctagccactgcacaggtgtcccgtggtcatttccttcctgtgctgctgaggcacacagtcacccgtttgcaaactctgaggtgttttcccttttcccatttcctgtcactgttttgaagctgtgagaggaagagagagacctcgatctgataaccattcatttactatcaaagttggggtcacatccttataagaacgtgtggcttgaggtcatgaatagcagtaatgcgagggaagctaagattctggcaggatgcaaatgatctgggagttttcattttgtcgttatgtatgggctgttttctgctgcattgttaactattggaaaagattttccatggattattatatggattatagaggaaaatgcaaatctccaacctctatacatttaatcacttaaatgaaatgtcaagttttcttgttaagaattatggtgctgactggaagaacaacatggctttaaatatgacttattagtttctttccacttctaaagttcaaaataaaacatcataggtggcaaaacaaatcaaggtaaaatacgttttgaaaagtcataactttactcaacaacaaaaaataagaaatagacagaggacttgaatagacatttctccaaagaagacatacaagtggccaagaagtacatgaaaagatgcccaacatcactggttattagggaaatgcaaatcacaggcattaggatggctattatcaaaaaaagccaagcaaaaccaacaacagaaaataaaagcattggcaaggatgtaaagaacgtgaagatgtggagaaattgaacgttggtttactgttggtgggaatgtaaaatggtgctgccaccgtggaaaagtttggtatttcctcaaaaagtgaatcagaggccaggcgcggtggctcacgcctgtaatcccagcactttgggaggccgaggtgggcagatcacgaggtccggagatcaagaccatcctggctaacacggtgaaaccccatttctactaaaaataaaaaaattagctgggcgtggtggtgggcgcctgtagtcccagctactcgggaggctgaggcaggagaatggcgtgaacccgggaggtggagtttgcagtgagccgagatagcgccactgca

SEQ ID NO: 2192 - DNA, 6000 bp, Homo sapiens
cggggacttggtgtggactgagactcagcccccttgaagccctattctgtccaccgctgcaagacataggcggctttaagcaggaccaggccgcaccctccaggcagagacagctgctgtgggttctgtgctcttctaatgggcatgtcttcccatcggtgatgaggactgatttgtgcagtgacccccttacatttttctgaaaaggagatcaaggaaaacattcttcagtagaatcctcactgtgcacacacttccccttgtgctcggtgacagccactgcctttgggagcagggaggacgccccagaacctcctggtctccgcacacccccctgagctgggctgagcacacaagcacccctctgcagacagtagaggttttgggattcagaatatgcagtctgaagctccccagagcctggctctttagtcaggccctccttgcccgccctgtgaatccacgcctaggagcctgtgcccccacccagcaggagctgatgctgctgagcttcccaggtgccagacaggggctgagtgtgggggccagggagccagtcgggagtctgctgcctggcaggccatgtcctgcagaagagaggccagcatagggcacggtgggcctggaggggctggagacagtgctgctgggtcggcagagctagagaagggcagcccaggcagggggcacactagtgccaaggtgcaggggcatgaagctgcaggtcacacggcctccctcggagcccccaggtactgggggtgggttcaaatctcacagggttggcgggcgagggcttcaggaacagcagggacaggagcatgagagcagtagaaaaatgcaggggtcaggaggatcatctgggacccaccaggttgctggtgaattcaggggatagaagggatgtgagctcaggcctcgagcagctgcctgattgggacagcccctggctgggccgcgaccaggtcacagcactttgcaggagtcaggcctgggctccacggtcgtgggttctagtctcggctgtttagtctcaagcagatctccaccgcgccctgacctccacttcctgcgtctactcagggtgaaaaaacaccccattcccagcacaggtcagggttgcccgagttgatcatgcaggtaggcctgtggggctctcaggtgcctgacaccctgcatgcatcttggcctcttccctcatcctcagcctcagatggactgagccatctggaacctgtcagtggtggcctcagccctaactgcagatgacaggcttgggagtgtggcgacatgtgtcacctggagcaaactgctccccctctgaagcctgtcacccacaagacctgctcccaagggccaatggcaggtgccttattctttcgtcgccatcaccgttgccacctccccaccagctccatccttctccgggtcccagccctggggcgctcactcccctgtgtgctgagggaggcccagcatggttcaaatgcagcctctggagaatttcttcactaagaggctttttctgaaaagagtcaagctatttgtagcccaagttggttgaacagatttttcttggtgtagcttatttttttattcattaacttcttttccttatgaattaaaaaatagcatttttttttccacaaaggagtgctttatttacttctttttgtaccacagccagcgcttcctctgcctgctggggaaagtggatgcacacacccactttggcaggcagttttctttcaagccatggcatcttggagaggtaagtgtgtgtgttcagaccactgccctgtggctccagcccccctgatatcagccacagccccaaggcttgggtgttgtttgtttgttttttcattttttttgagacaaggtctcactctgttgcccaggctggagtgcagtggcaccatcacggctcactgcatgcagcctcaaactcccaggctcaagtgagcctctggcctcagcctcctgagtagctgagactacagactcatgccaccacagccagttttttttttttaatttttaatttttatagaaacggggtctcacattcttgcccagactggtctcaaactcttggcctcaagtcatcctcccaccttggccaccgaaagtgctacaatgataggcgtgagccaccaggcctgcctggttggctttttggtgaacaggagcataataagggtttcactgggctgtcagcctccattgtggtggccagtatctcaaagcctcacctggcagaactggagacgcgtctgctgaccgatgccctcatgacccattttcctgacttcagaaatgtcccatgcagacactatgccatccagcaggcctcccagctagacagggtgcagcctcgatgtgtctgtggagggactcgggctgtccctgcactcacagtcatggtgaccaaagtcccagagtaagggagcagatgccgcttcccccttccagcccaggcattttacatgaggcgctgacccaggaccacccttgacttcactcttccaaggagtggctcccagtcctatatattccatcagcctccaggctggctgtcccttaaacactggtctccaatctaactgcatttctgtaagtaatcttttgggacagacttttttaaaaaagatcatgtttatgccgtattcctcatctttcttgtcttctatctccagatttgttttaaaacctattactcctgtatacatgtgcctcccaccctttgagctatgcccttgacctgctatgcacttgtctcaaggccaagttcaaaccccctaacccaaggctgtccagagctgccctgccacctgagccatggggaggggcgctgagctggtgcctttcacaggctgcctgcctccccctgggcagggctcctgtctctcctcctttgtctccacaagcacaggcttgcatgggtcagcacgtggtgaacagccaaccatcattttccaattctttccaaaaagtcctgtctatgctcagaagtcctgcctggccctttgagtgcccctacccccacacacacattcttttttttttttttttttttttttttttgagacggagtctggctctttggctcaggctggagtggagtgcagtggtgcgatctcggctcactgcaacctccgccttctgagttcaagtgattctcctgcctcagtctcctgaatagctgggactacaggcatgtgccaccatgcctagctaattttttgtatttttaatagacggggtttcaccgtgttagccaggatggtcttgatctcctgacctcaacacacatttctttatcgaaattccaaattctccaaagctcagaaacataaaggtttttcaaaactcagtggcaaagctggacctgaacgatgcgccatcacttactgtctttatttcttccagttcacctgaatacatatgttttgccccgaaaatataaatgggtctgattatgaggagcagccccaggttccaaagaggtgccacataatgtatgatgtatacaaaaaagcctgagttccaaacacatcttggatgagaggttgggactgtgggggatccctacactggttagagttctagacccagagcagggttatggtcaacggcgctctggccacagaatgcagcagagcaaggactgtggaacaaagacgcggcttacatgaatttttcacttaccgtgctgggtgctggtgattcagagatggaaaggccctagcgacacccccctccacccagggagcccacgggccagcagagggaccaaggggcacaggacgggtggggagcagaggcggattccctggctgtggaggtactgtctatacggggtgcaggagacatctccatacaagggggccctcacctggggaggtggtgaccgcaagcctgacagccccaaagccttcagagatgccgcctggggacactttgggaaagtccaggcggaggacacctgggaatgtgatagtgacacaaatgaccggagagacttgctctcagtcactgagtctggctgactcactgaagattagggcctgaacttccccctctgtaaatggggtgcaggccctggccctgccttcacagtgcccctcggtcccctacaagccttctccgcagggtgggatcgggtctgcctggagcatccccacagcctatgggtcagcagagaagcaggcgcagagctggggtgagacggtcagggccggtcctgccagacacctcagatcactcctcttcacaaataatcccattttacagcccaggaagagagaggccggaccactgcccaaaagcctgtggcctacagcctgccaggtgcgtctgctcgcagagcaggtctgcgcagcaccgagcggtcagcaggggcaatgctgggcactggccagccgcgccaggaccatccctgctgacctcggcggggtggggcggagcgtgcagggtctggcccggaaagccagggcaggctttagagaagggccaccggacggatggtccgaggaccggcatggacccgggtcccagcgagggcggggggagcgtaaggctgggcctgggctgcggcaccggggaggtggcggggaggaggccggcaggaacagccgtgcagggcgggggcggcgcgggtctggtcgggtgaccccgggcgcggccagggctgtaggaggcgagggcgtcgccccgaggccgtggtctcgggtccatggtgggggacctgggtccccgcccccccgggccgccctgggtcgcgcgtgggcgcggcgggcgccgattggctgccgggcgcgcgggcggagcgggcggcggcggcggcggcgcggaggggccgctcaccccgcagcccggcctcggcctccgccgcttgtcgtcgcgccccgcccgcgagcccgccccgcacgtcccccgccggcggccaccatgagcacaggcctgcggtacaagagcaagctggcgaccccaggtgagcccagcgcctgcccgcgtgcccgcgcgcgcctttgtccccgccgcccgcgcgcctctcaccgtgtctctccgtctctcccccgcccgccggcccggacccgctcggaaccggacccggactcgaccccgaccccgaccccgcagaggacaagcaggtacgtgcgcagcgccgctcccccgccgggagacccggccggctgtcacccattgtgacactagcgccttgggcgcccaggcgcgaccccgcccccgccggccctcacccagccctgtcgcgatcaccgattgtcagccgggcagtgccgccgcgcctggggcttcagaggagaggagtgggggccctggtccccggacccgcacagcagggaccctgcgcccctccccaggatggggggatgggcagagtgtccccctcccacagggccagtgccagcatctcctgctgacctggcctgtaggccatgagctgggggtcctgggtgaggccatggtcgtggcaggccacgctgggggaggggagtcaggctccatcagccagcacagtccctgaacagccctacagcagagggcctgtggtcaccacccacctcccctgcaccttcatgcccctttccctccccatacacaaatttgagtgttcaggtctgcaacagggactcttccccagattgggaacccccagggtctggtctgagtcattctgggtgcccagatgggtcctgggaccctgtgggtacaaataggcttgtggcttctcaaaagggttggccccaccctccaggaaagcaagactggacaggaggctggtctaggcacctgggtgaaacccagccgagctcagggttaaacaatgctgtgaggcccctggggtggggcgggggctgacaaccaggtgggctgggggggctggggaaagcctgctggtgtcctctctggcttgagctcagccatctttggaggaaaaaagaagagcccaattctggcaccagggtggcactg

SEQ ID NO: 2193 - DNA, 6000 bp, Homo sapiens
agaagcccaataccctgtctcttaccaaatgcggtatgaggagacagcagagggtacggttcccagggtggggcatttcgttggcaaaaataaggggagggcccgtgggcaaaagcctggagataagaaggcaggcgaggtggtggcaggagaaggcacccctggccccaatcccagggagggctctgcagggaccgacactgtatttattccgtggggagatgtcaggccgcagcaggcacaggcgatgtcctccctcctcgggcagagggcagcaggattgggacccctgggacacactcaaggccctccataagccggagaagctgggggcctcgacactcacccctccggagagtgccagggggcgggaggccccacctggcccggatccagccgcgggggcggcggcagcggcggtggcggagcagcgcctatttatagaccgcggcgccgagcctcccccgcccgcgcgcccaggcgcccagcccccgcagacccttggggcccctggaggggtcccacggccgcattctccgccgcgttttggagtcgcgtgaggtgaggcctggacagggcacgtcgccccaccgtggggccgcggacctgcgaggccgctgcggagggaagggctgagcctaggcgctggcgggccgtggcgcgcggggacggggaccccatgccgagtcccggagcccgcggggtcacagacccacgttccgccctctccacacacgcaccttgagccgcctctgggcctgggtccgcggcgacagcagctgctccaccaggcggtcctggggcgctgccagcgagtccatcgcggcgacccccccaggcccgggggcacgctcggaccccaggcccggtcaggccgccagagcccggcgacagcgagggaccttggcgcggctctgccttaggctgcgttgtccaccccgttttgcggacgcgggaagtgaggcctggacagggcacgtcgcctacccgggggatcgtcgacccccgaggccgaccgagccatccccctgactgggcgaactggccccaagctgtggcggcgtcgcagtccgggcaggccccgctcccgcacccgagccagaggcggggcgtcgcaggcgcccgcggagcgcgcggcggggggcggcagagacggccccgcccgccgtcgccgggaaacggtcgcctggaaattgggccgcgggcggagccacccgaaagcggctgcggagggcagggctgagccgaggcgcggtcgggccatggctcgcgtggaccgggagccctgccgcgcccccggggcctcagtccgggctccaggacagcaggaggggacgaccgggtcctgcacgcgggccggggcgggccgggagtcggtagccaccgcgcgtcccgcccccaagaggtgctgcgcggcttccgcccgccagagggcgccggaggccgctcccgggacccacgcgcaacagcgcgggtacccgcccagttcagggcccgccgtcttctcgcagacttgcccgaaaacctcccggcggcgtctcgacgccccaagtgcccacagacacgccgcgccctgcacccctccccagccctgcttggggctgacctcccccgtgcgtgcgtgcgtgcgtgcgcgcgtttgtgtgtgcgcgtccgtgcgggtgtgtgtgtgtaatgtgtgtgtgtgtaatgcctgcgtgtgtgcgcgtgtatacatgcgtgtatgcgtgtgtgtgtacgtgtgtgcatgcattgggtatgtgcgtgtgcgcgggtgtgtgcatgtgtgtttggtggactctttcccaagacattcgggggaccggaggagggcagagcccaccttttctgaagtccagcctgcctgtcccctaggaggcttagggtggacagaagggaagggaagggaaaggaagggtgcaggctgccggagtactggaggtccctgcaaaacttggaagcccccgccagcctgctgaataaacgccggccacccatgcgctgccctgcagccctcaggtggccctgccctcagagacaggggtgggggtgggatgggacccatctcccacgtgcttctgtggacattcccttgccctctgagcatcctcaccagctctgacccacaggattggagggactgggagctcctgccagccgggcctccctcccatgtggctactccagggactgcgggggtctcccgagctccgctctgtgggccacccacctccatgaccccagtagaatcccaacaggcaagcccagcggagcaggacatggggcctggaaaggttccagggtaggactggtcaggccaagcccctgcacattagaacattagaagctggaggccccaaccccaccccaccccacccgccaccagccctcccttaggctctcctggctgagagacctcctccacttcctgtccaggccctggtcctgttgtggggcctggaccactggcacctggggaggaggggcaggcccacagctgggaacaggagagcctttcatcccagggaaagggggcagctccaggccccccagctctaccagtgcatccctcagtccttgctgccagaaagcctcctcactggccccagccttccatggccctgacctgcaggaagcctctaggctgagtcccacccagtttccaactgagggtccacacctcgaagcccagcacccacccagacaggctggcatctcaggcccagggcatctccaggaagacagacagccctgggcctaggcctcaggctaggaggtgtctaacagagtgtgtggctctcagactgcctgcctcagtttccccattggtaaggcacagcctctggggaggcccaggtcaggagggcaagaatctcactctcagcgttcaacccacctgccctgccacccactggggcccagtcagggcctgtggattccctgggggagcctcaaggaaggggccgtacctgccaccccctttctctggtccccaagtgacaaaagatactcccagggcttcctgagccatatgacacagctgcgcccatctcctcccaatgcctgagcctctctggcacttccattcttagaatcacccgagtcagctctgggagcagcagccagggccaagagatcaccggtgctgcctgtgaggaggtgggggcacagagcgtagtgacggaactcccccaatgcctctacagccccctttcaaagagcaaaaagaatgcttggacaggctgaggctcagcaacggtggtagcagggaagctgccatgtgcttccagctcccccagacccactggtcacccagacacctggcctggctcctgctccggggctcccttccttggccacacagtgccttcttcctctgggcttggaggcctgggaggcctgggatggggtgaggtggactcccggttgacctcaaacgatgggcacctcagcaggagggggtccccaccctgcagtaatgggcaagagaacctggctgcacccaacagcagtggctggagcccagggtctcagagtgcccttgggtcaagctggggacacctgcaggcacaggagaagcctcaggggcctggcctcctggctttcccagcctcagttccttccatttccctcaaacagtagcctgacgcatgtgtccctgcatctcaggctttgtctgacctgctgtgatggggaggcagctcccagcctggctccccaaggggcccctcccagagagcctcatccacctctgggtggggtgtgtcccttccaggagaatggcactggtcagccagtgactcccccagctcctggcccccctgcccgccctcctgccctgcctgctgcaccctgggccaggactctggagttccactcagcatccatggctcctgagaaactccatccctgatgggggctgccagtgccaccctggtgccagaattgggctcttcttttttcctccaaagatggctgagctcaagccagagaggacaccagcaggctttccccagcccccccagcccacctggttgtcagcccccgccccaccccaggggcctcacagcattgtttaaccctgagctcggctgggtttcacccaggtgcctagaccagcctcctgtccagtcttgctttcctggagggtggggccaacccttttgagaagccacaagcctatttgtacccacagggtcccaggacccatctgggcacccagaatgactcagaccagaccctgggggttcccaatctggggaagagtccctgttgcagacctgaacactcaaatttgtgtatggggagggaaaggggcatgaaggtgcaggggaggtgggtggtgaccacaggccctctgctgtagggctgttcagggactgtgctggctgatggagcctgactcccctcccccagcgtggcctgccacgaccatggcctcacccaggacccccagctcatggcctacaggccaggtcagcaggagatgctggcactggccctgtgggagggggacactctgcccatccccccatcctggggaggggcgcagggtccctgctgtgcgggtccggggaccagggcccccactcctctcctctgaagccccaggcgcggcggcactgcccggctgacaatcggtgatcgcgacagggctgggtgagggccggcgggggcggggtcgcgcctgggcgcccaaggcgctagtgtcacaatgggtgacagccggccgggtctcccggcgggggagcggcgctgcgcacgtacctgcttgtcctctgcggggtcggggtcggggtcgagtccgggtccggttccgagcgggtccgggccggcgggcgggggagagacggagagacacggtgagaggcgcgcgggcggcggggacaaaggcgcgcgcgggcacgcgggcaggcgctgggctcacctggggtcgccagcttgctcttgtaccgcaggcctgtgctcatggtggccgccggcgggggacgtgcggggcgggctcgcgggcggggcgcgacgacaagcggcggaggccgaggccgggctgcggggtgagcggcccctccgcgccgccgccgccgccgcccgctccgcccgcgcgcccggcagccaatcggcgcccgccgcgcccacgcgcgacccagggcggcccgggggggcggggacccaggtcccccaccatggacccgagaccacggcctcggggcgacgccctcgcctcctacagccctggccgcgcccggggtcacccgaccagacccgcgccgcccccgccctgcacggctgttcctgccggcctcctccccgccacctccccggtgccgcagcccaggcccagccttacgctccccccgccctcgctgggacccgggtccatgccggtcctcggaccatccgtccggtggcccttctctaaagcctgccctggctttccgggccagaccctgcacgctccgccccaccccgccgaggtcagcagggatggtcctggcgcggctggccagtgcccagcattgcccctgctgaccgctcggtgctgcgcagacctgctctgcgagcagacgcacctggcaggctgtaggccacaggcttttgggcagtggtccggcctctctcttcctgggctgtaaaatgggattatttgtgaagaggagtgatctgaggtgtctggcaggaccggccctgaccgtctcaccccagctctgcgcctgcttctctgctgacccataggctgtggggatgctccaggcagacccgatcccaccctgcggagaaggcttgtaggggaccgaggggcactgtgaaggcagggccagggcctgcaccccatttacagagggggaagttcaggccctaatcttcagtgagtcagccagactcagtgactgagagcaagtctctccggtcatttgtgtcactatcacattcccaggtgtcctccgcctggactttcccaaagtgtccccaggcggcatctctgaaggctttggggctgtc

SEQ ID NO: 2194 - DNA, 6000 bp, Homo sapiens
taaacactggtctccaatctaactgcatttctgtaagtaatcttttgggacagacttttttaaaaaagatcatgtttatgccgtattcctcatctttcttgtcttctatctccagatttgttttaaaacctattactcctgtatacatgtgcctcccaccctttgagctatgcccttgacctgctatgcacttgtctcaaggccaagttcaaaccccctaacccaaggctgtccagagctgccctgccacctgagccatggggaggggcgctgagctggtgcctttcacaggctgcctgcctccccctgggcagggctcctgtctctcctcctttgtctccacaagcacaggcttgcatgggtcagcacgtggtgaacagccaaccatcattttccaattctttccaaaaagtcctgtctatgctcagaagtcctgcctggccctttgagtgcccctacccccacacacacattcttttttttttttttttttttttttttttgagacggagtctggctctttggctcaggctggagtggagtgcagtggtgcgatctcggctcactgcaacctccgccttctgagttcaagtgattctcctgcctcagtctcctgaatagctgggactacaggcatgtgccaccatgcctagctaattttttgtatttttaatagacggggtttcaccgtgttagccaggatggtcttgatctcctgacctcaacacacatttctttatcgaaattccaaattctccaaagctcagaaacataaaggtttttcaaaactcagtggcaaagctggacctgaacgatgcgccatcacttactgtctttatttcttccagttcacctgaatacatatgttttgccccgaaaatataaatgggtctgattatgaggagcagccccaggttccaaagaggtgccacataatgtatgatgtatacaaaaaagcctgagttccaaacacatcttggatgagaggttgggactgtgggggatccctacactggttagagttctagacccagagcagggttatggtcaacggcgctctggccacagaatgcagcagagcaaggactgtggaacaaagacgcggcttacatgaatttttcacttaccgtgctgggtgctggtgattcagagatggaaaggccctagcgacacccccctccacccagggagcccacgggccagcagagggaccaaggggcacaggacgggtggggagcagaggcggattccctggctgtggaggtactgtctatacggggtgcaggagacatctccatacaagggggccctcacctggggaggtggtgaccgcaagcctgacagccccaaagccttcagagatgccgcctggggacactttgggaaagtccaggcggaggacacctgggaatgtgatagtgacacaaatgaccggagagacttgctctcagtcactgagtctggctgactcactgaagattagggcctgaacttccccctctgtaaatggggtgcaggccctggccctgccttcacagtgcccctcggtcccctacaagccttctccgcagggtgggatcgggtctgcctggagcatccccacagcctatgggtcagcagagaagcaggcgcagagctggggtgagacggtcagggccggtcctgccagacacctcagatcactcctcttcacaaataatcccattttacagcccaggaagagagaggccggaccactgcccaaaagcctgtggcctacagcctgccaggtgcgtctgctcgcagagcaggtctgcgcagcaccgagcggtcagcaggggcaatgctgggcactggccagccgcgccaggaccatccctgctgacctcggcggggtggggcggagcgtgcagggtctggcccggaaagccagggcaggctttagagaagggccaccggacggatggtccgaggaccggcatggacccgggtcccagcgagggcggggggagcgtaaggctgggcctgggctgcggcaccggggaggtggcggggaggaggccggcaggaacagccgtgcagggcgggggcggcgcgggtctggtcgggtgaccccgggcgcggccagggctgtaggaggcgagggcgtcgccccgaggccgtggtctcgggtccatggtgggggacctgggtccccgcccccccgggccgccctgggtcgcgcgtgggcgcggcgggcgccgattggctgccgggcgcgcgggcggagcgggcggcggcggcggcggcgcggaggggccgctcaccccgcagcccggcctcggcctccgccgcttgtcgtcgcgccccgcccgcgagcccgccccgcacgtcccccgccggcggccaccatgagcacaggcctgcggtacaagagcaagctggcgaccccaggtgagcccagcgcctgcccgcgtgcccgcgcgcgcctttgtccccgccgcccgcgcgcctctcaccgtgtctctccgtctctcccccgcccgccggcccggacccgctcggaaccggacccggactcgaccccgaccccgaccccgcagaggacaagcaggtacgtgcgcagcgccgctcccccgccgggagacccggccggctgtcacccattgtgacactagcgccttgggcgcccaggcgcgaccccgcccccgccggccctcacccagccctgtcgcgatcaccgattgtcagccgggcagtgccgccgcgcctggggcttcagaggagaggagtgggggccctggtccccggacccgcacagcagggaccctgcgcccctccccaggatggggggatgggcagagtgtccccctcccacagggccagtgccagcatctcctgctgacctggcctgtaggccatgagctgggggtcctgggtgaggccatggtcgtggcaggccacgctgggggaggggagtcaggctccatcagccagcacagtccctgaacagccctacagcagagggcctgtggtcaccacccacctcccctgcaccttcatgcccctttccctccccatacacaaatttgagtgttcaggtctgcaacagggactcttccccagattgggaacccccagggtctggtctgagtcattctgggtgcccagatgggtcctgggaccctgtgggtacaaataggcttgtggcttctcaaaagggttggccccaccctccaggaaagcaagactggacaggaggctggtctaggcacctgggtgaaacccagccgagctcagggttaaacaatgctgtgaggcccctggggtggggcgggggctgacaaccaggtgggctgggggggctggggaaagcctgctggtgtcctctctggcttgagctcagccatctttggaggaaaaaagaagagcccaattctggcaccagggtggcactggcagcccccatcagggatggagtttctcaggagccatggatgctgagtggaactccagagtcctggcccagggtgcagcaggcagggcaggagggcgggcaggggggccaggagctgggggagtcactggctgaccagtgccattctcctggaagggacacaccccacccagaggtggatgaggctctctgggaggggccccttggggagccaggctgggagctgcctccccatcacagcaggtcagacaaagcctgagatgcagggacacatgcgtcaggctactgtttgagggaaatggaaggaactgaggctgggaaagccaggaggccaggcccctgaggcttctcctgtgcctgcaggtgtccccagcttgacccaagggcactctgagaccctgggctccagccactgctgttgggtgcagccaggttctcttgcccattactgcagggtggggaccccctcctgctgaggtgcccatcgtttgaggtcaaccgggagtccacctcaccccatcccaggcctcccaggcctccaagcccagaggaagaaggcactgtgtggccaaggaagggagccccggagcaggagccaggccaggtgtctgggtgaccagtgggtctgggggagctggaagcacatggcagcttccctgctaccaccgttgctgagcctcagcctgtccaagcattctttttgctctttgaaagggggctgtagaggcattgggggagttccgtcactacgctctgtgcccccacctcctcacaggcagcaccggtgatctcttggccctggctgctgctcccagagctgactcgggtgattctaagaatggaagtgccagagaggctcaggcattgggaggagatgggcgcagctgtgtcatatggctcaggaagccctgggagtatcttttgtcacttggggaccagagaaagggggtggcaggtacggccccttccttgaggctcccccagggaatccacaggccctgactgggccccagtgggtggcagggcaggtgggttgaacgctgagagtgagattcttgccctcctgacctgggcctccccagaggctgtgccttaccaatggggaaactgaggcaggcagtctgagagccacacactctgttagacacctcctagcctgaggcctaggcccagggctgtctgtcttcctggagatgccctgggcctgagatgccagcctgtctgggtgggtgctgggcttcgaggtgtggaccctcagttggaaactgggtgggactcagcctagaggcttcctgcaggtcagggccatggaaggctggggccagtgaggaggctttctggcagcaaggactgagggatgcactggtagagctggggggcctggagctgccccctttccctgggatgaaaggctctcctgttcccagctgtgggcctgcccctcctccccaggtgccagtggtccaggccccacaacaggaccagggcctggacaggaagtggaggaggtctctcagccaggagagcctaagggagggctggtggcgggtggggtggggtggggttggggcctccagcttctaatgttctaatgtgcaggggcttggcctgaccagtcctaccctggaacctttccaggccccatgtcctgctccgctgggcttgcctgttgggattctactggggtcatggaggtgggtggcccacagagcggagctcgggagacccccgcagtccctggagtagccacatgggagggaggcccggctggcaggagctcccagtccctccaatcctgtgggtcagagctggtgaggatgctcagagggcaagggaatgtccacagaagcacgtgggagatgggtcccatcccacccccacccctgtctctgagggcagggccacctgagggctgcagggcagcgcatgggtggccggcgtttattcagcaggctggcgggggcttccaagttttgcagggacctccagtactccggcagcctgcacccttcctttcccttcccttcccttctgtccaccctaagcctcctaggggacaggcaggctggacttcagaaaaggtgggctctgccctcctccggtcccccgaatgtcttgggaaagagtccaccaaacacacatgcacacacccgcgcacacgcacatacccaatgcatgcacacacgtacacacacacgcatacacgcatgtatacacgcgcacacacgcaggcattacacacacacacattacacacacacacccgcacggacgcgcacacacaaacgcgcgcacgcacgcacgcacgcacgggggaggtcagccccaagcagggctggggaggggtgcagggcgcggcgtgtctgtgggcacttggggcgtcgagacgccgccgggaggttttcgggcaagtctgcgagaagacggcgggccctgaactgggcgggtacccgcgctgttgcgcgtgggtcccgggagcggcctccggcgccctctggcgggcggaagccgcgcagcacctcttgggggcgggacgcgcggtggctaccgactcccggcccgccccggcccgcgtgcaggacccg

SEQ ID NO: 2195 - DNA, 6000 bp, Homo sapiens
tgacagccccaaagccttcagagatgccgcctggggacactttgggaaagtccaggcggaggacacctgggaatgtgatagtgacacaaatgaccggagagacttgctctcagtcactgagtctggctgactcactgaagattagggcctgaacttccccctctgtaaatggggtgcaggccctggccctgccttcacagtgcccctcggtcccctacaagccttctccgcagggtgggatcgggtctgcctggagcatccccacagcctatgggtcagcagagaagcaggcgcagagctggggtgagacggtcagggccggtcctgccagacacctcagatcactcctcttcacaaataatcccattttacagcccaggaagagagaggccggaccactgcccaaaagcctgtggcctacagcctgccaggtgcgtctgctcgcagagcaggtctgcgcagcaccgagcggtcagcaggggcaatgctgggcactggccagccgcgccaggaccatccctgctgacctcggcggggtggggcggagcgtgcagggtctggcccggaaagccagggcaggctttagagaagggccaccggacggatggtccgaggaccggcatggacccgggtcccagcgagggcggggggagcgtaaggctgggcctgggctgcggcaccggggaggtggcggggaggaggccggcaggaacagccgtgcagggcgggggcggcgcgggtctggtcgggtgaccccgggcgcggccagggctgtaggaggcgagggcgtcgccccgaggccgtggtctcgggtccatggtgggggacctgggtccccgcccccccgggccgccctgggtcgcgcgtgggcgcggcgggcgccgattggctgccgggcgcgcgggcggagcgggcggcggcggcggcggcgcggaggggccgctcaccccgcagcccggcctcggcctccgccgcttgtcgtcgcgccccgcccgcgagcccgccccgcacgtcccccgccggcggccaccatgagcacaggcctgcggtacaagagcaagctggcgaccccaggtgagcccagcgcctgcccgcgtgcccgcgcgcgcctttgtccccgccgcccgcgcgcctctcaccgtgtctctccgtctctcccccgcccgccggcccggacccgctcggaaccggacccggactcgaccccgaccccgaccccgcagaggacaagcaggtacgtgcgcagcgccgctcccccgccgggagacccggccggctgtcacccattgtgacactagcgccttgggcgcccaggcgcgaccccgcccccgccggccctcacccagccctgtcgcgatcaccgattgtcagccgggcagtgccgccgcgcctggggcttcagaggagaggagtgggggccctggtccccggacccgcacagcagggaccctgcgcccctccccaggatggggggatgggcagagtgtccccctcccacagggccagtgccagcatctcctgctgacctggcctgtaggccatgagctgggggtcctgggtgaggccatggtcgtggcaggccacgctgggggaggggagtcaggctccatcagccagcacagtccctgaacagccctacagcagagggcctgtggtcaccacccacctcccctgcaccttcatgcccctttccctccccatacacaaatttgagtgttcaggtctgcaacagggactcttccccagattgggaacccccagggtctggtctgagtcattctgggtgcccagatgggtcctgggaccctgtgggtacaaataggcttgtggcttctcaaaagggttggccccaccctccaggaaagcaagactggacaggaggctggtctaggcacctgggtgaaacccagccgagctcagggttaaacaatgctgtgaggcccctggggtggggcgggggctgacaaccaggtgggctgggggggctggggaaagcctgctggtgtcctctctggcttgagctcagccatctttggaggaaaaaagaagagcccaattctggcaccagggtggcactggcagcccccatcagggatggagtttctcaggagccatggatgctgagtggaactccagagtcctggcccagggtgcagcaggcagggcaggagggcgggcaggggggccaggagctgggggagtcactggctgaccagtgccattctcctggaagggacacaccccacccagaggtggatgaggctctctgggaggggccccttggggagccaggctgggagctgcctccccatcacagcaggtcagacaaagcctgagatgcagggacacatgcgtcaggctactgtttgagggaaatggaaggaactgaggctgggaaagccaggaggccaggcccctgaggcttctcctgtgcctgcaggtgtccccagcttgacccaagggcactctgagaccctgggctccagccactgctgttgggtgcagccaggttctcttgcccattactgcagggtggggaccccctcctgctgaggtgcccatcgtttgaggtcaaccgggagtccacctcaccccatcccaggcctcccaggcctccaagcccagaggaagaaggcactgtgtggccaaggaagggagccccggagcaggagccaggccaggtgtctgggtgaccagtgggtctgggggagctggaagcacatggcagcttccctgctaccaccgttgctgagcctcagcctgtccaagcattctttttgctctttgaaagggggctgtagaggcattgggggagttccgtcactacgctctgtgcccccacctcctcacaggcagcaccggtgatctcttggccctggctgctgctcccagagctgactcgggtgattctaagaatggaagtgccagagaggctcaggcattgggaggagatgggcgcagctgtgtcatatggctcaggaagccctgggagtatcttttgtcacttggggaccagagaaagggggtggcaggtacggccccttccttgaggctcccccagggaatccacaggccctgactgggccccagtgggtggcagggcaggtgggttgaacgctgagagtgagattcttgccctcctgacctgggcctccccagaggctgtgccttaccaatggggaaactgaggcaggcagtctgagagccacacactctgttagacacctcctagcctgaggcctaggcccagggctgtctgtcttcctggagatgccctgggcctgagatgccagcctgtctgggtgggtgctgggcttcgaggtgtggaccctcagttggaaactgggtgggactcagcctagaggcttcctgcaggtcagggccatggaaggctggggccagtgaggaggctttctggcagcaaggactgagggatgcactggtagagctggggggcctggagctgccccctttccctgggatgaaaggctctcctgttcccagctgtgggcctgcccctcctccccaggtgccagtggtccaggccccacaacaggaccagggcctggacaggaagtggaggaggtctctcagccaggagagcctaagggagggctggtggcgggtggggtggggtggggttggggcctccagcttctaatgttctaatgtgcaggggcttggcctgaccagtcctaccctggaacctttccaggccccatgtcctgctccgctgggcttgcctgttgggattctactggggtcatggaggtgggtggcccacagagcggagctcgggagacccccgcagtccctggagtagccacatgggagggaggcccggctggcaggagctcccagtccctccaatcctgtgggtcagagctggtgaggatgctcagagggcaagggaatgtccacagaagcacgtgggagatgggtcccatcccacccccacccctgtctctgagggcagggccacctgagggctgcagggcagcgcatgggtggccggcgtttattcagcaggctggcgggggcttccaagttttgcagggacctccagtactccggcagcctgcacccttcctttcccttcccttcccttctgtccaccctaagcctcctaggggacaggcaggctggacttcagaaaaggtgggctctgccctcctccggtcccccgaatgtcttgggaaagagtccaccaaacacacatgcacacacccgcgcacacgcacatacccaatgcatgcacacacgtacacacacacgcatacacgcatgtatacacgcgcacacacgcaggcattacacacacacacattacacacacacacccgcacggacgcgcacacacaaacgcgcgcacgcacgcacgcacgcacgggggaggtcagccccaagcagggctggggaggggtgcagggcgcggcgtgtctgtgggcacttggggcgtcgagacgccgccgggaggttttcgggcaagtctgcgagaagacggcgggccctgaactgggcgggtacccgcgctgttgcgcgtgggtcccgggagcggcctccggcgccctctggcgggcggaagccgcgcagcacctcttgggggcgggacgcgcggtggctaccgactcccggcccgccccggcccgcgtgcaggacccggtcgtcccctcctgctgtcctggagcccggactgaggccccgggggcgcggcagggctcccggtccacgcgagccatggcccgaccgcgcctcggctcagccctgccctccgcagccgctttcgggtggctccgcccgcggcccaatttccaggcgaccgtttcccggcgacggcgggcggggccgtctctgccgccccccgccgcgcgctccgcgggcgcctgcgacgccccgcctctggctcgggtgcgggagcggggcctgcccggactgcgacgccgccacagcttggggccagttcgcccagtcagggggatggctcggtcggcctcgggggtcgacgatcccccgggtaggcgacgtgccctgtccaggcctcacttcccgcgtccgcaaaacggggtggacaacgcagcctaaggcagagccgcgccaaggtccctcgctgtcgccgggctctggcggcctgaccgggcctggggtccgagcgtgcccccgggcctgggggggtcgccgcgatggactcgctggcagcgccccaggaccgcctggtggagcagctgctgtcgccgcggacccaggcccagaggcggctcaaggtgcgtgtgtggagagggcggaacgtgggtctgtgaccccgcgggctccgggactcggcatggggtccccgtccccgcgcgccacggcccgccagcgcctaggctcagcccttccctccgcagcggcctcgcaggtccgcggccccacggtggggcgacgtgccctgtccaggcctcacctcacgcgactccaaaacgcggcggagaatgcggccgtgggacccctccaggggccccaagggtctgcgggggctgggcgcctgggcgcgcgggcgggggaggctcggcgccgcggtctataaataggcgctgctccgccaccgccgctgccgccgcccccgcggctggatccgggccaggtggggcctcccgccccctggcactctccggaggggtgagtgtcgaggcccccagcttctccggcttatggagggccttgagtgtgtcccaggggtcccaatcctgctgccctctgcccgaggagggaggacatcgcctgtgcctgctgcggcctgacatctccccacggaataaatacagtgtcggtccctgcagagccctccctgggattggggccaggggtgccttctcctgccaccacctcgcctgccttcttatctccaggcttttgcccacgggccctccccttatttttgccaacgaaatgccccaccctgggaaccgtaccctctgctgtctcctcataccgcatttggtaagagacagggtattgggcttc

SEQ ID NO: 2196 - DNA, 6000 bp, Homo sapiens
ggagatgccctgggcctgagatgccagcctgtctgggtgggtgctgggcttcgaggtgtggaccctcagttggaaactgggtgggactcagcctagaggcttcctgcaggtcagggccatggaaggctggggccagtgaggaggctttctggcagcaaggactgagggatgcactggtagagctggggggcctggagctgccccctttccctgggatgaaaggctctcctgttcccagctgtgggcctgcccctcctccccaggtgccagtggtccaggccccacaacaggaccagggcctggacaggaagtggaggaggtctctcagccaggagagcctaagggagggctggtggcgggtggggtggggtggggttggggcctccagcttctaatgttctaatgtgcaggggcttggcctgaccagtcctaccctggaacctttccaggccccatgtcctgctccgctgggcttgcctgttgggattctactggggtcatggaggtgggtggcccacagagcggagctcgggagacccccgcagtccctggagtagccacatgggagggaggcccggctggcaggagctcccagtccctccaatcctgtgggtcagagctggtgaggatgctcagagggcaagggaatgtccacagaagcacgtgggagatgggtcccatcccacccccacccctgtctctgagggcagggccacctgagggctgcagggcagcgcatgggtggccggcgtttattcagcaggctggcgggggcttccaagttttgcagggacctccagtactccggcagcctgcacccttcctttcccttcccttcccttctgtccaccctaagcctcctaggggacaggcaggctggacttcagaaaaggtgggctctgccctcctccggtcccccgaatgtcttgggaaagagtccaccaaacacacatgcacacacccgcgcacacgcacatacccaatgcatgcacacacgtacacacacacgcatacacgcatgtatacacgcgcacacacgcaggcattacacacacacacattacacacacacacccgcacggacgcgcacacacaaacgcgcgcacgcacgcacgcacgcacgggggaggtcagccccaagcagggctggggaggggtgcagggcgcggcgtgtctgtgggcacttggggcgtcgagacgccgccgggaggttttcgggcaagtctgcgagaagacggcgggccctgaactgggcgggtacccgcgctgttgcgcgtgggtcccgggagcggcctccggcgccctctggcgggcggaagccgcgcagcacctcttgggggcgggacgcgcggtggctaccgactcccggcccgccccggcccgcgtgcaggacccggtcgtcccctcctgctgtcctggagcccggactgaggccccgggggcgcggcagggctcccggtccacgcgagccatggcccgaccgcgcctcggctcagccctgccctccgcagccgctttcgggtggctccgcccgcggcccaatttccaggcgaccgtttcccggcgacggcgggcggggccgtctctgccgccccccgccgcgcgctccgcgggcgcctgcgacgccccgcctctggctcgggtgcgggagcggggcctgcccggactgcgacgccgccacagcttggggccagttcgcccagtcagggggatggctcggtcggcctcgggggtcgacgatcccccgggtaggcgacgtgccctgtccaggcctcacttcccgcgtccgcaaaacggggtggacaacgcagcctaaggcagagccgcgccaaggtccctcgctgtcgccgggctctggcggcctgaccgggcctggggtccgagcgtgcccccgggcctgggggggtcgccgcgatggactcgctggcagcgccccaggaccgcctggtggagcagctgctgtcgccgcggacccaggcccagaggcggctcaaggtgcgtgtgtggagagggcggaacgtgggtctgtgaccccgcgggctccgggactcggcatggggtccccgtccccgcgcgccacggcccgccagcgcctaggctcagcccttccctccgcagcggcctcgcaggtccgcggccccacggtggggcgacgtgccctgtccaggcctcacctcacgcgactccaaaacgcggcggagaatgcggccgtgggacccctccaggggccccaagggtctgcgggggctgggcgcctgggcgcgcgggcgggggaggctcggcgccgcggtctataaataggcgctgctccgccaccgccgctgccgccgcccccgcggctggatccgggccaggtggggcctcccgccccctggcactctccggaggggtgagtgtcgaggcccccagcttctccggcttatggagggccttgagtgtgtcccaggggtcccaatcctgctgccctctgcccgaggagggaggacatcgcctgtgcctgctgcggcctgacatctccccacggaataaatacagtgtcggtccctgcagagccctccctgggattggggccaggggtgccttctcctgccaccacctcgcctgccttcttatctccaggcttttgcccacgggccctccccttatttttgccaacgaaatgccccaccctgggaaccgtaccctctgctgtctcctcataccgcatttggtaagagacagggtattgggcttctggagaaacctttgtgtccctaccctgttccatcctgtccccaggacattgacaagcagtacgtgggcttcgccacactgcccaaccaggtgcaccgcaagtcggtgaagaaaggctttgacttcacactcatggtggctggtgagtgggccaggctcctcgggggagtggctggggtcactggccagccaagctctgtcgttggagccccagacctaacgcagctccttctctgtacctgtgtgcaggtgagtcaggcctggggaagtccacactggtccacagcctcttcctgacagacttgtacaaggaccggaagctgctcagtgctgagggtgagtggcccccaggaggccctggcactgatccccagtccccttccatgggacctctccaaggactccctttcaggtccagctcccactgttctgttctcgcggtgtgggtcccctgggggtagggccaaggcaccaagatggatgaggacgagggtcctggctgccaagggtgaggggctgagggttggagaggcccttccagtggccccttccccgtagagcgcatcagccagacggtagagattctaaaacacacggtggacattgaggagaagggagtcaagctgaagctcaccatcgtggacacgccgggattcggggacgctgtcaacaacaccgagtggtgagtgaggcctgctgagaaaggccttgcctaggcggccacagcactcgaggcctggcctcacctccctcctgcccacagctggaagcccatcaccgactatgtggaccagcagtttgagcagtacttccgtgatgagagcggcctcaaccgaaagaacatccaagacaaccgagtgcactgctgcctatacttcatctcccccttcgggcatgggtgtgtggctgtcctggggccaggctcgggagtgcagcccctacaatatggccccctggctgtgcctatgcccacccttggctgctctcggcaggctgcggccagtggatgtgggtttcatgaaggcattgcatgagaaggtcaacatcgtgcctctcatcgccaaagctgactgtcttgtccccagtgagatccggaagctgaaggagcgggtgagcctgccgtcgcacaggggcctggccagggccctggggctgagagtaccagggggacttgtctggcctcaaatctgatggtccttgccccaccacagatccgggaggagattgacaagtttgggatccatgtataccagttccctgagtgtgactcggacgaggatgaggacttcaagcagcaggaccgggaactgaaggtgaacatgcagactggtggggcaggggggatggagctggtgaggggcagaaccagagggctttgtctccttcacattgagcctgctggaggagggccaggtcagcccagttgggtgcaagagtcatttgttctaggagtagaggacctgtacccccttcatccagggctagaaggtaaaggtcaccatgtctttgcctggctggggtgggtcatgtgggccccgtgtggtgcttggcaggtatggagcacttgcccagatccagaggtgcagcagtgggccaggcccccaaccccaaccctcttcccatgggtcaccagaggaaggggctgccccagtggcacaccctggctcccagatttctgagctccagggttggtggctttgggtgccccggcagctagagtgatgatggagaccatgccaggggcaggtggccaccagggcaggggcatcagcatggggagacataggctcagccctggggagggaaggggcagctggagggggtggttcttgatgagggaggagatgaggagggagcatgcctggttgggcatagcctggaaaggccctggaatgtgagccacatgggctctggctccagccaggggcagagaggccagaaaggggcaacgccaggatctctttgaggagagatagttgatggtgatgctggaggggtgccccgggagttacatgcccgtttcccatcagtaaccgtgcaattacgctcaccgggtgtgagcctttctccctccttcccccaggagagcgcgcccttcgccgttataggcagcaacacggtggtggaggccaaggggcagcgggtccggggccgactgtacccctgggggatcgtggagggtgagtagagtcttggggtaccaggtctggtgggggaaggctgtcctgggccggcgccagcccactacccacccccaccccgcagtggagaaccaggcgcattgcgacttcgtgaagctgcgcaacatgctcatccgcacgcatatgcacgacctcaaggacgtgacgtgcgacgtgcactacgagaactaccgcgcgcactgcatccagcagatgaccaggtgcgcgccccagccgcgagccagacctcgcccctctggccccgcccacgtctccataactgagggccggtcctgtcagcccacccagacttgaactttgcaccattccctaagccccccccctcccccagagcctggtctccctagaaccaagtccagggctgtgagggctccggagggcagggcctcagcagtggcggggatgggccaggcatcgccagcccacgctgagcctcccggtggcgccgccccgcccatcctcccccccgccccgcgcagcaaactgacccaggacagccgcatggagagccccatcccgatcctgccgctgcccaccccggacgccgagactgagaagcttatcaggatgaaggatgaggaagtatgtggggcggcgggggcggcggaggcgggcgtcagggatgctcctccgcggtgctgctcacccgccgggttgtctccgcccgcagctgaggcgcatgcaggagatgctgcagaggatgaagcagcagatgcaggaccagtgacgctcgccgcggacacaccgtccgtctccgggacgccctcgcacccctggacaccagaccggactgttcccgacccggagacgcggggccacagcccccagctgaccctaatttattctcagcaccaccccctcccaggtcattgtgtctgtttccgaggggcctggaccgtagcccccgcccagctggccctctctgaccttgggggatcaggagcgaagttgggcgggacttcagagatccgcctcccttgcccttcccccgcccccggacggtcacagcacccaaaccgcaggccctgctctggcaggcaggcaaagctaggcagaagaggattcc

SEQ ID NO: 2197 - DNA, 6000 bp, Homo sapiens
gggcctggggtccgagcgtgcccccgggcctgggggggtcgccgcgatggactcgctggcagcgccccaggaccgcctggtggagcagctgctgtcgccgcggacccaggcccagaggcggctcaaggtgcgtgtgtggagagggcggaacgtgggtctgtgaccccgcgggctccgggactcggcatggggtccccgtccccgcgcgccacggcccgccagcgcctaggctcagcccttccctccgcagcggcctcgcaggtccgcggccccacggtggggcgacgtgccctgtccaggcctcacctcacgcgactccaaaacgcggcggagaatgcggccgtgggacccctccaggggccccaagggtctgcgggggctgggcgcctgggcgcgcgggcgggggaggctcggcgccgcggtctataaataggcgctgctccgccaccgccgctgccgccgcccccgcggctggatccgggccaggtggggcctcccgccccctggcactctccggaggggtgagtgtcgaggcccccagcttctccggcttatggagggccttgagtgtgtcccaggggtcccaatcctgctgccctctgcccgaggagggaggacatcgcctgtgcctgctgcggcctgacatctccccacggaataaatacagtgtcggtccctgcagagccctccctgggattggggccaggggtgccttctcctgccaccacctcgcctgccttcttatctccaggcttttgcccacgggccctccccttatttttgccaacgaaatgccccaccctgggaaccgtaccctctgctgtctcctcataccgcatttggtaagagacagggtattgggcttctggagaaacctttgtgtccctaccctgttccatcctgtccccaggacattgacaagcagtacgtgggcttcgccacactgcccaaccaggtgcaccgcaagtcggtgaagaaaggctttgacttcacactcatggtggctggtgagtgggccaggctcctcgggggagtggctggggtcactggccagccaagctctgtcgttggagccccagacctaacgcagctccttctctgtacctgtgtgcaggtgagtcaggcctggggaagtccacactggtccacagcctcttcctgacagacttgtacaaggaccggaagctgctcagtgctgagggtgagtggcccccaggaggccctggcactgatccccagtccccttccatgggacctctccaaggactccctttcaggtccagctcccactgttctgttctcgcggtgtgggtcccctgggggtagggccaaggcaccaagatggatgaggacgagggtcctggctgccaagggtgaggggctgagggttggagaggcccttccagtggccccttccccgtagagcgcatcagccagacggtagagattctaaaacacacggtggacattgaggagaagggagtcaagctgaagctcaccatcgtggacacgccgggattcggggacgctgtcaacaacaccgagtggtgagtgaggcctgctgagaaaggccttgcctaggcggccacagcactcgaggcctggcctcacctccctcctgcccacagctggaagcccatcaccgactatgtggaccagcagtttgagcagtacttccgtgatgagagcggcctcaaccgaaagaacatccaagacaaccgagtgcactgctgcctatacttcatctcccccttcgggcatgggtgtgtggctgtcctggggccaggctcgggagtgcagcccctacaatatggccccctggctgtgcctatgcccacccttggctgctctcggcaggctgcggccagtggatgtgggtttcatgaaggcattgcatgagaaggtcaacatcgtgcctctcatcgccaaagctgactgtcttgtccccagtgagatccggaagctgaaggagcgggtgagcctgccgtcgcacaggggcctggccagggccctggggctgagagtaccagggggacttgtctggcctcaaatctgatggtccttgccccaccacagatccgggaggagattgacaagtttgggatccatgtataccagttccctgagtgtgactcggacgaggatgaggacttcaagcagcaggaccgggaactgaaggtgaacatgcagactggtggggcaggggggatggagctggtgaggggcagaaccagagggctttgtctccttcacattgagcctgctggaggagggccaggtcagcccagttgggtgcaagagtcatttgttctaggagtagaggacctgtacccccttcatccagggctagaaggtaaaggtcaccatgtctttgcctggctggggtgggtcatgtgggccccgtgtggtgcttggcaggtatggagcacttgcccagatccagaggtgcagcagtgggccaggcccccaaccccaaccctcttcccatgggtcaccagaggaaggggctgccccagtggcacaccctggctcccagatttctgagctccagggttggtggctttgggtgccccggcagctagagtgatgatggagaccatgccaggggcaggtggccaccagggcaggggcatcagcatggggagacataggctcagccctggggagggaaggggcagctggagggggtggttcttgatgagggaggagatgaggagggagcatgcctggttgggcatagcctggaaaggccctggaatgtgagccacatgggctctggctccagccaggggcagagaggccagaaaggggcaacgccaggatctctttgaggagagatagttgatggtgatgctggaggggtgccccgggagttacatgcccgtttcccatcagtaaccgtgcaattacgctcaccgggtgtgagcctttctccctccttcccccaggagagcgcgcccttcgccgttataggcagcaacacggtggtggaggccaaggggcagcgggtccggggccgactgtacccctgggggatcgtggagggtgagtagagtcttggggtaccaggtctggtgggggaaggctgtcctgggccggcgccagcccactacccacccccaccccgcagtggagaaccaggcgcattgcgacttcgtgaagctgcgcaacatgctcatccgcacgcatatgcacgacctcaaggacgtgacgtgcgacgtgcactacgagaactaccgcgcgcactgcatccagcagatgaccaggtgcgcgccccagccgcgagccagacctcgcccctctggccccgcccacgtctccataactgagggccggtcctgtcagcccacccagacttgaactttgcaccattccctaagccccccccctcccccagagcctggtctccctagaaccaagtccagggctgtgagggctccggagggcagggcctcagcagtggcggggatgggccaggcatcgccagcccacgctgagcctcccggtggcgccgccccgcccatcctcccccccgccccgcgcagcaaactgacccaggacagccgcatggagagccccatcccgatcctgccgctgcccaccccggacgccgagactgagaagcttatcaggatgaaggatgaggaagtatgtggggcggcgggggcggcggaggcgggcgtcagggatgctcctccgcggtgctgctcacccgccgggttgtctccgcccgcagctgaggcgcatgcaggagatgctgcagaggatgaagcagcagatgcaggaccagtgacgctcgccgcggacacaccgtccgtctccgggacgccctcgcacccctggacaccagaccggactgttcccgacccggagacgcggggccacagcccccagctgaccctaatttattctcagcaccaccccctcccaggtcattgtgtctgtttccgaggggcctggaccgtagcccccgcccagctggccctctctgaccttgggggatcaggagcgaagttgggcgggacttcagagatccgcctcccttgcccttcccccgcccccggacggtcacagcacccaaaccgcaggccctgctctggcaggcaggcaaagctaggcagaagaggattcccaggatcctgggtctgttccctgccccagtgctgcagaacggacttgggagccctcctttgcctgctcccgcgggtcacccagcgagtgctgagaccccattttctgtcgaggcgggccgagtcttcccttatccccagacgcctagcgggcagggttgggctgaatcaaatgggagccctccagacataaggaggccagaggctgcaaggagcggggtcgtgaccgcttacaccccttctccacagcccggcccgacctggagggcccccggggcactgggcggtgagccacctcctggcaactctcggtgccgtcccctgccctcgctcgaggcctcttctccccagcaccgctgtggtgtgccgggatcctgagcctaggcctcccgatgttcccacccgcatgatcccttcccgccacacgatgctccgttttcttccgttgtgaatgccgcgtcctgtcctggtgacaggagaacaatgttggtgaacgtcgcagcgggtgtccgagtgctccgtgtgcccctgagagcgggtgggagcggaagcctgagcggcctgcggcctccggcgatagtgtgctatctgccgctgcagcgcgcgtccgcgcggcctctgggctatttctggccaggccgcagcactgtggtcggtgcgggcgtggcaggggcggggcggccttatcgctcggctctcccgcctacgcctcccgctgcagagtaagccgggctgccgtcttctcgccatgggctccggtgagtctggagtccggtcgggcccccggctgctccctaggccgacccgggttgagaggagctctggtcgtttggctgcagctgggagagacttgggtcagacttagaggggacttccagccggcgtgcggggtggtcagggtggagaggctggcgggctaccgggacgccgggcatcaggggctggatggagccgggccggcagtctgggtactcagagatgtcgcccaggtgcccgccgaccgctcggcttactgcggcgcttcccttgcagggccgcgcggggcgctgagcttactgctcctgctgctggccccgccgagccgcccggccgcaggttgcccggcgccctgtagctgcgcggggacgctcgtggactgcgggcgccgcgggctgacttgggcctcgctgccgaccgccttccctgtcgacacaaccgagctggtgctgaccggcaacaacctgacggcgctgccgccggggctgctggacgcgctgcccgcgctgcgcaccgcacacctgggcgccaacccctggcgctgcgactgccgccttgtgccgctgcgcgcctggctggccggccgccccgagcgtgcgccctaccgcgacctgcgttgcgtggcgcccccagcgctgcgcggccgcctgctgccctatctggccgaggacgagctgcgcgccgcttgcgctcccggcccgctctgctggggggcgctggcggcgcagcttgcgctgctgggccttgggctgctgcacgcgttgctgctggtgctgctgctgtgccgcctgcggaggctgcgggcccgggcccgcgctcgcgccgcagcccggctgtcgctgaccgacccgctggtggccgagcgagccggaaccgacgagtcctgaggagagaaccggtgcgtcctgaggagagaaccggcgctgggcaacacgggcctgcaaactcgacaggaccctgcccgaggggccctcgcgccaacctggaccggtccccgcctcctccgctgcccaatctctcagacccaccccacctgcaggcccagaccacgtgggacagaactcctgcccaccctaccccgagggaggcgaacccgcacttccaggcttgggag

SEQ ID NO: 2198 - DNA, 6000 bp, Homo sapiens
agtggaggaggtgttagccacagtgatttgcacaatcactcactgacagaaagctgggccccaggatccaaccattttcacacctgcagtccccacagaacttccttcctggctcctctgtgaggtgctcacagtggagcaattgtctctgtttctcaagagtccgtccctctccctccgtgaggctccaggacacactcccagtgtctgtacaaggtcaggttaactagaccttggtcagcccgctgcctttcctctacagcagcggcgtggggtagtcataacagacctggatggcctgtgaggcctgcccttctgtgaagagcactctcttgccgtttacagaacctagaatattgagctgagcaacttctgttgcttttcttccttcacagttcctttcacagtcattttccctcagccaggtggtggcttgtgagcatctcatctctgtcgcttcaggtcaggcggcagtgctgcctgcttagtctgcattagacactaacagcaaacgcggcaagcaggacctaaacacagcctcagaggggcccatgtagtaggggagaaagacacacacacacacaactgtgcacatttttagtataaaagagcttctggggttgacgtgataatttgtttttcatcatttaatcagcattgagcacttcctttcgccagttaggaaaggaacaaagatgaataaaacccaggttttgctttccagcagcctcatagcaggaaatgtaaacaacaaggagtatacagagtcccagagatggacacaggcatggtgggtcccagagagtaaggcagacattaaagcctcacagagtgtggccgactcgcggcagttgtgctgcagctgaaacctgacagttgggttctttgctggttggggaggggcacagctgtgtggaccctggaaggcgggcatgccagacagctgggcaagaggggggctgcagagaaagaggccagcccaggctgtggcccttgcttccccaggaggccagctctccctcacaggtagctgcctgacctgaagcagtggctcaggtgactctggtggcagtaaggatgcaggaggacctctgagagcagggacttgggggaaaactggtcaggccactgaagagacaggcagcaccgcaggcacaaggatggcaagacagaggcagggttgctcctgaggccacagggcgcagttgctggcagaacgcctcctgaagccagctttgcaaggcgggggaccagtatccctctcaggtccaccaccactctgagagtcccggcgtggcaaggacagtcacctctgtgcgttgttcatttgctccagacacagaagacacacagatgctccctatgtgcttatagcatgattttttttcccaacattcttttagtgacagttttcaactattctgaaaagttgaaggaatttaaagtagacacccatattcccaccacctagattatacagttaacattaacatcttacttgttttctcatagatctgtccatctgttcctctatccacccatcaacccatcgcattttatccattcattgcaaaggacgttgccaacgtctagactgacttacaatttagtcatctagaatatcacatgaatccaggggaagctggggctgggttggctgattaaactatgggataggttctttcataaacatttcattttggtgatcacaacagaattttgggaagtcagcatgcatccatgtttataattgaggaaactgaagacaggagcctttgagcacttcgctcaaaattgtacatcaagtggcaaaactaggcagagaatccaggtattttggacccagaatgtcattttcttgaaatgtttgccagcatgaaacagtggcaggctgcacactgcctgtgattagccttgctccttgggaaagttctcaggactcattcacaatactaaggagcattgtctctgagttcccagcccacacactggagatcaggagctctgaattggagagctcaggaggtaaaggtgtaataaaacatgggaacactgggagggcacggttgaccgtttggctgcagcaagaaaggcttagaaacatacaccccaggaccacagagcacagctgtggggcccctttggtagaggaagcaatgaagtgatatttgtagtggtggccgaaaggtcttaaaaaagggtcaaattatattcattgtattttgcttaagggggtcagttttagaaatgtttccatgggcaagtttaaaagctgatcatgcctactacctgtgacaagcctcattcctacccagcccatgtcctcagtctcctaccctgtgaggcgggtgaaggtagaggtcagtgctcaacttccttcttcatctgcctgattgtgaattttctcaggtggattgatcactaggggcatgaaccgcatttccctttggtttattgaagatgaaagcattttagggcagctttaatttcctgccaacccgtaggtttggctgcagttcacctctacataaaagagaccacttctccctcttagcccatctccaagtccacagtttggctatagttagcccattcttcttgccccacctcctgagtggcagatggaaaccacagctctgaaagtgctctgtgaaatagtaagtgatactctgctagattttcatgcactagtgttggatatcttacggtaaataaaggacatcttaggaacactgcagtcagcgtaggctgggggagtggcgtctttcctatgagtgttgtggaaaccacctcagaactgtctgagaggaggtgcctgtggagtgagggctgaccctggccccttcagaactgccatgtgttatccttgcccaaatgtgtccaaagaaatggccattttgcaggagtcttttttcccttttctgttttcataatgctattgctgctgctgctgttttaatgtggttcactgttgtcacttttgtgttttgtgatgctgatgatgatgctgttttcacatggctcactcttaactcagtggtctgtttgtgtttctataggacaagggctcagaggactggacgtgctcagacatcggtgttcttcttcccagttcttgacccctggtcctgtctccagcccgtcttggcttatccactttgactcctttgagccgtttggaggggcggtttctggtagttgtggcttttatgctttcaaagaatttcttcagtccagagaattcctcctggcagccctgtgtgtgtcacccattggtgacctgcggcagtatgtacttcagtgcacctactgcttactgttgctttagtcactaattgctttctggtttgaaagatgcagtggttcctccctctcctgaatccttttctacatgatgccctgctgaccatgcagccgcaccagagagagattcttccccaattggctctagtcactggcatctcactttatgatagggaaggctactacctagggcactttaagtcagtgacagccccttatttgcacttcaccttttgaccataactgtttccccagagcaggagcttgtggaaataccttggctgatgttgcagcctgcagcaagtgcttccgtctccggaatccttggggagcacttgtccacgtcttttctcatatcatggtagtcactaacatatataaggtatgtgctattggcccagcttttagaaaatgcagtcatttttctaaataaaaaggaagtactgcacccagcagtgtcactctgtagttactgtggtcacttgtaccatatagaggtgtaacacttgtcaagaagcgttatgtgcagtacttaatgtttgtaagacttacaaaaaaagatttaaagtggcagcttcactcgacatttggtgagagaagtacaaaggttgcagtgctgagctgtgggcggtttctggggatgtcccagggtggaactccacatgctggtgcatatacgcccttgagctacttcaaatgtgggtgtttcagtaaccacgttccatgcctgaggatttagcagagaggaacactgcgtctttaaatgagaaagtatacaattctttttccttctacagcatgtcagcatctcaagttcatttttcaacctacagtataacaatttgtaataaagcctccaggagctcatgacgtgaagcactgttctgtcctcaagtactcaaatatttctgatactgctgagtcagactgtcagaaaaagctagcactaactcgtgtttggagctctatccatattttactgatctctttaagtatttgttcctgccactgtgtactgtggagttgactcggtgttctgtcccagtgcggtgcctcctcttgacttccccactgctctctgtggtgagaaatttgccttgttcaataattactgtaccctcgcatgactgttacagctttctgtgcagagatgactgtccaagtgccacatgcctacgattgaaatgaaaactctattgttacctctgagttgtgttccacggaaaatgctatccagcagatcatttaggaaaaataattctatttttagcttttcatttctcagctgtccttttttcttgtttgatttttgacagcaatggagaatgggttatataaagactgcctgctaatatgaacagaaatgcatttgtaattcatgaaaataaatgtacatcttctatcttcacattcatgttaagattcagtgttgctttcctctggatcagcgtgtctgaatggacagtcaggttcaggttgtgctgaacacagaaatgctcacaggcctcactttgccgcccaggcactggcccagcacttggatttacataagatgagttagaaaggtacttctgtagggtcctttttacctctgctcggcagagaatcgatgctgtcatgttcctttattcacaatcttaggtctcaaatattctgtcaaaccctaacaaagaagccccgacatctcaggttggattccctggttctctctaaagagggcctgcccttgtgccccagaggtgctgctgggcacagccaagagttgggaagggccgccccacagtacgcagtcctcaccacccagcccagggtgctcacgctcaccactcctgtggctgaggaaggatagctggctcatcctcggaaaacagacccacatctctattcttgccctgaaatacgcgcttttcacttgcgtgctcagagctgccgtctgaaggtccacacagcattgacgggacacagaaatgtgactgttaccggataacactgattagtcagttttcatttataaaaaagcattgacagttttattactcttgtttctttttaaatggaaagttactattataaggttaatttggagtcctcttctaaatagaaaaccatatccttggctactaacatctggagactgtgagctccttcccattccccttcctggtactgtggagtcagattggcatgaaaccactaacttcattctagaatcattgtagccataagttgtgtgctttttattaatcatgccaaacataatgtaactgggcagagaatggtcctaaccaaggtacctatgaaaagcgctagctatcatgtgtagtagatgcatcattttggctcttcttacatttgtaaaaatgtacagattaggtcatcttaattcatattagtgacacggaacagcacctccactatttgtatgttcaaataagctttcagactaatagcttttttggtgtctaaaatgtaagcaaaaaattcctgctgaaacattccagtcctttcatttagtataaaagaaatactgaacaagccagtgggatggaattgaaagaactaatcatgaggactctgtcctgacacaggtcctcaaagctagcagagatacgcagacattgtggcatctgggtagaagaatactgtattgtgtgtgcagtgcacagtgtgtggtgtgtgcacactcattccttctgc

SEQ ID NO: 2199 - DNA, 6000 bp, Homo sapiens
ttaaatcgtccctcagttttgatgagtataaagagttctgagatcagaaagtttgagaagcactgtcgcactggcacactttgcacagttcagtcttttctctggccccgcacagaaacatgagttgaggatggaagtgacaggttgcagcattgattcagggtcagagtttcacgaggcaggcaagatagacatgaagaggcactgtggagagccagtcaatggctttccccaggtccaggacagggcaagaaggaaaaaaggatgatggattagaagaaagggttggaatcaggttgttacatactatttgaagttaaagagaagggccaggctggccaggcgcggtgggtcacacctgtaatcccagcactttgggaggccaaggcgggtggatcacgaggccaggagtttgagaacacgctggccaacatggtgaaacccccgtctctactaaaaatacaaaaaattagcctggcgtggtggcaggcacctgtaatcccagctactcgggaggctgaggcaggagaatcgcttgaacccaggaggtggaggttgcagtgagccgagacagcgccactgcactccagcctgggcaacagagtgagactcccgtttcaaaaaaaaaaagacaagggccaggcacagtggctcacacctgtaatctcagcactttgggaggcttaggcaggaggatcacttgagcccaggagttcaagaccagcctgggcaacatagtgactccccatctctacagaaaaattaatttaaaaaaattagctgggtgtggtaacatgtgcctgtagtaccagctactcgagaggctgaggcaggaggattgcttgagcccaggagttcaaggctgcagtaagctatgatcatgccactgcactccagcctgggccatagaacaaaatccaaactctgttttaaaaaacacagaaagagaaaatgtagtattctggaaggcactagggaaagtcaggatttgtggtcaggagtaatactagcctcaaagggacttccagtcttttaggggaaataaaacctgtatccaagtaagcatccacacaggcagccatgattcacaccatctgagtgttaccaatgaatgcccatgtggcgtgggaggagggagtccggacattcttgactgtgggatccgcacctgccagctgcttcccggttctctccttttctccttctgtagctatgaataatgtagaaatagcacttgcagtaacagaaggctggagatctagctacttttcaagtagcaaatctttttttaaaaagctgtcttctttgaaatttatgcctggaggtttaagggcctagaatttatttaactttaaggaactaatggatctgttttagaaatgcttaagctgcaaaacatccagttggcttggagtgcctgtctacttaatacgaacaagtttgagtaggacccttctgcccccagtggtttagaagtaatactgttagaatcttattgtggtccaggccttctggacttttcttagcacagacagtatctaattgggtgaaaagccaaatgacttaatctagtttcaagaaagtccttgagaaaatgtctgtgagttctatgtggggagggctggttgggagcaggaagcaaagtgggatttattacctatattatagaccacaggaatctttttttttttttttttttttttttgagacggagtctcgctctgtcgcccaggctggagtgcagtggcgcaatctcggctcactgcaagctccgcctctcgggttcacgccattctcctgcctcagcctccgaagtagctgggactacaggcgcccaccaccatgcccggctaattttttttgcatttttagtagagacggggtttcaccgttttagccaggatggtctcgatctcctgaccttgtgatccgcccgccttggcctcccaaagtgctgggattacaggcgtgagcccccgtgcccagccaaccacaggaatcttaagattcggcaagggttgtgtgtcttgcacacatatctacaagtgttccttggaagtaggatttgaaccagagattcctgggttcttgaccatcatgcgtctttgtcctgacccttgagagggccacttcctaaacctagccagtttgtgtgcccacagacccagggtcacagctgcaggcatgaccacctcttctactgcgcagacactccttcagtcacagcaaaacctgtctggattctctactctgaaaagttatctaggctataaaacaaaatatcattattccgtaatttcctaaagtgcacttgtatgtattgaaaagattatagatagaaacatacataacttttaaatgttttctatgcggaatttctcattatgtccagcatgtggtttaccatgtttatcatctcctgttgtcttaaggtcaggggttgcaacaagggaggtcaaaattggccggggctgagcacaaatacacacccacagcccttcagtgacctcaggcagcaagatgcctcccacctccccccagcacccaagcaatcccttcggaaggtctactgattgttcttaagggttaggaaacattttcttagtaaatagtgaaaacttactttttgaaagtagtggctagaagtgattccttaaactgatcatgagtattaaattgtaccaaattttacgtgattgtttatcattttaggaatggtgagaagggacatacaattaaattttaaaatgttttaagaagaaataatgatattttatcattctactttgagggcttaatagtatgtgctaatttgcagatggatgaagttgacctttacctacaaataacctaataagaaatgatcattgctggccgggcgcgatggctcacgcctgtaatcccagcactttgggaggctgaggcaggcggatcacgaggtcaggaaatcgagaccatcctggctaacacggtgaaaccccatctctactaaaaatacaaaaaattagccgggtgtggtggcgggcgcctgtagtcccagctactcaggaggctgaggcaggagaatggcatgaacccgggaggcggagcttgcagtgagccgagattgcaccactgcactccagcctgggcgacagagcgagactccgtctcaaaaaaaaaaaaaaaaaaaaaaaaaagaaatgatcattgtcagaaaagacgcttcattaagtagtgccagtgtttttgtttgcggtctgcaattgtcagatggtcggtccctatgttcacagtctcgggaggcttggagatatagtcagcaccctttgtgctggctgctctctctgtagtcatgcttagctcagttgttttgtgggtaagttacttaaacaggaaattgaagtatttctgtgactacttctgctctcactactgcaaaacctttctctttatagctctggacttattggacaaaatgttgacattcaacccacacaagaggattgaagtagaacaggctctggcccacccatatctggagcagtattacgacccgagtgacgaggtaagagctcatgttcctggctgctgcttcagggacatagatcagccagcagtggaccaaccatatcttgcttagattttcctgagatatacctgctgccatacccggttcttccaacaagcccacctttgccttgaggacgagtgctgtggggcacagcttgaaatccctccccccgtaactctgtctatctcagaagacttcctccaggccacctgcaacaggtaggggcggggtaaacgcatgtataaaggggacagctgcaccagtatggagcacagagggcatgggtctgagactggaggccattgtcatggtgtgacaggaagagacacctgaagtgaagtgctggccctgaggatggccggggtggagaggaggtgggcagcctgctgacagggacagcacacagagtggggagggaagtcaacttggacagtttccactgtggcttggcgactccatgtcgggtgtgctattccctagagacaaggacacgagagcctgttgtaagaagtgatgaggccagagtggatatggcagctcttcagagcaggcagggcattcaggtagaagatgctgcatgtcatgttctccccaagacagtcctagtgccttggctctctggtgtctctggggttcaattttaactttattctctggaggataacaaagaaaaatgcaatatgaaccaaaagtttggattgttgtagttgaggctcatatgcacagagaatagtctttaccctcctatttttgaaagaatcagctttcccttccacatccatctctctgcctccagcaacaagttaggcagcttgtgaaatacctacaacatagccagtaacacagaataggagagaatacaggtttggggctcttacaagcttagtgggctggagatttcccaagcttccgagtccaaatcagctggctggggtggtgggtgatgcgtgtaggacacctcctgtgatcccagatgcatagccctccttcgggctgagctatttattcttctggacatgagtccttctcccctttcagatggccaaagcttagtgcagagtttggggtctgtgcttcctccccctaaaggccccatgtgaggattacatgggtgagaggtgagattctaggcattcactgattgacagctggtattatcatcagcttagttctgtaacattgcattagttcacgggcatttaaaaatcaaaatgtggccaggcatggtggctcacacctgtagtcccagctattcagaaggctgaggtggaaagatctcttgagcccaggagatcgaggtttcagtgagctgtgatcacaccactgcactccagcttcggtgacagagcaaaactctttctctaaaaaataataatcagtttgtcactgagtgtgtatggggttctttgatctaaatagacagtttatattttacttaaatagctttctggagtatggttaaaaattaaaatgggggctgggcgcagtggctcacgcctgtaatcccagcactttgggaggccgaggcaggaggatcacttgaggtcaggagttcaagcccagcctggccaacatggggaaaccccgtctctactaaaaatacaaaaatagctgggcgtggtagtacatgtttgtaatcccagctactctggaggctgaggcataagaattgcttgaccccgggaagcagaggttgcagcgagccaagatcatgccagtacacaccagcctaggcaatagaatgagactcagtctcaaaaaaaaaaatggggccaggtatggtggctcacacttgtaatcacagcactttgggaggccaaggttggtggatcacctgaggttaggagttcgagaccagcctggccaacatagtgaaaccctgtctctactaaaaatacaaaaattagccaagtgtggtgccaggcgcctataatcccaggtactccggaggctgaggcaggagaatcgcttgaacccaggaggcagaggttgcagtaagccgggatcgtaccactgcactccagcctgggcaacaaagcgaggttttgtatagaaaaaaaaagagaaaagcaaacttgtaagaaaatacaggagagatttttttcatactacaaatatgtagctttataatcttgttacagttactaacattttggagtatttccttctcagtcttgtatttctgtatctaaattttaaaaataaaatagttttcattctcttgacacaacataggcattttcctattaatcttccttgcagcttaattttgttttcttttttgagatggagtcttgctctgtcaccaggccaggctggagtaccgtggtgtgatctcggctcacttcaacctccacctcccaggttcaagcaattctcctgcctcagcctcccgagtagctgggactacaggcacgcaccaccacacccagctaatttttgtattt

SEQ ID NO: 2200 - DNA, 6000 bp, Homo sapiens
acaggtgtgagctgctgtgccctgccatctgtacaaaaaattttaaaatcagctgggcatggtggtgtgcacctatagttccagccactcaagaggctgagatgggagattttcttgagcccaggaaattgaggctgcggtgtaccgtgatcacgccactgcactccagcctgggcaacagggtgagaccctgtctttaaaaaaagcaaaacgaaaaacaaccttttagtgagaagagtggcattgttttcatttttgcaagtctctttaatgtctggcttaatagaagacagttggattctcatctggttctgcattcagtctgtcaaatatgttgttttggtttaagttcatgaggaaaactcttttttttttttttttcaggctttaatcaatttaataatcaatataatattacatgcatagttcttcaaaaatgtcaaggaaaactctttcccatggattttaactgcttgaattcagagcatagaaaacagaagaaaacttgagtgcaatattaataaagaccctttaaaaaagatgttatataaaaagaaaaatcgcaagccagtgaaaaatacatgcaaaattctaaataacattttagcaaacaaaatctatgcttaaaagcataacacacaaaaaagtgagatttttccctagtatgtaacagtaatcagacattttatcaagacatttacaaataagcctaaaaatagatgtctgagtgctatttatgaaattcaagatctattcctcccatccaagcactaaccaggccaaccctgcttagcttccgagatcagacaagatcgggcgtgttcagggtggtatggccagaggaaaactcttcacacaggtatgtagctggaaaaaggagggaaattttagtagtcttttcagccacttgtggctattctttgatcctacccccagtttaaacaagtggtggtttcttaaaggttaattgcagtgtggaatctgaaatcatatcagtgaattcttgatactatttcgttaaaatccattagtctaccttgcactcatactcatgcatgattttttagcgtatttggaaaatactggttcactgagttacacagatattccaagtgtcacattttcatgtacacatcatcactcatcatattgcatctggaaaaatcttcttttcactcgtgactgaaaaggatgaaaatgtcatagtagtataataaatgtactgtgacctctcagatcctctagagggaacccataggagtctctggaacactcttgtagaaccgccagatagaactcctaaataccctttaccccagattcaggctcaccgattttttatcttttgccccatttgctttatcattctttgtgtgcatgtgtgtgggcactcccacgcactctgagtcatttgagagtaaattgtagatacaccccttcaccttgtttcagtatgtctttacttcaaaccatggtcctgttgttccctggggacatgtggcagggttgtcacagtgaggggtaggggtactccctgcatcaagaggccagagatgctgctaaaaatcctacgatatacagaacagccctccaaacagaaactttctcagcccaaaatgttagtcataccgaggttgaaaaaccctgccttaagagtattctctaacatgaccacagtacagttttcaaaatcaagaaacttaatactgattcagtatctaatgcacagtttatattcacattttagatattatcccaataacctttgaactataccccacccaaaccaccccccgacctgggcacaggttcacatgttgtactgtcatgagttttgtttgtttgcttgtttgcttgcttgttttaagaccaggttcgcaggccagccacagtggctcacacctgtaatcccagcactctgggaggccaaggtgggtgaatcacatggggtcaggagttcgagatcagcctggccaacatggcaaaaccctgtctctgctaaaaatacaaaaaatttagctggacatagtggcaggcacctgtgatcccagctactcaggaggctgaggcaggagaatcgcttgaacccaggaggtggaggttgcatgagctgagatcgtgccattgcactccagcctgggtgacaaagcaagactccgtctcaaaaaaaaaggacgggttctcattctgtcacccaggctggggtaccgtggcaccatctcggctcactgcaacctccgcctcctgggctcaaggccatcctcccaccttagcctcccaagtatctgagactacaggcacgtgctactgctcatggctgatttacttatttatttttgtgcttttcatagagacaggttgttgtgtttctttagtctcctttaagagtgcagatgagctattttgtagaatgcccctcagttttgggtcatgcatttttaacatgaataccagaaaagcacttcattgtattagaaggcacttctggagccaggtatggtgcctcatgccgtaatcccagctctttgggaggctgaggcaggaggatcatttgagcccaggagtttgaaaccagcctgggcaaatagtgggaccccttctctacaaaaaatttaaaaatcaaccaggtgtggtggtgtatgcctgtggcccacctactgtgtgccagctactcagtagtgccagctactcaggacctggctgaggtgagaggatcacctgagacaaggaagttgaatttgcagtgaggcatgattacaccattgcacttcagcctgagtgacagagtgatgacaccatctcttaattttaaaagagtcagcttatattccttggagaaacatcttttttgcaccattgttatgattcagacagaatccttccatgattttttttttttttttttaatttttagagaaagggtctcactctgtcacccaggctggaatgcattggctcggtcacagctcactgcagcctccaatccctgggcttaagtgatcctcccacctcagcctcccgagtagctgggactgcaggtgtgagccaccatgtgtggcaaaataataataataatgataataataataataattagttaatacccagtgttgttgaggacatgaggaaatgcattttctttcacatgctgctattaggagtgtaacagtgcaactgcagtcatagttcactgcagcctcaaactcctggcctcaagcagtactcccacctcagcctcccaaagtatcctcccatgacttctaacaggattcctttaaaagaaaacatattcctgaaaaatgaataggaaaagaagatgagaattcttttattttattttatttgttatgttatgttatatgttatgttatgttttatgttatgtttatgttatgttatgttatgttatgttatgttatgttatgttatgttatatgttatgttatgttatttttggagatggagtctccctgtgttgcccaggctggagtgcagtggtgcaatctcggctcactgcaacctctgcctcctaggttcaagcaattctcctgcctctgcctcccaagtagctggaactatgggtgcccaccaccacgcccggctaatttttgtagttttagtagagacagggtttcactatgttggccaggctgatcttgaacttctgacatcaggtgattcgcccgtctcggcatcccaaagtgctgggattacagacgtgagccaccatgcccagctgagaatattttagaagagattggtaaaatatgatggagctagcacacactcccccaaacccagaaaaggtttttagaccttttttctttttccagctccaatttatgacaattctaaatctgtctctcaaattgtttcaaaaaaggacggatgtatactttggaaattctaatttaataagttaatcaactttgtgggtttgttgttgttttgagacagagtctcgctctgtcacccaggctggagtgcagtggcacgatcttggctcactgcaacctctgcctcctgggttcaagcaattctcctgcctcagcctcccacgtagctgggattacgggcacccactaccatgcccggctaatttttttgtatttttagtagagatggggtttcaccatgttggccaggctagtctcaaactcctggcctcaagtgatccgcccgcctcggcctcccaaagtgctgggattacaggcattagccactgtgcccagcccaagttaatcaactatgaagagaaaaataaaatcacataatcttggttgttcagcctctcataagaaagccaaattgttttttgcttttccatgttgtttacttgtatttctgaattgtagagtcaaaggagaagttcagagtcccatcagcaatgcacctgtcatacaggaagatctcatcatgtcctgtaacaccagataccattttcagtcttttctctctttctcctgcagggctacaccaagtccattgatatttggtctgtaggctgcattctggcagaaatgctttctaacaggcccatctttccagggaagcattatcttgaccagctgaaccacattttgggtaaggttcccgagcccttcaggagctagatttactcaagtttgtacagcttacatcaaagtcacttcattaaattaagaagagttctaatatactctttaacctgtggtaggtgtgaatttttaaccttctctgatttaaaatgttaaggacttttgtgtaaaaacataagaaaggtaaacatcaggagtggtgataagcaacggctcatatcaattatcagggttcattccgactcagagttgatggtgtgtagtcatttaccttggtcctgataactaatagctaatttttttatctgataggtattcttggatccccatcacaagaagacctgaattgtataataaatttaaaagctaggaactatttgctttctcttccacacaaaaataaggtgccatggaacaggctgttcccaaatgctgactccaaaggtaaatgttatttcgttgattagttttttcttaggcttagcttcgcgtttatttgttaaattgttaggtcactagcctgaaaaatgagcctatggctattggataatgctttctttagtgctcactctgaattgttgtcttccccctttttttttttggaaacagtggcagtgcagtaagggaacctggtaatgacggtctagttctccaccttttggtttctttgctaattttaatttgcattaaggtcactttttttttgtttttgtttgagacagtgtctcactctgtcgcccaggctggagtgtagtggcccgatctcggctcactgcaacctcctcctcccgggttcaagcgattcttctgcctcagcctcccaagtaactgggactacagacgcgtaccaccacgcctggctcatttttgtatttttagtagagacagggtttcaccatgctggccaggctggtctcgaactcctgaccttttgatctgcccaccttggcctcccaaaactgggattacaggcgtgagccacagcgttcagcctaaggtcacatttttaggtctcaggaagtctaggaccctgcaaacaaattacaccttttcatcttgtcacttgataatttttaaaatcaggtttattgaagaataatttacacagaataaaattcacactttttagttgtgtgggcctctgagttttaacaaacataaactgtcatgtaacaaccaccgcaattgagatgtggaatattcccatcatccccaaaagttgccttgtgccgtttgtagtcagtcatccctctgcaaccccaagctctggcaatcattgatctgatttatatccctatagttttgccttttccggcatgtcatgttaatggaatcatgtagtatgtagcctttttatgtctagattctcccattcagcataatgcatttgagatttataaaaatccatgtcattgtttgtgtc

SEQ ID NO: 2201 - DNA, 6000 bp, Homo sapiens
aaaaaaggcataacgttgaatacacgtttcaaaagaagacataagaaaagatggtcatcatcatgaatcagagaaatgcaaatcaaaaccacaatgagctatcaccacacacccattaggactgacccccactttttttttttttgttttttgagactgagtctcactctgtcaccaggctggagtgcagtggcgcgatcttggctcactgcagcctccatcacctgggttcaagccattcttctgcatcagcctcccaagtagctgggactatgggcgcgcaccaccccacccagctaatttttgtatttttggtagagatggggtttcaccattttggacaggatggtgtcaatctcgtgacctcatgatccgcctgccgtgacctcatgatccgcctgccttggcctcccaaagtgctgggattacagacatgagccaccgcacccggccttcttttttaatgaaccatctttggattcctgtgataagagacacacttatagcaaaaacctgtagtgtggtggtagttagggacaaaaggggttgagcaaaacaagacacagttggtaatgtcaaagtgattttaaagcataaatgtttatagacacctgaaagttcatggtatgccttatttaccaagtatcaacaataaaatatgtaaaacaaaaccgagaaatccaaggagaaactagcaagtatggaatcattatggaagagtgtaaccctctttgtcatcagttctatgaaagatagattgcataaaccaaaaaggcagcagaatggttaagcggagcagacaggaacagacaaaactcctttttttcaagtgggaccagatgaggatgatctcatattttcttacttaaaaggaggcagttggccgggcatggtggctcaccctgtaatcccagccctttgcaaggccgaggcggggcctatcacgaggtcaggagattgaaaccatcctggctaacacggtgaaacaccgtctctactaaagatacaaaaaattagccaggcgtggtggcggggcctgtagtcccagctactcgggaggctgaggcaggagaatggcctgaacccaggagggggagcttgcagtgagccaagatcgcaccactgcactccagcctgggcgacagagcgagactgcttccacaaaaaaattttaaagaggccgggggggagggcagttatttcgtcactgagtgttgatacagtagaggggcacactgaccataaactcctctctccaaaaattttgttggattataattttgcagaacaaattatgaccacttgtgactgttaacactagaaatttataatattaacactagaaaattgtaatgttgagtttaaaccagcattttataactaatccgtgctgttgttgaactcttgttctatgatttgaattaccaaaatagaatttttttctaaaaatattcccaatattgaataagcttgcttattatatatgctttttaatactatgttaaattattactattatatatgctgttgcctaactgaaaatcactggcttagggcctcatgtaccaaaccaaagcaaaataagatttgagtagtggttattttacttaagaaaatatacttcatttcaaagcatttggggccacctgtgtactatatgttaatggtgttgtaggataattggatcctagtaagacaaagttctcctccagagcattatcttgtcatagaatcagacaaatgtatcaataattcttaggattagtagactgataaatattatagaagcataaactttatttaatttagagacggagtctcactctgtcgcccaggctggagtgcagtggtacaatcttggctcactgccacgtgcatctcccaggttcaagtgattcttgtgcctcagcctcccaagtagctgggattgtaggcacttgccaccatgcctggctaatttttttgtatttttagtagaggcggggtttcaccatgttgtccaggctggtctcaaaactcctgtcctcaagtgatccagccgccccagcttcccaaagtgctgggattgcaggtgtgagccactgcacccggccctagaagcataaattttagaataaagttattttactgctttctattctagcacttaccccaaggaaacaagaaatgttgtcttactgcctgtcaatgttatttgattgctttggtcagtgggccagatgttgacatttattaatatgaaaatttcttatacacaagattgtaatagaatgtttatcataaagatagtagtaatactcaagattcaaattcataaaattgaaggtataatttttattattgcttttgcttataattctggtttatcagacattaaggacaactaggaaagaactgggccccatgttattgccacaaatatgttttttgaagaatacttttctaggttttgttataaaactacccaaacatcttgattcagtttcttgggggaagaaatggtcatgttgttttgcaagtgagagaaacaaagttaatagaagtaatcaaggtgttctcttgggtccatttttgttagggataaagatgtacagttgtaggttatttgaatgtttcttctgtgtcagaggaatttgatacaacagtaagaaggtgtttcagagacagaagtgattactctcaccagaatgcagttgctgtttaagacaatgggagaatgcttgtttgtgtatttctgggtttataaaggcaagactttcacccagttaacagggctaggttctctgttagttttgagagtcactgtgtgctctctcatgtcagttgcatccatcctccctagcttgaggcctttttgtggataatatacatgctgccttcacgggtatgaaacaggtgtttacacagtgttaaaaatataatactttaccaacttgccttcttcaaatattctgagggctgtttttaatgccatctctctctctcttttttaagctctgcttatgataatgtcaacaaagttcgagtagctatcaagaaaatcagcccctttgagcaccagacctactgccagagaaccctgagggagataaaaatcttactgcgcttcagacatgagaacatcattggaatcaatgacattattcgagcaccaaccatcgagcaaatgaaagatgtgtatcctttttaggcaactggccaattccactgcttggtaaccttgttgagtaaatagaacttgaaatttcctgaacttaaaggaaaagtgcattaaacatgctaaagggaaaatcgtaatctgtttgctatttactccctaagtctagtcatggaaaatcttggttaactctgtttgcagtcatgtttcttctgtccaagggatggtttgttgtgatgatgaaaaggtaaagggaagatcagtagtagactaagaaagagggtgccctggctatctacctggtgaaatcaggactgtcctgatcttaagagtcaggttaccactttaggtctcagtttccccacctttaaaatgaaggaactggtcgtcatgatctttaaggtcaactgaggtctgaaattatgtgattaactctgaccaacatttagaaatctggactgaacagatctagaggatgctgcctgggtaaaggctccatttgaaagatagagaggttaagtatactgaagaggatctgccagaagggaaagggttatacagcactcctaccagtttacccaatttgtattccgcccctccagggtgcgggagctcgctgtttctaggcagccctttccatttttaaacagctctgttaataagttgtagtgatatttgaagtgaaatgcctcctgccactaccacctgttggtcctgctttactttttgccatgaaaataagcctctctcagatgacagatttttaaatcatgtttcctttgaatcccatgctgcgcctcctatagcataaatctgtaagaaacagagactagtgtttacacagaagtgagtaaaagaaatgtagaaatactgctaatgaaataatactatgatgaagttaaaggctaaatgctttaataatttaatttctgtgagaaagaaagtagccatagctaaacttttaggtagttaagtacgtgaccaggcaagaaagcatgaggaggaaaactagcacaaaccccttcttagaacgacttgcccatagtcttacttatttaagatcttaacagtaatggaagagtcaagaaaatagacttagggttggatttactagtaagagtatgtttctagacctgtatttctggaagttttatgtttggcttttgaggagcttgggagaggaggggagcggcaacaagaagtaaaaagaatagtgacattacaggttactggaccaaacagaggagggagtatctgctacttacaggctaacagtgtttccagcaaaccttggagggggttcgttgatggtggacaatttagagagcaaagaggttgagacttcaagattgaccagaatttccctaacagcctgtttcagatctcagtctaggcccatagccgcatcagtcagatgtaatgctggaatgcctgccatctcacaggacctaaaaggagttaacgacttcagattctttccatgaaggaaaccaagttttcctcagtttcttctttcctttaagggcttcatggtgtaatgatggactgtttgggaagagagtcaagagaggatgcatttttgttttcaatgctttgctaaatgtgaccagctaattggtgttttaccttaacctgtgcaaacagatatatagtacaggacctcatggaaacagatctttacaagctcttgaagacacaacacctcagcaatgaccatatctgctattttctctaccagatcctcagagggttaaaatatatccattcagctaacgttctgcaccgtgacctcaagccttccaacctgctgctcaacaccacctgtgatctcaaggtcagccaggttatttactattaaggtgatatatattgaaaaaccctttcactgaagcatagttatatttgtcattattcatattttaaattacaccagaaatacccaaaaacatgtttatggcaaaaatgctaataaagtgtggtagtcctcttcttcttccttatcccattgctcctttctccccagagataccttttttttttttttcttaaagacagagtcttagtatgttgcccaggccggtctggaactcctgggctcaagcagtcctcctttcttggcctcccaaagtgctgggattatgtatgtgggccacagcaccaggccgtgataactaactactataacaaattggtggccagttgcggtggctcacgcctgtaatcctagcaccttgggaggccaaggtgggccttatcacctgaggtcaggagttcaagaccagcctggccaacatggcgaaaccccatctctactaaaaatacaaaaatcagccgggcgtggtggcatgcgcctgtaatcccagctacatgggagctgaggtaggagaaccgcttgaacctgggaggcggaggttgcagtgagccgagatcacaccactgcacgccagcctgggtgacaaagcaaaactctgtcctaaaaaacaaagtgtattttctcccaaagtattttctatgctcttgcatacatgtgtatttttatactttatatagataaacaggatcacgtacattatgtgttagtttttttgttcgtttgtttgttttttgagatggagtctcgctctgtcacccaggctggagtgcagtggcgcgatctcagctcactgcaagctctgcttcccaggttcccgccattctcctgcctcagcctcccgagtagctgggactacaggcacctgccaccacgcctggctaatttttctttgtttttgtatttttgtagagatggggtttcaccgtgttagccaggatggtctcaatctcctgaccttgtgatccgccca

SEQ ID NO: 2202 - DNA, 6000 bp, Homo sapiens
tttaatctgtcttgatttgatttttgtatagggtgtgaaataagtatccattttattctttagcaagtagatatccaattttcccagcaccatttattgaagagactatcctttatgtttggactctttattctgttccatttgtctatttgtctgtttttatgccagtaccatgctgattccctgccccccacccagctttattaaggtataattgacaaatacaaattagtatatgaaactgaggtggaagtgctggaaaaataattagtatatattcatgatatacaacatgatgttttgatatatgtgtatattgtgaaatgattaaagcaaggtaattaacatatctgtcatctcacatactttttgtggtgagaatgtttaagatctaatcttttagtaatttgcaagtatataatacattattattaactgtagtcaccatgctgtaggatagagctctagaacttattcatcctggttaactgaaactttatactctaacaaattatctgcacatttcaccctatccccgcagtgttgtgctgttttggttactatagctttgtagtgtattttgaaatcaagtgatgtgaagccaccactttgttcttgctcaggattgctttggctatatgggatcttttgtggttccatatatgaatttaaagattacattttctgtttctgtgaaaaatgccattggaactttgatagggattacattgactctgcagaccacactgagtagtgtagacactttaagaatattaagtcagaccaggcacaatggctcatgcctgtaatcccagcactttgggaggctgaggtgggaggatcacttatgaccaggagttcaagaccagcctggataacatagtgagaccccatatctaccaaaaagtttttaaattaaaaacaattggccgggtgcggtggctcacacctgtaatcccagcactttgagaggccaaggcgggcagatcacgaggtcaggagatcgagaccatcctggctaacatggtgaaaccccatctctaccaaaaatacaaaaaaaaaggaaattagccgggcgtggtggtgggcccctgtagtcccagctactcgggaggctgaggcgggagaatggcgagaacccaggaggcggagcttgcagtgagccaagatgcgatactgcactccagcctgggcgacagagcgagactctgtctcaaataaataaataaataataaaaacaattaggcatggtttttggatgctgaattgaatttctttgtgtgtgtgtgtggttttttttttttttttaaagactgaataatattccactctatgtatatgctacattttctttatccattcatccatagtggacatttcggttgcttccacatcttgggtattgtgcgtaatgctgcacaatgaacctgccagtagctcttagagattctactttgaattgttttggatatatgctcagaagtgggattgctggaccatatgggaattctatttttaattttttgaggaatttccaagtggttacaccattttgcacactcaacaatagagtatgaaggttcaaatttatccacatcacacttacggttttctgtttgtttgtttgtttgtttttaaatagtggcagtcctggctggtcgtggtgggtggctcacgcctgtaattccagcactttgggaggccaaggcaggcgggtcaccaggtcaggagatcctgtaattccagctactcaggagactgaggcaggagaattgcataaacccaggaggcagacgttgcagtaagccgagattgagccactgcaccccagcctggcgacatagcgagactccgtctcaaaaaaaaaaaaggcataacgttgaatacacgtttcaaaagaagacataagaaaagatggtcatcatcatgaatcagagaaatgcaaatcaaaaccacaatgagctatcaccacacacccattaggactgacccccactttttttttttttgttttttgagactgagtctcactctgtcaccaggctggagtgcagtggcgcgatcttggctcactgcagcctccatcacctgggttcaagccattcttctgcatcagcctcccaagtagctgggactatgggcgcgcaccaccccacccagctaatttttgtatttttggtagagatggggtttcaccattttggacaggatggtgtcaatctcgtgacctcatgatccgcctgccgtgacctcatgatccgcctgccttggcctcccaaagtgctgggattacagacatgagccaccgcacccggccttcttttttaatgaaccatctttggattcctgtgataagagacacacttatagcaaaaacctgtagtgtggtggtagttagggacaaaaggggttgagcaaaacaagacacagttggtaatgtcaaagtgattttaaagcataaatgtttatagacacctgaaagttcatggtatgccttatttaccaagtatcaacaataaaatatgtaaaacaaaaccgagaaatccaaggagaaactagcaagtatggaatcattatggaagagtgtaaccctctttgtcatcagttctatgaaagatagattgcataaaccaaaaaggcagcagaatggttaagcggagcagacaggaacagacaaaactcctttttttcaagtgggaccagatgaggatgatctcatattttcttacttaaaaggaggcagttggccgggcatggtggctcaccctgtaatcccagccctttgcaaggccgaggcggggcctatcacgaggtcaggagattgaaaccatcctggctaacacggtgaaacaccgtctctactaaagatacaaaaaattagccaggcgtggtggcggggcctgtagtcccagctactcgggaggctgaggcaggagaatggcctgaacccaggagggggagcttgcagtgagccaagatcgcaccactgcactccagcctgggcgacagagcgagactgcttccacaaaaaaattttaaagaggccgggggggagggcagttatttcgtcactgagtgttgatacagtagaggggcacactgaccataaactcctctctccaaaaattttgttggattataattttgcagaacaaattatgaccacttgtgactgttaacactagaaatttataatattaacactagaaaattgtaatgttgagtttaaaccagcattttataactaatccgtgctgttgttgaactcttgttctatgatttgaattaccaaaatagaatttttttctaaaaatattcccaatattgaataagcttgcttattatatatgctttttaatactatgttaaattattactattatatatgctgttgcctaactgaaaatcactggcttagggcctcatgtaccaaaccaaagcaaaataagatttgagtagtggttattttacttaagaaaatatacttcatttcaaagcatttggggccacctgtgtactatatgttaatggtgttgtaggataattggatcctagtaagacaaagttctcctccagagcattatcttgtcatagaatcagacaaatgtatcaataattcttaggattagtagactgataaatattatagaagcataaactttatttaatttagagacggagtctcactctgtcgcccaggctggagtgcagtggtacaatcttggctcactgccacgtgcatctcccaggttcaagtgattcttgtgcctcagcctcccaagtagctgggattgtaggcacttgccaccatgcctggctaatttttttgtatttttagtagaggcggggtttcaccatgttgtccaggctggtctcaaaactcctgtcctcaagtgatccagccgccccagcttcccaaagtgctgggattgcaggtgtgagccactgcacccggccctagaagcataaattttagaataaagttattttactgctttctattctagcacttaccccaaggaaacaagaaatgttgtcttactgcctgtcaatgttatttgattgctttggtcagtgggccagatgttgacatttattaatatgaaaatttcttatacacaagattgtaatagaatgtttatcataaagatagtagtaatactcaagattcaaattcataaaattgaaggtataatttttattattgcttttgcttataattctggtttatcagacattaaggacaactaggaaagaactgggccccatgttattgccacaaatatgttttttgaagaatacttttctaggttttgttataaaactacccaaacatcttgattcagtttcttgggggaagaaatggtcatgttgttttgcaagtgagagaaacaaagttaatagaagtaatcaaggtgttctcttgggtccatttttgttagggataaagatgtacagttgtaggttatttgaatgtttcttctgtgtcagaggaatttgatacaacagtaagaaggtgtttcagagacagaagtgattactctcaccagaatgcagttgctgtttaagacaatgggagaatgcttgtttgtgtatttctgggtttataaaggcaagactttcacccagttaacagggctaggttctctgttagttttgagagtcactgtgtgctctctcatgtcagttgcatccatcctccctagcttgaggcctttttgtggataatatacatgctgccttcacgggtatgaaacaggtgtttacacagtgttaaaaatataatactttaccaacttgccttcttcaaatattctgagggctgtttttaatgccatctctctctctcttttttaagctctgcttatgataatgtcaacaaagttcgagtagctatcaagaaaatcagcccctttgagcaccagacctactgccagagaaccctgagggagataaaaatcttactgcgcttcagacatgagaacatcattggaatcaatgacattattcgagcaccaaccatcgagcaaatgaaagatgtgtatcctttttaggcaactggccaattccactgcttggtaaccttgttgagtaaatagaacttgaaatttcctgaacttaaaggaaaagtgcattaaacatgctaaagggaaaatcgtaatctgtttgctatttactccctaagtctagtcatggaaaatcttggttaactctgtttgcagtcatgtttcttctgtccaagggatggtttgttgtgatgatgaaaaggtaaagggaagatcagtagtagactaagaaagagggtgccctggctatctacctggtgaaatcaggactgtcctgatcttaagagtcaggttaccactttaggtctcagtttccccacctttaaaatgaaggaactggtcgtcatgatctttaaggtcaactgaggtctgaaattatgtgattaactctgaccaacatttagaaatctggactgaacagatctagaggatgctgcctgggtaaaggctccatttgaaagatagagaggttaagtatactgaagaggatctgccagaagggaaagggttatacagcactcctaccagtttacccaatttgtattccgcccctccagggtgcgggagctcgctgtttctaggcagccctttccatttttaaacagctctgttaataagttgtagtgatatttgaagtgaaatgcctcctgccactaccacctgttggtcctgctttactttttgccatgaaaataagcctctctcagatgacagatttttaaatcatgtttcctttgaatcccatgctgcgcctcctatagcataaatctgtaagaaacagagactagtgtttacacagaagtgagtaaaagaaatgtagaaatactgctaatgaaataatactatgatgaagttaaaggctaaatgctttaataatttaatttctgtgagaaagaaagtagccatagctaaacttttaggtagttaagtacg

SEQ ID NO: 2203 - DNA, 6000 bp, Homo sapiens
ggagtttgagaccagcctggccaacatggcaataccccgtctctactaaaaataaaaaaattagccgggtgtggtggcacacacctgtaatcctagctactcgggaggctgaggcaagagaatcacttgaacccaggaggcggaggttgcagtgagccgagattgtgcaactgcactccagcctgggcgacagaacaagactctgtctcaaaaaaaaaaagagctgaaagtcaacaaatataatggcttgtcagctgcattctgtttccctcctatagtactcaataccaatcccttaatgagtaccatctcccttggctcctttgataacgtgcactcccagttctttggtctctctggccacatttcctctgtcctcttccataacttgacctttattgacacagtaaaggcaggcactcctttggcttagttctcagatgtcttatccactcttaaggcttcaattaatatctctatgaagatgaccccatgagctctcttgtcgcattcagaaacagcatttcaaactcaattaaaccaaaatagacacttgctatcttagtctaagatgaccaagcatactaagagtgtttcaatctctcctcctctccctcctccccgtctacactgttcccttatacatctgaccagtcatcagtttcctcttctttgccagagttacctggttggtcctctgttctacttcagtggttcttaatgtttccaggataatggactcatttgaaaatctatcaaatgctatgtattttttaaccaaaaagataaatatagaaaacatataattacaatttcttttttttttttttttgagacccagtcttgctctgtcacccaggctggagtacagtggcgcgatcttggctcactgcaagctctgcctcccgggttcacaccattctcctgcctcagcctccccagcagctgagactacaggcgcacaccgccacggccggctactttttttttttgtatttttagtagagatagggtttcaccatgttagccaggatggtctcgatctcctaacctcgtgatccgcccacctgggcctcccaaagtgctgggattataggcgtgagccaccgcgcctggccatgattgcaatttcacctaaccaatgacccagataagaatctgtgctcatccactcaagattttaactaccatttacacaaattttcatctccagctcctgctcccctcttacaaattttaagatggtttctggatatagcctgaatggcctacaggcattacaaacttaagttcaaaccagaactatttccccctgacaaatctgctctaacagtattcctttacttggataatggcaccaccatctcccaggctcccaacctagaggcctcagaatgaacaaccgcccatagccaatcaaccagcaagccttgttctatctcagaaatccctccaaatccaaatcccacctctcttggtctcttaccctttaaggtctcataatcctttgattccactcagacttgccatgattaaaagtctttttaccactcttcccacaagggtccctgttactatttctgtcaatacaaaactcctcacctccatctgctaccttccgctgccactttattactgcacctctaggtggttaggctttcctaatttattcctccactccggttcttcttccttcattcccactagtgttgatttgtcttcccaaaaaatttcaaaattgaccatgtatgactgcctctttcaaaaaaaggccgggcacggtgactaaagcctgtaatcacagcactttgggaggctgaagtcagggggaccacctgaggtcaggagtttgagaccatcttggccaacatggcaaaacgctgtctctacaaaaatacaaaaaaaaaattagctgagcatggtggcacgcgcctgtagtcccagctactcaggaggctgaggcaggagaatcgcttgaacctaggaggcagaggttgcagtgagccgaggtcatgccactgcactacagcctaggcaacaagagtgagactccacctcaaaaaaaaaaataaacaaataaataaataaataagatgcttcctccactgaacaaatatacagtcaaacttagttttgcctttggagtcctctacagtttgccacctaagtacatttccaagattagattccacagctcaagctgtcacttgttcctattatctgcatatcaaaatcacacccactcttaaaggcccaactcaaatcccactcttcatctttacatcctctacataatcattaggaaaggactctaaacaaaatagtcacaattcctaatgaactgataaggaaacagaagggggtaaatctaaaaaatggctagaaatccataaatccttttggaagcattttttaaaagatcaccattcaaatattagtgaatatttcaacgagccctccataaatccagcactgttagccaatatttattaaatgctaataatgtgcaatggagaaggttaacagcagggtatttcatcaacctgataaaaggctataatctggatcttggattcaaattccaattacatttgtatttcacttaggaaacgacaatcacaaaaaggggacttagcatttcaaatggagagtcagaaggtcaaacaagcctacagcagtgacagaagtagttcccacatctaaacaacttcagactagtaaaaaccttatcagacaggagaaatcttatcagatgggggtatcttttcaattgacatgtcctaaacgtaaaatacttttttcagtccacattttagataagctaatcttgttaaaagggccaaaggatgtgatgggaaattctgagcctctcataatgagacatgttcactggcacacttcccagtgagtgcaacagcaatgcgatgtgtggtggagaaatgatgctactggcaatactttctctccattactttttagggccttatttctttcaggctcgacctaatttaaattctgtcttggctcctaagcctgtgagttcacattaattttcacagttgtattcagcattttgctcctaaacaaagtgaaaacattaaagattcaattaaaatctctttaaaaagaattttaactaatctttctatctagctacaatacttggtaaaacataccttctatggcatttctaaaattatgattgaaatttgaatacatttccgaaacagacttatatttactttataacagtaagatacagaaaattctgcaagtattaattacactaaggaacgcagagtgttttcctaaaaacagctgaaaagagctacagtgtgtctagtagaatctcagtctacaatcttaataactctagttctatgacctcaagaattggcttcacctcgaaatactttctcacctgaaaaaaggaataacaccatcttttcctccctcaatgtggctgctcaaataaaatgaaataatatatgtagcacagtacctgccacgaagggttcaataaattattagtttactttcttcagtcaacacaaaagacacattcacaagattcagatttaaggaaatctatttccacaagtcctcaccagcacaaaatgctatcgctagtttgctctaataaaaactaccatcagccgggcgcggtggctcacgcctgtaatcccagcactttgggaggccgaggcgggcggatcacgagatcaatacatcgataccatcctggccaacatggtgaaaccctgtctctactaaaaaatacaaaaatgggccgggtgtggtgtcgcgcgcctgtagtcccagctactcgggaagctgaggaagaagaatcgcttgaacccaggaggcggaggttgaagtgaaccgaggtcacgccactgcacttcagcctggagacagagcgagaccccgtctcggggggaaaaaaaaaaccgtcactatcatttcacttttctaagggacctgaatcaagatgagggagtctacgtgtgattctgcaagaactccattaaggctgcatacataatgaccactaaatcattaacaggagtccatagcaattgggctaaaacatctgggagcatttatgctggtaaaagagctcacttgggggctaaaaaaaaagtcaaattaggcccaactctaaacggatctttaacaaatcaagagagtaatgttagtttatccttcctgaaacgccagcagtacgatattaaaatccacttagaagtaaaaacttcaagacggaaatatgccaccaacactggcgtcagtaatccattttagaaagcctgcgcggagaccaccattagcaccgctgaggatatttaatgaaagccgttggctgcaaacagaggcgaagagagaaaaacgattatttcggtgttctgcacacacgcggaggcaaaacgctttcaggacctcagcagccaccgccgccaacaccgacaagcatctgatggaattcacagttttacaatcgaaagtccaaaagaaggccatgatactagcaaattgaggggtggggacccttccgttgccttcccgagggtccagactttaaaggccgcgctgcgcccggggccaagggtccactagtaccggcctacgccccccgcgccactccctgagccccttcccgagcgaccgaaggcccgggaaccgcgagcaacaacacctaaacctcaaccggcccggggccgcgcccgagccctggcgcgcggaccgcggtgaagtccgggttcgaggtcgccgcggcgcctgaggccgaggcgcgggcgaggccgaggctgcgtccgctgcggccccgggcggtgggggggccgggcgtggccggtcgcggacactcaccacaccatgccgtaggcgccctcgccgatgtacgagaggttggtgtagcgcggccccacgtcgaacacctgcccgcggaccatctccgggcccgcgcccgccgccgccgccgccgccatgttggctgccgggccgccgccgcctccgccgcgctgagctcgacgctcggcggccgccgctcagctcttgtcgcccctcccgcagggactgcgccgccgccggtgcagccgccgacgctgaccgggaggaggaaggaagacgccgagcgggagagctgaagagccgacagccactcggaccgattgcctgcctgcctgccagactgacgggcgggccggcgggcgggcggagggaggggcgcgcgccgaggagggtgccggggcggggacaagaagtgtgcatgcggattggttcctcgcggctgggggcggggccgcgcgggccggcggaagcggcgggcttcgggaggggcactgcgacggcgttgactgagggggcgccactaggcgcggtcacgtgcattcgcggtgcattcgcgggggcgtcggtgcgggtcgcgtctcttaagacacccagggagacagacgtggggcagaactcatgggctgaagtgagagatggctggggcccaggcgagcgaccgagcagggtccgaacagagccagcgagggaccccgggctgtgcttgaggcccgacgacgcgccatatcccggcagcgccgcagctcaggcctctgcgaatctgtggtccacacgctgataaacttagaggcctctgcactggggcagaaaccgaaaggcatgacccagaccgagaaagatatttgcatactgagaaagtgtgaaacacaattgtcgagactaaaaggagacactgagaggatacgccaatcaggttagttcagatgtttgttgagcacactccatgttcctggggatccacccttatagaagttaccttttagagagaggagacagacaaatacgtgtaatgctcaagttgtgataagtacgatgaagaagtacaaagcagaagggagggcgcggtgtctcacgcctatcatcccagcactttgggaggccgaggcgggcggatcacttgaggtcaggagtttgagaccaggtctctac

SEQ ID NO: 2204 - DNA, 6000 bp, Homo sapiens
tgtactctgtccaacagacttatgtgaggtaggcattattgtgatcccattttaagtctgaggaaaatgaggacaaggtcacacagctggtaagcagagcagccaagattcaaacagtctcagcacagaactcatgcagttaaccaatggtggtttaaatttgtggcactgaaacacctgtgggatgtcacatggagctgtcctgtgtgcaggtggacatgctgacctggaattcaggagagatcttctgagcaataaagatccaggaaatgaggggcacggtggctcacacctgtattcttagcactttgggaggccgaggtgggcagatcacgaggtcaggagtttgagaccagcctggccaatatggtgaaaccccgcctctactaaaagtacaaaaaataaattagctgggcgtggtggtgcatgcctgtaatcccagctactcgggaggctgaggcagaaaaattgcttgaacctgggaggtggaggttgccgtgagccgagatcaccctaccacactccagcctgggcaacagagtgagactctgtctcaaaaaaaaaaaaaaaagatctgggaggaaggaggtgcataccaatagtcccagttacttgggaggctgaagtaggagaatggtttgaggccaggagttcaaaaccagcctgggcaacaagtgagaccccgtctctctctattttttttttttttttgagatggagtctcactctgttactcaggctagagtgcagtggtgtgatctctgctcactgcaacctccacctcctgagttcaagagaccttcccgcctcagcctcccaagtagctgggattacaggtatgagccaccatgcctaactaatttttctgtatttttagtagagacagggttttgtcatgttggccaggcttatctcaaactcctgacctcaggtgatccgcccacctcggcctcccaaagtgctgaattatgggcgtgggccaccgcgcctggcccccgtctccttttatatataattttccaaaaaaaaaaaaaaaaaaaaaagatctaggaggaattaaggcactggagtgaatgaaatcatctatgaagggtcaaaatctaccccttcaaagtgttgtcaatcttgttctattttcctttgtcttttaagtgttgcagaggagaaatctgaagaaagccagtttttagctttttttttgagatggagtctcgttcttgccaccatctatgaatctatgaagggtcgaaacctaccccttcaaagtgttgtcaatcttgttctattttcctttggcttttaagtgttgcagaggaaaaatctgaataaagccagtttttagctttttttttttttaaatggagtctcgttcttatcacccagactggagtgcaatggtgcaatctcggctcactgcaacctatgccttccgggttcaagcgattctcctgccttagcctcccaagtagctaggattacaggtgccagccatcatgctcggctaatttttgtattttcagtagagacaaggttttaccacgttggccaggctggtctcgaactcctgacctcaggtgatccacccgcctcagcctcccaaagtgctgggattacaggtgtgagccacctcgcccagccatctttttttcccccggagacggaatctcactctgttgcccagactggagtgcagtggcacgatctcggctcactgcaacctccacctcctggattcaagcaattctcctgcctcagcctcccaagaagctggaattacaggcacacaccaccacacccagctaatttttgtatttttagaagagatggggtttcgccatgttggccaggctggtctagaactcctgacctcatgatccgcccgcctcggcctcccaaagtgctgggattacaggcacgagccaccgtgcctgctggccagcttttttataaataacatttttttccctaattgggtctattagtgtctgttctttatccctgaaacttaatgattttcccagattatgtgttgttggtttcttcttaatttttctcaatctcagtgaacccactctatttcccacctccacctcagacctttttgcaacctaaggaaacttttctcctattgtaattttgattattcgctctaaccgatttgctctgtcttcctgtggggatgcctagagttagaatccctagatgctgtccatccccattatcttctcttacaggattccatcactttgttctatattcttgaaaattttctcatgtttatcttctatattgctgatgtactcttctgcatcaagtctactttttttttttttttttttgagacggagtcttgctctgtcacccaggttggagtgcagtggcgtgacctcggctcactgcaagctccgcctcccgggttgacgccattctcctgtctcagcctccggagtaggtgggactacaggcactcgccaccacgcccggctaattttttttttttttttttttggatttttagtagagacgaggtttcaccatgttagccaggatggtctcgatctcctgaccttgtgatccgcccatctcggcctcccaaagtgctgggattacaagcgtgagccaccgcacccggcctcttttttttttttttttttgagacggagtctcactctgtggcccaggctggagtgcagtggcgcgatctcagctcactgtaacctctgcctcccgagttcaagcaattctcctgcctcagcctcccgagtagctgggactacaggcacaccggcaggcccagctaattttttgtatcttagtagagacggggtttcaccatgttgcccaggctggtccccagtttctgagcttgggcaatctgccctcctccgcctcccaaagtgctgggattacaggcgtgagccaccgcgcccggccggttattgtggttttaatttcatggtactccatttatcttggcctgttttttaaaaaaatatgcaatgtcctcttttgagaataagaattaggtattttctttttattattattattatactttaagttttagggtacatgtgcacaatgtgctggttagttacatatgtatacatgtgccatgctggtgtgctgcacccattaactcaagaattaggtattttctaaaattgggtcctgcttcatgggctaaatatattttgaaggagtaaattttggctggagcagtttattccttttctcatgtgtcacatcctttttcccccacaggattttttgtttgtttgtttctctgttttagagacagggtattgctgtgttgcccaggctagtcttgaattcttgggcccaagttgggattacaggcgtgagccaccacaccagcttccaccagagagttaaacaaacaaacaaacaaaaaactttgtttattctcctttgagattgactaattaatctttgttgatgtctagaagtcaagagttgatggttttaaacttggaagagttgaacaaagaggatatagggtctgccgctcttccttctccctccaaacatggcaggggaaaaggttcagaagcagtgcctgggtcattgtccgtctcgttgtcttagctttccttggtatccacctgcttcaggactctaatttttattttttcaacctctgttgtttgtgactgtttcttaacctggtgtgtctctttttctctaaacctcgatgttttggttttagtgactctatctttgcatttctatttcattacctgctctgtcagcatttctgcctatctgtaccaatctcggtctgtctctgaacgcaaatgtatctctcatgtgtttcgacccaccaccccctaatcccttactctctgctttgtcctcctgcctcagcctcccaagtagctgggatgacaggcgcccaccactgcgcccggctaatttttgtatttttagtagagacagggtttcgccatgttggccaggctggtcttgaactcctgacctcgtgatccgcccgcctcggcctcccaaagtgctaggattacaggcgtgagccacctcgcccggacttaatttttgtatttttagtagagacctggtctcaaactcctgacctcaagtgatccgcccgcctcggcctcccaaagtgctgggatgataggcgtgagacaccgcgccctcccttctgctttgtacttcttcatcgtacttatcacaacttgagcattacacgtatttgtctgtctcctctctctaaaaggtaacttctataagggtggatccccaggaacatggagtgtgctcaacaaacatctgaactaacctgattggcgtatcctctcagtgtctccttttagtctcgacaattgtgtttcacactttctcagtatgcaaatatctttctcggtctgggtcatgcctttcggtttctgccccagtgcagaggcctctaagtttatcagcgtgtggaccacagattcgcagaggcctgagctgcggcgctgccgggatatggcgcgtcgtcgggcctcaagcacagcccggggtccctcgctggctctgttcggaccctgctcggtcgctcgcctgggccccagccatctctcacttcagcccatgagttctgccccacgtctgtctccctgggtgtcttaagagacgcgacccgcaccgacgcccccgcgaatgcaccgcgaatgcacgtgaccgcgcctagtggcgccccctcagtcaacgccgtcgcagtgcccctcccgaagcccgccgcttccgccggcccgcgcggccccgcccccagccgcgaggaaccaatccgcatgcacacttcttgtccccgccccggcaccctcctcggcgcgcgcccctccctccgcccgcccgccggcccgcccgtcagtctggcaggcaggcaggcaatcggtccgagtggctgtcggctcttcagctctcccgctcggcgtcttccttcctcctcccggtcagcgtcggcggctgcaccggcggcggcgcagtccctgcgggaggggcgacaagagctgagcggcggccgccgagcgtcgagctcagcgcggcggaggcggcggcggcccggcagccaacatggcggcggcggcggcggcgggcgcgggcccggagatggtccgcgggcaggtgttcgacgtggggccgcgctacaccaacctctcgtacatcggcgagggcgcctacggcatggtgtggtgagtgtccgcgaccggccacgcccggcccccccaccgcccggggccgcagcggacgcagcctcggcctcgcccgcgcctcggcctcaggcgccgcggcgacctcgaacccggacttcaccgcggtccgcgcgccagggctcgggcgcggccccgggccggttgaggtttaggtgttgttgctcgcggttcccgggccttcggtcgctcgggaaggggctcagggagtggcgcggggggcgtaggccggtactagtggacccttggccccgggcgcagcgcggcctttaaagtctggaccctcgggaaggcaacggaagggtccccacccctcaatttgctagtatcatggccttcttttggactttcgattgtaaaactgtgaattccatcagatgcttgtcggtgttggcggcggtggctgctgaggtcctgaaagcgttttgcctccgcgtgtgtgcagaacaccgaaataatcgtttttctctcttcgcctctgtttgcagccaacggctttcattaaatatcctcagcggtgctaatggtggtctccgcgcaggctttctaaaatggattactgacgccagtgttggtggcatatttccgtcttgaagtttttacttctaagtggattttaatatcgtactgctggcgtttcaggaaggataaactaacattactctcttgatttgttaaagatccgtttagagttgggcctaatttgactttttttttagcccccaagtgagctcttttaccagcataaatgctcccagatgtttta

SEQ ID NO: 2205 - DNA, 6000 bp, Homo sapiens
cataacttgacctttattgacacagtaaaggcaggcactcctttggcttagttctcagatgtcttatccactcttaaggcttcaattaatatctctatgaagatgaccccatgagctctcttgtcgcattcagaaacagcatttcaaactcaattaaaccaaaatagacacttgctatcttagtctaagatgaccaagcatactaagagtgtttcaatctctcctcctctccctcctccccgtctacactgttcccttatacatctgaccagtcatcagtttcctcttctttgccagagttacctggttggtcctctgttctacttcagtggttcttaatgtttccaggataatggactcatttgaaaatctatcaaatgctatgtattttttaaccaaaaagataaatatagaaaacatataattacaatttcttttttttttttttttgagacccagtcttgctctgtcacccaggctggagtacagtggcgcgatcttggctcactgcaagctctgcctcccgggttcacaccattctcctgcctcagcctccccagcagctgagactacaggcgcacaccgccacggccggctactttttttttttgtatttttagtagagatagggtttcaccatgttagccaggatggtctcgatctcctaacctcgtgatccgcccacctgggcctcccaaagtgctgggattataggcgtgagccaccgcgcctggccatgattgcaatttcacctaaccaatgacccagataagaatctgtgctcatccactcaagattttaactaccatttacacaaattttcatctccagctcctgctcccctcttacaaattttaagatggtttctggatatagcctgaatggcctacaggcattacaaacttaagttcaaaccagaactatttccccctgacaaatctgctctaacagtattcctttacttggataatggcaccaccatctcccaggctcccaacctagaggcctcagaatgaacaaccgcccatagccaatcaaccagcaagccttgttctatctcagaaatccctccaaatccaaatcccacctctcttggtctcttaccctttaaggtctcataatcctttgattccactcagacttgccatgattaaaagtctttttaccactcttcccacaagggtccctgttactatttctgtcaatacaaaactcctcacctccatctgctaccttccgctgccactttattactgcacctctaggtggttaggctttcctaatttattcctccactccggttcttcttccttcattcccactagtgttgatttgtcttcccaaaaaatttcaaaattgaccatgtatgactgcctctttcaaaaaaaggccgggcacggtgactaaagcctgtaatcacagcactttgggaggctgaagtcagggggaccacctgaggtcaggagtttgagaccatcttggccaacatggcaaaacgctgtctctacaaaaatacaaaaaaaaaattagctgagcatggtggcacgcgcctgtagtcccagctactcaggaggctgaggcaggagaatcgcttgaacctaggaggcagaggttgcagtgagccgaggtcatgccactgcactacagcctaggcaacaagagtgagactccacctcaaaaaaaaaaataaacaaataaataaataaataagatgcttcctccactgaacaaatatacagtcaaacttagttttgcctttggagtcctctacagtttgccacctaagtacatttccaagattagattccacagctcaagctgtcacttgttcctattatctgcatatcaaaatcacacccactcttaaaggcccaactcaaatcccactcttcatctttacatcctctacataatcattaggaaaggactctaaacaaaatagtcacaattcctaatgaactgataaggaaacagaagggggtaaatctaaaaaatggctagaaatccataaatccttttggaagcattttttaaaagatcaccattcaaatattagtgaatatttcaacgagccctccataaatccagcactgttagccaatatttattaaatgctaataatgtgcaatggagaaggttaacagcagggtatttcatcaacctgataaaaggctataatctggatcttggattcaaattccaattacatttgtatttcacttaggaaacgacaatcacaaaaaggggacttagcatttcaaatggagagtcagaaggtcaaacaagcctacagcagtgacagaagtagttcccacatctaaacaacttcagactagtaaaaaccttatcagacaggagaaatcttatcagatgggggtatcttttcaattgacatgtcctaaacgtaaaatacttttttcagtccacattttagataagctaatcttgttaaaagggccaaaggatgtgatgggaaattctgagcctctcataatgagacatgttcactggcacacttcccagtgagtgcaacagcaatgcgatgtgtggtggagaaatgatgctactggcaatactttctctccattactttttagggccttatttctttcaggctcgacctaatttaaattctgtcttggctcctaagcctgtgagttcacattaattttcacagttgtattcagcattttgctcctaaacaaagtgaaaacattaaagattcaattaaaatctctttaaaaagaattttaactaatctttctatctagctacaatacttggtaaaacataccttctatggcatttctaaaattatgattgaaatttgaatacatttccgaaacagacttatatttactttataacagtaagatacagaaaattctgcaagtattaattacactaaggaacgcagagtgttttcctaaaaacagctgaaaagagctacagtgtgtctagtagaatctcagtctacaatcttaataactctagttctatgacctcaagaattggcttcacctcgaaatactttctcacctgaaaaaaggaataacaccatcttttcctccctcaatgtggctgctcaaataaaatgaaataatatatgtagcacagtacctgccacgaagggttcaataaattattagtttactttcttcagtcaacacaaaagacacattcacaagattcagatttaaggaaatctatttccacaagtcctcaccagcacaaaatgctatcgctagtttgctctaataaaaactaccatcagccgggcgcggtggctcacgcctgtaatcccagcactttgggaggccgaggcgggcggatcacgagatcaatacatcgataccatcctggccaacatggtgaaaccctgtctctactaaaaaatacaaaaatgggccgggtgtggtgtcgcgcgcctgtagtcccagctactcgggaagctgaggaagaagaatcgcttgaacccaggaggcggaggttgaagtgaaccgaggtcacgccactgcacttcagcctggagacagagcgagaccccgtctcggggggaaaaaaaaaaccgtcactatcatttcacttttctaagggacctgaatcaagatgagggagtctacgtgtgattctgcaagaactccattaaggctgcatacataatgaccactaaatcattaacaggagtccatagcaattgggctaaaacatctgggagcatttatgctggtaaaagagctcacttgggggctaaaaaaaaagtcaaattaggcccaactctaaacggatctttaacaaatcaagagagtaatgttagtttatccttcctgaaacgccagcagtacgatattaaaatccacttagaagtaaaaacttcaagacggaaatatgccaccaacactggcgtcagtaatccattttagaaagcctgcgcggagaccaccattagcaccgctgaggatatttaatgaaagccgttggctgcaaacagaggcgaagagagaaaaacgattatttcggtgttctgcacacacgcggaggcaaaacgctttcaggacctcagcagccaccgccgccaacaccgacaagcatctgatggaattcacagttttacaatcgaaagtccaaaagaaggccatgatactagcaaattgaggggtggggacccttccgttgccttcccgagggtccagactttaaaggccgcgctgcgcccggggccaagggtccactagtaccggcctacgccccccgcgccactccctgagccccttcccgagcgaccgaaggcccgggaaccgcgagcaacaacacctaaacctcaaccggcccggggccgcgcccgagccctggcgcgcggaccgcggtgaagtccgggttcgaggtcgccgcggcgcctgaggccgaggcgcgggcgaggccgaggctgcgtccgctgcggccccgggcggtgggggggccgggcgtggccggtcgcggacactcaccacaccatgccgtaggcgccctcgccgatgtacgagaggttggtgtagcgcggccccacgtcgaacacctgcccgcggaccatctccgggcccgcgcccgccgccgccgccgccgccatgttggctgccgggccgccgccgcctccgccgcgctgagctcgacgctcggcggccgccgctcagctcttgtcgcccctcccgcagggactgcgccgccgccggtgcagccgccgacgctgaccgggaggaggaaggaagacgccgagcgggagagctgaagagccgacagccactcggaccgattgcctgcctgcctgccagactgacgggcgggccggcgggcgggcggagggaggggcgcgcgccgaggagggtgccggggcggggacaagaagtgtgcatgcggattggttcctcgcggctgggggcggggccgcgcgggccggcggaagcggcgggcttcgggaggggcactgcgacggcgttgactgagggggcgccactaggcgcggtcacgtgcattcgcggtgcattcgcgggggcgtcggtgcgggtcgcgtctcttaagacacccagggagacagacgtggggcagaactcatgggctgaagtgagagatggctggggcccaggcgagcgaccgagcagggtccgaacagagccagcgagggaccccgggctgtgcttgaggcccgacgacgcgccatatcccggcagcgccgcagctcaggcctctgcgaatctgtggtccacacgctgataaacttagaggcctctgcactggggcagaaaccgaaaggcatgacccagaccgagaaagatatttgcatactgagaaagtgtgaaacacaattgtcgagactaaaaggagacactgagaggatacgccaatcaggttagttcagatgtttgttgagcacactccatgttcctggggatccacccttatagaagttaccttttagagagaggagacagacaaatacgtgtaatgctcaagttgtgataagtacgatgaagaagtacaaagcagaagggagggcgcggtgtctcacgcctatcatcccagcactttgggaggccgaggcgggcggatcacttgaggtcaggagtttgagaccaggtctctactaaaaatacaaaaattaagtccgggcgaggtggctcacgcctgtaatcctagcactttgggaggccgaggcgggcggatcacgaggtcaggagttcaagaccagcctggccaacatggcgaaaccctgtctctactaaaaatacaaaaattagccgggcgcagtggtgggcgcctgtcatcccagctacttgggaggctgaggcaggaggacaaagcagagagtaagggattagggggtggtgggtcgaaacacatgagagatacatttgcgttcagagacagaccgagattggtacagataggcagaaatgctgacagagcaggtaatgaaatagaaatgcaaagatagagtcactaaaaccaaaacatcgaggtttagag

SEQ ID NO: 2206 - DNA, 6000 bp, Homo sapiens
gcattcactgccccagcttatcccaggcctcccgcttccctctgcgggtggggtgctgagcaggcattattggcctgcatgttttactgatgaggaaactgaggctgggagagtctgtggtaggggtcaagcaggtccacagtggcggggcatggcagtggtggctgggcaggtccttgcagccttccctctccggcaggtgctcagtactgggtgtacgacggtgaaaagccagtcctgggccccgcacccctcaccgagctgggcctggtgaggttcccggtccatgctgccttggtctggggtcccgagaagaacaagatctacttcttccgaggcagggactactggcgtttccaccccagcacccggcgtgtagacagtcccgtgccccgcagggccactgactggagaggggtgccctctgagatcgacgctgccttccaggatgctgatggtgcgttgggggtgaggcagctggtgggaggtgggcacagcagccgcttctcccacctggtggtggctgggctcccacatgcctgccacaggaagtctggctcttcatcacaggtcctttgtccagagccatctgccctcctctcggtggccggctagtgctacattccatattgcagatgaggaaactgagggtcagagaagtgcaaggtcttaccctggtttttcagccacagccagtagaacaataaactgctgtacactgagggccaacaatgctctaagctccttactggtctcatccagttctcagaacagccctctgatgtgacacctgttgtgaacccagtttccagaggagcaaacagaggctcaggcaatgaggcccctaacctggactaccctggtggtccctgctcctaaccactgacccacccagcctcccacaaccacagggggctagagccagtccagtgctccctcccctgctaggctcctcttctgtgctctttctcccacatcaggacccactgggagagctatcctagggtagcctccagctccaggactccagggtgcccgtcaatagcctggctaatttaatagatgcaggagagagtgatgtggagggtggtgggggcaacgggacttgctttcctgagaggtgggactcaggcctctgaggctctgggtacctgtcaggctgggtattagcccagcccagattccggggcaggcagaagggctccctagagggaagagaggttctgaaaggccggccctggatcctgcaggactcgaggaactcagcagtggccaagggcttcccactcagccctcccttagtgcccatccctgggcacagcctgacaggcaggagtagggcccagtgtccgctcgcccaggcttgaccaccttctcttctcaggctatgcctacttcctgcgcggccgcctctactggaagtttgaccctgtgaaggtgaaggctctggaaggcttcccccgtctcgtgggtcctgacttctttggctgtgccgagcctgccaacactttcctctgaccatggcttggatgccctcaggggtgctgacccctgccaggccacgaatatcaggctagagacccatggccatctttgtggctgtgggcaccaggcatgggactgagcccatgtctcctcagggggatggggtggggtacaaccaccatgacaactgccgggagggccacgcaggtcgtggtcacctgccagcgactgtctcagactgggcagggaggctttggcatgacttaagaggaagggcagtcttgggcccgctatgcaggtcctggcaaacctggctgccctgtctccatccctgtccctcagggtagcaccatggcaggactgggggaactggagtgtccttgctgtatccctgttgtgaggttccttccaggggctggcactgaagcaagggtgctggggccccatggccttcagccctggctgagcaactgggctgtagggcagggccacttcctgaggtcaggtcttggtaggtgcctgcatctgtctgccttctggctgacaatcctggaaatctgttctccagaatccaggccaaaaagttcacagtcaaatggggaggggtattcttcatgcaggagaccccaggccctggaggctgcaacatacctcaatcctgtcccaggccggatcctcctgaagcccttttcgcagcactgctatcctccaaagccattgtaaatgtgtgtacagtgtgtataaaccttcttcttctttttttttttttaaactgaggattgtcattaaacacagttgttttctacctgcctgcttggtctccttttgtgaatgttcagccaggatggggaggcctggccactgtccagccctatcctgggagccagggtcgaagtccaccacccccaagcctctggcccttggggctgggcacagtgctcagggctccttctgctccatttctacatcacattttgctacagtggcttcttaactggctccccactttcctacttgtcccctctgttcatcctccagagtggtggtttatctgctcatgccacagcccagcctgccatacatagctgtggtttctgcatccgtaggctcaactaacctcgggtagaaaaaacaatgtttaaaaaaaggatgcggacgggcgcagtggctcgtgcctgtaatcccagttctttgggaggccgaggtgtgtggatcacctgaggtcagaagtttgagaccagtctggccaacatggtgaaaacccatctctactaaatatacaaaaattagttgggtgtggtggctcatgcctgtaatcccagctacttgggaggctgaggcaggagaatcacttgaacgtggaggcagaggttacagtgagctgagatagtgccattgcactccagcctgggtgacaagagcaaaattccgtctaaaaaaataataaagtaaataaataggctgggtgcagtggctcatgcctgtaatcccagcactttgggaggctgaggccagcagatcacgaggtcgggagatcgagaccatcctggctaacaccatgaaaccccgtctctactaaaaatacaaaaaattagccaggcgtggtggcgggcgcctgtagtcccagctactcggaaggctgaggcaggagaatggcgtgaacccaggaggcggtgcttgcagtgagcccagatcatgccactgcactccagcctggacgacagagcaagactctgtctcaataaaataagtaaataaataaataaataaataaataaataagggatggttacctctgtactgaacatgtacggacttttttccctatcattgttccctaaacaatagtataacaactatttatataacatttgcattgtattaggtagtataaggaatctagagatgatttaaggtatacaggaaagtgtgtgtaggttatatgcaagtatgacaccattttatataatggacttgagcatctgtggactttattatctgcagggggtcctggaaccaattcccatggatactgagggatgactgtactttggtttcccaccactgtgaggatacagaacaaagcaacttcagtcactgcccttcccaactctccagtgtctccttgccctaccttccagccccatgtgtgtcttcgtaatagcatagttgcattttttttttttttaagagaggcagggtctccctttgttgcccaggctgcagtgcagtggtgcaatcagctcactataaccttgaactcctgggctcaagggatcttcccctctccacttcccaagtagctggggctacaggtgcacaccgccatgccacacccagcttatttattttagaatttttgtagagacagggtcttgctgtcttgtccagtctggtctcaaactcctggcttcaagtgatcctccctgccttggcctcctaaagagttgggattacaaggccgggcgcagtggctcacacctgtaatcccagcactttgggaggccgaggggggcggatcacgaggtcaggagatcgagaccatcctggctaacatggtgaaaccctgtctctactaaaaatacaaaaaattagctgggcgtggtggcgggtgcctgtagtcccagctacttgggaggctgaggcaggagactccagcctcaaaaaaaaaaaaaagagttgggattacaggcatgagccgctgagcccagccacagctgcaatttcattagattgaacggtgtgaaatcatcagtagtgggccactgttttactccctgcattattcaatcatgattgctttcagactttcattagtttcactagcttcgcgctgtaagagccaagaggcagagccacagggctgggctgcctggtttcactccccactgcagggctcggttaagcagagtgtaggctaagagaggaatggagaaggtggaaggtgtctctcccttccaacgctcatctgatgcaccagccaaaccaaataccacctgggcctttgaacattgccaagcctcatccgctgttgtcattttgcccacctccacagctgcagggacagccgtaggcccggaactgggatatctcttcctaggggcctgcctatctgctcagctgcactgcgttttaggggtggggaagctaaggcacgagattggggtcccaaagcatgcccagaccacccaggcttccagatactaggtcctcctccttcaggcctcacttcgttgcttttcccctgggctcagttccagtcctggctgtaagactgggaaagccactgcttgagtcaggacctcattggctatttttgtccgtgagaagtcctctacaccacgacttgggaggcagcctgggagaaagagaaattagtcgtggctcctttaaggggtccgcggaggcgcgcccggccttttgtttgagcggcggcgcgcgcgtcagcgtcaacgccagcgcctgcgcactgagggcggcctggtcgtcgtctgcggcggcggcggcggctgaggagcccggctgaggcgccagtacccggcccggtccgcatttcgccttccggcttcggtttccctcggcccagcacgccccggccccgccccagccctcctgatccctcgcagcccggctccggccgcccgcctctgccgccgcaatgatgatgatggcgctgagcaagaccttcgggcagaagcccgtgaagttccagctggaggacgacggcgagttctacatgatcggctccgaggtagcccggggcgcgttctcgccctccccgggctcggccccgcgggagccccggggcgggcccatgcgccgagagcgcgcgtctccattcatcggggcgggcgggcgcgcgcgcgcgcgctcggggctgtggggcgtggcctagtgggcgtgtcgggtgtggcccccgccccctcatcgacctgggatttccttacttatttcgccgaggtccgccgccttcagtgctgccaagattttggcgccgcgaggggccccagtggttccgcgctgggttggtttccagtcagacgcaaagaaacgggatattgagttagcccctgcgacgcttgggggactgcactgctgcctttgaccctttttagatgtcgtaaatttcacgtgcacccctccccgtattgctacttgtgggaacctcaaatggcaggctggaaaccctggacttagtgagggctcatccccattgtgtttgttgcctcttaggtgagcagtggaggtcttttgacctttgtttaccggtgaagaaacagattggaggaagatgtttgcttttgggtgaataagggccccatgcctaagctagatctttcagcagttctgaagcgattgacactttccatatctgtgaactgattctgaattattacaggggaaagagcctaaggatgtttaacccttaactagagtggctgcattttgttgcatcaactggatgactgacttcaggaaaactctactggcctttgaatgggtgtttgttccaag

SEQ ID NO: 2207 - DNA, 6000 bp, Homo sapiens
cactggagaggcctgttctgctgaccccaggtgtccggagaagtagcttcccctccagtccttctaggaacactgcctgcaagaagggcttgagcttctgtggtcccggtgagtttccaagctccaaaggatacgggggttagaggaagaaggctaaggatattgctgtgtgtgtgtgtgtgtgtgtgtgtgtgtgtgtgtttgtactagtttctcatgtttgtgtgggtgagggagacactgagaataatatgaatcataattttgataatatttggtaataatcacagtggtaataaaggttgctaacacttgttggcacttaccatgtcccctgcactgtgctaagtgttttacctgaacgatcacattcaggtagagcaggccgtggttaagagacaggcgtcagtgtcagggagattagaatctcagctctgccattgtttgactttgggaaagtcccttgactttctcgatctcctcatctgtagaatgggttctgagtccccacttcatggcgttgccgtgaggatgaccatgggtataatgcacaaagcaccagcctgacacggaaggagccttccatgtcctgaagccagtgggcagactcatccactatggggaggggtgtgtgtgtgtgtgtgtgtgtgtgtgtgctgacatccccacactatggaggggtgtgtgtgtgagtacatggatgctgacatccacacactatggaggggtgtgtgtgtgtgtgtgtgctgacatagccacacgctatggaggtgtatatgtgtgtgtgtgtgtgtgtgctgacatagccacacactatggaggtgtatgtgtgtgtgtgtgtgtgtgtgctgacatccacacactatggaggtgtacgtgtgtgtgagtgtgttgacagctacacactatggagatgtatgtgtgagtgtgtgtataagtacatggatgctgacatccacatactatggcggggtgtgtatgtgctaacatagccacacgctatggaggtgtatatgtgtgtgtgtgctgacatccacacactatggaggggtgtgtgtgtgtgtgtgagtacgtgtatgctgatattgctctgtgtgtgcatgtgagtgcatgtgtttgctgacacagccacacactatggaggtaagtgtgtacatgtgtctgtgctggtggtgttgggggccaacggggcaggcacgaaggctgtgtgtctcctgggtgacgggtattgggtgtgggttgctttgtgtttctatagagtgagagttcactggtgggctgcaggctgaggctcctgggctagctgaggtgtgccaggctctccatatcagcggtgagtgttctgggggccatcccaggcagttccccacttgtcaccagcttaaaacatccctctccagctctggggccccatccagctgtgtctcctccttcccttgcccagagggcctcctctggccgttgccagcacactcagtgcccccggagggggacctggggagggaggaggatggagaaagccctggcgggtggagggccctgaggctcctactgctcccggctctgcgcctgcggggactttgaattcatctgagcgctagggggcaatgtgtctgttccaaagaaacactgcgggaccttgcgggcgaaagcacacacaggcacacgcaggggtgcccacactgtggaggcgcacacgccggcgcatacacgggcacagatgggcacaggctgtgaggcacacgccctcacactcgcagaaaaaacagatacactggagcagagatacaggcatgcaaggggtgaggcagctgcacacacacaggtacaaacgcagtggctcacacacacagaaatgcggggttgggggacagacagagaacatgcaccaagacccccaaagatccatgcacgaacgccgacgcaggcatggacagaaacacacgcagatgccccgccacccgcatacaagcaaaggcacaaaatgcagacgtgtgccacacacccgcacaacatttgcagtgttaaagaaaggtgaccgagacacacatcctgaacagaaacttcaccaggtccaaacactcccttctttcagccactcacacaccttgtggagctaactcttggaaacagccccagaaaaatactcccacaccccccctccctggagcacacggaattattccacaggaaacctgcccaggtgtgctggagacccccacccagccctgtgtgaagtcatgcctcagctctgcagacgcccccatccgggtctccccagacgacaggcctgtgagccattcttcccactctcctggcccacccccaggctccagacaggtccccacttttccctatttcctccagacacagaaacacaggcggctcataggtgcctcaggagacacccatagtcgagagcagactgagtgtgtgacccagtatcttggactatgcccaggcctttgcccatgtgggggcctcttcctcacaaccaggttttcctattgcctcccgctttttgtccaggaggttcaagatcccccctgctctgtctcgggagccccagagccccagggtcctaggccccggggcgggcggggggggggtgtcactggagggcctacccaagcctttatttctttgtgcctaaatcagcaaagcctcagtcttttctctggctctcacttccctgtcactttgctaagtaataatttccatgtccaattccatttcttttctagttctgaaacctctaagctatcagcaagaggatagttcacatgaaaactaattacacaaaatcaatatttaatcacagaccaacaacctgatcctgcagaaaaatcctttaaaaactccaccgccctgtacaaatacttattccctatgcttatttatggaccccatttttgatgggggtaattttcatttttaatttcaaaaaagaaaaaatatatatgtctgtaaacttccacaacaggaaggccccgggaaaggtcttggatctgagcttgctctggctgagttttaaagttgttgttttttcttgtttgtttatttttaattaaaattttttttgggcggggggcaatttcttaggaattctgccgctaccccaaagttgagcccatttccccccacccccggcatgtcggttctggcatacttagcactgccttcctagccgcaactcaggggagcaatgaatctgcgcgtacgacatggtaactttttaactcctgcccgcgacggtggagtgcttaatctaaggtttttaaataaaaagggctcaggggttggttttattataacgtttatttcatttcagatttcatgcgtaatttagcaaacgctagacagactcgggcgataaacactttcttttgtggggggggaaaggcattttcatacaccacgcttaattttatttagatttaatagcgatatcaggggcacttcaaagaaagttcttttttcgcccttctcctaagaatgcgaatctgctagcaaaatcgcctcgtgctattttatggcaaggaaaattaaaggccttctcccccctccttccctacacacactttagggaggaacacacacacacacacacacgcatgcacaaacacacgcacgcaggcgcgagcacacgcacacaggcgcacagaataaacacctctatcctccatcacctctaacttccaacttctaattgcaagatagatttcagcctctgtggggatcaggacgatctaaacattttaactaagattattgggataaatatttcataaagagcagggcagatattaaattactcctattgattttagtatcacagcccaattccattcctcggcctcttcagtttaattgatctcttaaggaggccaacttcgcacccgcagagggtctgggtcttggaccgggtggcccagggcaaggtgtgcggcccggcgggtgcgccctcttcgtgcgtgtcttctcggggttcccagccgcctcgcaagtcgctccggttactgggctcaaccgatgtgctcccccataaagtggctgagtgactgtgactccttggagcccacgccggccggtgagaaccgggaaccccaggcagtggggaaggggaacaattgtgaacgccctagtgacggaggagtgagcaagcgcccaggtctctcgaggagaaccctaacttcgaggttccccgtctgctttaccctccaagaaaatcccagggccggctaacttgggcgccgctagcggagaacggagtgttcaccccggagccgaagtgcagtagacacttagcgactttccgtggcgagtctagggtctttgcctggcgacctcattgtctgagcgccccgtaccgctcaccgcccacctccccgccccctgcccacccggtgggtctcgctccagttgggggtggggagttgggaacagtgtgaatgggaagggggtgaacaaagccaagctcccgccattctcctccgcctgcaccctctccagctcgatgcgcccggaggccggggcgcgcccccagcgcactgacgccggaccccgaggagaggcgggcgcaggggaccccagagctggggtagtgcgggttcgtggcgggggcttcggcagccaggaccccggaccaccttaagagcgagccccgccccgagcccggaacttgggcggcgctgattggtgcaaatgtaatggctgaaattgattgctgaaatgcaaaacttgttgctgcttctcccggcgctgggcgagaggcagacacagagaggggagccgagaccctcggaacgccccacgcagagcccccccgctagtcgggagaggggtgcgcagaccccccagagctgcccccgcgcccccctccccccattccgggctctgagagcgcagcgggaacgccttagcctgctcgcccggcgtggccccccgacccgcgtacgcccccctccctcaggtccgagagggactcgcgaagcacctcagcgcggaggcagggaaccggagccttggagcgacccaacccctcgtctcgctgccctcccgcgcctgcaacggtgcgcggagactccggcgaactcagacacccaacggcggagaacagaagcggcaggcggcggacgtggccgcgaagctgcgcgccgaacgcagcgcacccgctgccgagcagaggagccgcgcctttccccgaccctcggctccagcccccggcgcctgccgcctcgcagcccctctgcgtcctcggctcgggggccggcaccggcgatgccgagcggagcctccagtcctccgacccgctgaagaagcagcagccgctcgcccggagcctacggggattgtgcgagcggatcgtgctcggtggaggctcgggctgcggggcgcggggactccggggggcggggggagggaccgctctgtcggtgcccggcgccagccgcggctttgaagggtctccctcccctgcccttagcagctctgccacggactccgggaggctgcgggcggcgtcctgagggctccccagcagacccaatcggacttgagaaggtgatcgctctgctctcccaacccccttccctccccattccccccacttaactttttgtctccgttcatccgcggcttcgtcccctccccgcagacccacccgcggctgtgacaaccgcccggggcatgggccccccaacacggctcctagaggccccgcggcctcgcaagatgtgagaggccctccccgggcagaatcggagcttcaggagaggagctaataccccgccccccgtccctcacatcaggcggggtggaggtgcgcgctgagcccccgcggtgctgagcgtcccggagcgcccaatcctgggctggaacgagtagctggccggaggcgcgccgcggagagccggctgtcatgccctattgatccccctctgccccccgccaagtatgtttgggctggaccaattcgagccccaggtcaacagcaggaac

SEQ ID NO: 2208 - DNA, 6000 bp, Homo sapiens
tggtcataagaggggctgccatttaaagaatgtctgtcctgtgccgtgctctgttccactctgaaagcattgtctccagtccctatgctgtatatcaactggccttcatgtctctttccaacaggggaaactgaggttcagagaaaaaagtattttgcttaaggtcacgcagctcataagtggtgaagacaagacttgaatctgaatctgtaatgcccaaatccttgacctttccaccactggcccactggagaggcctgttctgctgaccccaggtgtccggagaagtagcttcccctccagtccttctaggaacactgcctgcaagaagggcttgagcttctgtggtcccggtgagtttccaagctccaaaggatacgggggttagaggaagaaggctaaggatattgctgtgtgtgtgtgtgtgtgtgtgtgtgtgtgtgtgtttgtactagtttctcatgtttgtgtgggtgagggagacactgagaataatatgaatcataattttgataatatttggtaataatcacagtggtaataaaggttgctaacacttgttggcacttaccatgtcccctgcactgtgctaagtgttttacctgaacgatcacattcaggtagagcaggccgtggttaagagacaggcgtcagtgtcagggagattagaatctcagctctgccattgtttgactttgggaaagtcccttgactttctcgatctcctcatctgtagaatgggttctgagtccccacttcatggcgttgccgtgaggatgaccatgggtataatgcacaaagcaccagcctgacacggaaggagccttccatgtcctgaagccagtgggcagactcatccactatggggaggggtgtgtgtgtgtgtgtgtgtgtgtgtgtgctgacatccccacactatggaggggtgtgtgtgtgagtacatggatgctgacatccacacactatggaggggtgtgtgtgtgtgtgtgtgctgacatagccacacgctatggaggtgtatatgtgtgtgtgtgtgtgtgtgctgacatagccacacactatggaggtgtatgtgtgtgtgtgtgtgtgtgtgctgacatccacacactatggaggtgtacgtgtgtgtgagtgtgttgacagctacacactatggagatgtatgtgtgagtgtgtgtataagtacatggatgctgacatccacatactatggcggggtgtgtatgtgctaacatagccacacgctatggaggtgtatatgtgtgtgtgtgctgacatccacacactatggaggggtgtgtgtgtgtgtgtgagtacgtgtatgctgatattgctctgtgtgtgcatgtgagtgcatgtgtttgctgacacagccacacactatggaggtaagtgtgtacatgtgtctgtgctggtggtgttgggggccaacggggcaggcacgaaggctgtgtgtctcctgggtgacgggtattgggtgtgggttgctttgtgtttctatagagtgagagttcactggtgggctgcaggctgaggctcctgggctagctgaggtgtgccaggctctccatatcagcggtgagtgttctgggggccatcccaggcagttccccacttgtcaccagcttaaaacatccctctccagctctggggccccatccagctgtgtctcctccttcccttgcccagagggcctcctctggccgttgccagcacactcagtgcccccggagggggacctggggagggaggaggatggagaaagccctggcgggtggagggccctgaggctcctactgctcccggctctgcgcctgcggggactttgaattcatctgagcgctagggggcaatgtgtctgttccaaagaaacactgcgggaccttgcgggcgaaagcacacacaggcacacgcaggggtgcccacactgtggaggcgcacacgccggcgcatacacgggcacagatgggcacaggctgtgaggcacacgccctcacactcgcagaaaaaacagatacactggagcagagatacaggcatgcaaggggtgaggcagctgcacacacacaggtacaaacgcagtggctcacacacacagaaatgcggggttgggggacagacagagaacatgcaccaagacccccaaagatccatgcacgaacgccgacgcaggcatggacagaaacacacgcagatgccccgccacccgcatacaagcaaaggcacaaaatgcagacgtgtgccacacacccgcacaacatttgcagtgttaaagaaaggtgaccgagacacacatcctgaacagaaacttcaccaggtccaaacactcccttctttcagccactcacacaccttgtggagctaactcttggaaacagccccagaaaaatactcccacaccccccctccctggagcacacggaattattccacaggaaacctgcccaggtgtgctggagacccccacccagccctgtgtgaagtcatgcctcagctctgcagacgcccccatccgggtctccccagacgacaggcctgtgagccattcttcccactctcctggcccacccccaggctccagacaggtccccacttttccctatttcctccagacacagaaacacaggcggctcataggtgcctcaggagacacccatagtcgagagcagactgagtgtgtgacccagtatcttggactatgcccaggcctttgcccatgtgggggcctcttcctcacaaccaggttttcctattgcctcccgctttttgtccaggaggttcaagatcccccctgctctgtctcgggagccccagagccccagggtcctaggccccggggcgggcggggggggggtgtcactggagggcctacccaagcctttatttctttgtgcctaaatcagcaaagcctcagtcttttctctggctctcacttccctgtcactttgctaagtaataatttccatgtccaattccatttcttttctagttctgaaacctctaagctatcagcaagaggatagttcacatgaaaactaattacacaaaatcaatatttaatcacagaccaacaacctgatcctgcagaaaaatcctttaaaaactccaccgccctgtacaaatacttattccctatgcttatttatggaccccatttttgatgggggtaattttcatttttaatttcaaaaaagaaaaaatatatatgtctgtaaacttccacaacaggaaggccccgggaaaggtcttggatctgagcttgctctggctgagttttaaagttgttgttttttcttgtttgtttatttttaattaaaattttttttgggcggggggcaatttcttaggaattctgccgctaccccaaagttgagcccatttccccccacccccggcatgtcggttctggcatacttagcactgccttcctagccgcaactcaggggagcaatgaatctgcgcgtacgacatggtaactttttaactcctgcccgcgacggtggagtgcttaatctaaggtttttaaataaaaagggctcaggggttggttttattataacgtttatttcatttcagatttcatgcgtaatttagcaaacgctagacagactcgggcgataaacactttcttttgtggggggggaaaggcattttcatacaccacgcttaattttatttagatttaatagcgatatcaggggcacttcaaagaaagttcttttttcgcccttctcctaagaatgcgaatctgctagcaaaatcgcctcgtgctattttatggcaaggaaaattaaaggccttctcccccctccttccctacacacactttagggaggaacacacacacacacacacacgcatgcacaaacacacgcacgcaggcgcgagcacacgcacacaggcgcacagaataaacacctctatcctccatcacctctaacttccaacttctaattgcaagatagatttcagcctctgtggggatcaggacgatctaaacattttaactaagattattgggataaatatttcataaagagcagggcagatattaaattactcctattgattttagtatcacagcccaattccattcctcggcctcttcagtttaattgatctcttaaggaggccaacttcgcacccgcagagggtctgggtcttggaccgggtggcccagggcaaggtgtgcggcccggcgggtgcgccctcttcgtgcgtgtcttctcggggttcccagccgcctcgcaagtcgctccggttactgggctcaaccgatgtgctcccccataaagtggctgagtgactgtgactccttggagcccacgccggccggtgagaaccgggaaccccaggcagtggggaaggggaacaattgtgaacgccctagtgacggaggagtgagcaagcgcccaggtctctcgaggagaaccctaacttcgaggttccccgtctgctttaccctccaagaaaatcccagggccggctaacttgggcgccgctagcggagaacggagtgttcaccccggagccgaagtgcagtagacacttagcgactttccgtggcgagtctagggtctttgcctggcgacctcattgtctgagcgccccgtaccgctcaccgcccacctccccgccccctgcccacccggtgggtctcgctccagttgggggtggggagttgggaacagtgtgaatgggaagggggtgaacaaagccaagctcccgccattctcctccgcctgcaccctctccagctcgatgcgcccggaggccggggcgcgcccccagcgcactgacgccggaccccgaggagaggcgggcgcaggggaccccagagctggggtagtgcgggttcgtggcgggggcttcggcagccaggaccccggaccaccttaagagcgagccccgccccgagcccggaacttgggcggcgctgattggtgcaaatgtaatggctgaaattgattgctgaaatgcaaaacttgttgctgcttctcccggcgctgggcgagaggcagacacagagaggggagccgagaccctcggaacgccccacgcagagcccccccgctagtcgggagaggggtgcgcagaccccccagagctgcccccgcgcccccctccccccattccgggctctgagagcgcagcgggaacgccttagcctgctcgcccggcgtggccccccgacccgcgtacgcccccctccctcaggtccgagagggactcgcgaagcacctcagcgcggaggcagggaaccggagccttggagcgacccaacccctcgtctcgctgccctcccgcgcctgcaacggtgcgcggagactccggcgaactcagacacccaacggcggagaacagaagcggcaggcggcggacgtggccgcgaagctgcgcgccgaacgcagcgcacccgctgccgagcagaggagccgcgcctttccccgaccctcggctccagcccccggcgcctgccgcctcgcagcccctctgcgtcctcggctcgggggccggcaccggcgatgccgagcggagcctccagtcctccgacccgctgaagaagcagcagccgctcgcccggagcctacggggattgtgcgagcggatcgtgctcggtggaggctcgggctgcggggcgcggggactccggggggcggggggagggaccgctctgtcggtgcccggcgccagccgcggctttgaagggtctccctcccctgcccttagcagctctgccacggactccgggaggctgcgggcggcgtcctgagggctccccagcagacccaatcggacttgagaaggtgatcgctctgctctcccaacccccttccctccccattccccccacttaactttttgtctccgttcatccgcggcttcgtcccctccccgcagacccacccgcggctgtgacaaccgcccggggcatgggccccccaacacggctcctagaggccccgcggcctcgcaagatgtgagaggccctccccgggc

SEQ ID NO: 2209 - DNA, 6000 bp, Homo sapiens
gcctgaattgagctaagggtggtcgccctccaggccccgcacgctcaccctcccaccaacccactgtatacaggcacctgcttctgaaaaggatgggtgctctgacatgacccgcatgctgccagcactaagggaagacaagcagcctgctctggaagctgctactgcacaagcatctgtcagactctggcattgcataggctccccaggagtagccttatgtccctgcccgagaggggtttgtcactggcactaaatagccctggtagagatgtttacagcaggcaggtctatttttctcagcccaaagaaacttctggatgctctgggcacagattccctcaggcagcatggatgccaagcctgtctcaaagggcggcaggaagctggctggtgccagggcatgaaggaggtgggcagggcagagagcagagcaggtggagaaaaagcctagtctctacccacaccctggtcaaactccccaaaagcacctagactaaaagttgccaacacaaacttgaggtcccacgaggccacatggcacaggcctgggcaaaggtggcggggtccatggggagactgatctatgcccacagggagtggctcccctgctcgacggggaagagcacagggctgcagcaacagcagtaccagcagctgtggggctgaggactgtgcagtctgtgacagggacaacagctggccctcgtgctgtcccctcctaccccactcctgacagatctgctgggcgcagggccggcagtgaggacagtgtgatgcaggcaggttggaaagagcccacttgggttttccagttttgcgtctctcttgtgaagggcactggaggcagctcagggtcacctgtcccacagccagagcaggagctgaccagcaggtgtccttggagctgagcccacacctggacacagcagccggaagcctcctgcgagtccctcacttagcctgggctgtgctcagagcctcagtccagactggagaatttggagttctaatccaaccagtgccagagcttcctggagctgcccggtagcagggatgtaggccacaatgagagttttgccacagccatcatctgacctctagctgcaaccaaggccaagcaggctgctggctggcacccagcagtgggcgcaagaaactggctatgtgccctctggccaaaggccagaaggagcccacatgggagccacagcattctgtgcatagaggtgggtggcctcaagggtccgtgcagatgggctcagggtctctatagcccaaacctcctgtccctccagcagtttctgtggtttctcttggtcctgcaaggaacaagggagaccatgtagaggctgaggctttcccagaggtggccccacaggccctgggccaccacacgacagagggggtcaaagctacggtctaccatgccctgggccaggggtctgaccccccagtgaggtctgcatcatagcagctacatgtcctagaatcaggtgggaggctgtggtctagaacaggcctcttatcacaagccacagctcatgggagagaaggaggaaggaatctcgtgtgtgtgtgtgtgtgtgtgtgtgtgtgtgtgtgtgtgtgtgtgtgacggagtctcgctctgtcgcccagactggagtgcagtggcgcaatctctgatctctgctcactgcaagctccgcctctcgggctcacgccattctcctgcctcagcctccagagtagctgggactacaggcacccgccaccacacccagagaattttttgtatttttagtggagacggggtttcaccgtgttaaccaggatggtctcgatctcccgacctcatgatccacccgcctcggcctcccaaagtgccgggattacaggcgtgagctactgcgcccagcagaaggaatttctttataatccctcctccccagagaagtggatatgctgagccaggccacactgagctgggtagtggcattatttttcacaaccccatgatgtaactactactactgtcccattctgcagatggtgccactgaggctcagggagcttcaccatcccacccaatgaccaatgacagagcctgggttccgtccaacttcacccatgtccaaaaccccaaaatgcagcaaggtaggtataagcaggagtcaaattcctgcacagctgctggctacacatatcccatgccttctctgggcctcagtttccccaaattgtaaaatgagaacacctaagagtatcatagctcatcggggtattttgaagatgaaactgttaaatgtccacaccctgattcacccccaccccaaacctgcaaccctcctccacctccagcagcccttccctccccaggtgttagcacctccgccctcccagtgctcagccctgggagttgtcctggattccgtcctcacactcaaccaatccaccagcacatcagctctcccctcacaatatggccagaatccagcgccctctcaccacctggtttcctctgaggctccagctcctgccctggcccaccacagcagccccagggaatgtttttttttttttgagacggagtctcgctctgtcgcccaggctggagtgcagtggcacgatctgggctcactgcaagctccgcctcccaggttcacaccattctccttctcctgcctcagcctgccaagtagctgggactacaggtgcccgccaccacgcctggctaatttttttgtatttttttagtagagacagggtttcaccatgttagccaggatggtctcgatttcccgatctcgtgatccgcacgcctcggcctctcaaagtgctgggattacaggcgtgagccgccgcgcccggccgggaatgttaagacctaagccaaccacccctgctctaaatcactgcatggctcccatgtccctcaaaagagacacggcccccaaggccctgcttaaccggccctggggtctctctaatctctctacctcctccctcacccacctccctgcactccagcctcagccacctccccagtcttcttgagcacgccggacacatgcccaccatggggcctttgcactggccgttccctctccctctccagatatccccgaccttcctccctcacttcctttcctgatgagggattttaaattgcagccccctcacacccacaccctcacccggctccatccctgtcttctctgcacctcatccctgtctctgccctggggctgcctccctgccagacttggacaacaggccctgagagctggctctgcttggttccctgctgttttgctgttgatttccagtgcccaaagagacccagcacacagtaggtgccacgcaggtgtcagccttgaggattgctagttactgccttcctcactggaggaagtgccatggggggcgctgaggtgagaaaacgcctttgaaaaggtcacacaggccaggcaagtggctcacacctgtaatcccagccctttgggaggtggaggcgggcagatcaccttaggtcaggagttcgagaccaacctggccaacatggtgaacttgtctctactaaaaatacaaaaagccgggcgtggtggcaggtatcagtaatcccagctactcgggaggctgaggcaggagaatcgcttgaaccccggaggtagaggttgcaatgagcccagatccagccactgtactccagcctgagcgacagagcgagacaaaaaaaaaaaaaaaaaaaaaaaggaagaaaataaaaaagaaaaggtcacaaggactctctgggatgcctgtgaatgcctggcaccaagaggcctggctcacaggtgctcaaccaatgctgctgatccgtggatgagggcgtccccataatcgtcatgttcaaatcctggctccaccagctgctctcctgactgtgccccagttgggcatgagtgtccttcacagaggtgacacaccagttcattcaggtcaagggcgcagagcagtcctggcagcacacagtaggagatttattggagctctgagcctggctgtggttggcggcttccctgcaggcctgccccacccgtgtagcatggctgccgcccagacccgcccgacgtcccgcccagcccagccggcagcagcagggggcaggatttcccgctgatcccggcggtccgtcctctgcagtttaaaaagagcccagcggggcttaaccctcccgcgtccggccggcctccgatgccccccgtcccctgttctgtgcggaactccggctttggccatctgcctacttctctgagcttcagtatcctcatctgtaaaaccggttcccctcatttcagggtcaaaaatgagcattcagtgagcacaaggagccctcagtcgccaggggcatcctccccctccccgcggcggtgccgtttatctggccaggggaggtccacccgggaggaggtgactttgcagcctccagccgctatcgcttcctgccttcatcttgggaacaggccgtgctgtgcgccagcccggggagcccaccgtctggggaggggggcgattaaaaggtcccaacctcctccccaggagaccaaagaggttggacggggccccgggtactaggctgggtgggggttgggcgcctgggccggtcgcagttgtctgggggccctggggctctctgcgtcgagagcgctcgaagacccgggattcctggcccgatcgcgggcggggggagaccccagctccaccccagctcccgccggctcggggaaggggcggcccctttaagagcgcgcggccccgcccgccccctccgggcaggatccgaattccagggaggcggggcggagacggcggcgaggaggaggccgcggcgcgggacgcatagagctgcggctcgggcggcgcctccctgcggcggcccggcccggctccggcccccgctggggcaatgctccccggggccgcgggatgagccaggtgagcgcggagacccccagcactccctgcctggtgcgcatggacgggggtggggaggcggggcgggaagcggcgtcctcggcctctgttccccggggctgtgtgaccttgggcggccccgcaccctctctgggcccagagccccagcaccggcagggcctgcggaggccgctctgagtcctggccccgcaggcaccggcctggagcgctggggaggcttcttggaggaggcggggcctggccctggccccggatcgccgagaccggccacgctgcgccgcctggacgccgggctcctccacccacagctctgcgaccttcacgagctcgaccctttctgcgcctcagtttcctcatctataaaatggagataatgcctccgcgcgctgagcccgagcgcggtcgtgctgttacactattgctgctgctatgtcgttaatgacggcacagcccttatggaaggggggccaaggaaggcacggggaccttcccgcaggacatggggtgggcaccagccctaagccatgcacataacccactctgaggtcaggacctgggttcctttcgtgtccactgggggccttagccgttgtcttcacttctctaggtcccagcccttcacaatgggcgcgcctccctgcctgagagggaggccccagccaagccccagtttccaccgcaaaaagccacacagcaaacacttaatggaccctaaatttataaaaattatcccatagagtcctatgaggcagggaatgttactgtacccatttcgcagatgaggaaacttggggcaccgacatttcccagagccaacatgtaaaccaggcatttggcctgagtgacagactggtgcaggtggccagcagcttaatttgtactgagcgcttactgggtccccacagcgatcctgaactgtgttcctgcccacagtgactcggccggtccgggcatggcagacccagtggcgggcatcgcgggctcggcggccaagagcgtgcggccatttcgctccagtgaggcctacgtggaggccatgaa

SEQ ID NO: 2210 - DNA, 6000 bp, Homo sapiens
ccccaggagaccaaagaggttggacggggccccgggtactaggctgggtgggggttgggcgcctgggccggtcgcagttgtctgggggccctggggctctctgcgtcgagagcgctcgaagacccgggattcctggcccgatcgcgggcggggggagaccccagctccaccccagctcccgccggctcggggaaggggcggcccctttaagagcgcgcggccccgcccgccccctccgggcaggatccgaattccagggaggcggggcggagacggcggcgaggaggaggccgcggcgcgggacgcatagagctgcggctcgggcggcgcctccctgcggcggcccggcccggctccggcccccgctggggcaatgctccccggggccgcgggatgagccaggtgagcgcggagacccccagcactccctgcctggtgcgcatggacgggggtggggaggcggggcgggaagcggcgtcctcggcctctgttccccggggctgtgtgaccttgggcggccccgcaccctctctgggcccagagccccagcaccggcagggcctgcggaggccgctctgagtcctggccccgcaggcaccggcctggagcgctggggaggcttcttggaggaggcggggcctggccctggccccggatcgccgagaccggccacgctgcgccgcctggacgccgggctcctccacccacagctctgcgaccttcacgagctcgaccctttctgcgcctcagtttcctcatctataaaatggagataatgcctccgcgcgctgagcccgagcgcggtcgtgctgttacactattgctgctgctatgtcgttaatgacggcacagcccttatggaaggggggccaaggaaggcacggggaccttcccgcaggacatggggtgggcaccagccctaagccatgcacataacccactctgaggtcaggacctgggttcctttcgtgtccactgggggccttagccgttgtcttcacttctctaggtcccagcccttcacaatgggcgcgcctccctgcctgagagggaggccccagccaagccccagtttccaccgcaaaaagccacacagcaaacacttaatggaccctaaatttataaaaattatcccatagagtcctatgaggcagggaatgttactgtacccatttcgcagatgaggaaacttggggcaccgacatttcccagagccaacatgtaaaccaggcatttggcctgagtgacagactggtgcaggtggccagcagcttaatttgtactgagcgcttactgggtccccacagcgatcctgaactgtgttcctgcccacagtgactcggccggtccgggcatggcagacccagtggcgggcatcgcgggctcggcggccaagagcgtgcggccatttcgctccagtgaggcctacgtggaggccatgaaggaggacctggccgagtggctcaatgccttgtacggcctgggtctcccgggtggtggcgatggcttcctgacagggctggccacgggcacgaccctgtgccaacatgccaacgccgtgaccgaggctgcccgtgcattggcagccgcccgcccggcccgaggtgtggccttccaggcgcacagtgtagtgcctggctccttcatggcgcgcgacaacgtggccaccttcatcggctggtgccgcgtggagctgggtgtgccggaggtgctcatgtttgagactgaggacctggtgctgcgcaagaacgagaagagcgtggtgctgtgcctgctggaggtggcgcggcgtggggcacgcctgggcctgctggccccacgcctcgtgcagtttgagcaggagattgagcgggagctgcgtgctgcacccccagcccccaacgcccctgccgctggggaggacaccactgaaaccgcccccgcaccagggactcctgcccgcggcccccgcatgacacccagcgacctgcgcaacctcgacgagctggtgagtcccccagcaccaggtgccagggacccgacagcacagccagtgcctgcaatctgtccctgaacctcccagggtccaccctgctatctgcagaacagtctgccccacaaaaagagtgcacatgttgagcaccaaaccgaggaatgtatacctgaccccaaggaaatgggtagcccacagagagggaggtgccggggagatgacgcagcccagccgggcctgggacaggatgcgggctcctggcacgatcttccctcactttgtgtgctaactgtgcctcaactgagcttgtgcattccttcttctggggggccgcatgatcggggcgcctcctctgtgccctccctgcagtcagtcttaggcagatgtacccacaacctcatggaggctcgaggttgagcgggtgctgtgatgctcggttgagacgaggcatggaaaaacctgggcaaggtgcctggcacacagtaggtgccccagggggctctgcaggtctccccactccccaggcacccctgggaagcctagctgggttgctgctgttgctgggagcagggatcctgtttggaattacaggattcgttctactctaagcataggcgttgctgggccctgcccccaagtctctcctctcccaggatctgggtggcccctgccacccctgagggctggaccaagagtttccttcttatcagaaggtcaggactacaatgtgcctgcctgggaggcagatagcggatggcagtgggcagagcctggggccccaccccctgtcctggaccagggtcactcaaggccccacctgcttatttcctctggcggcaccactgccgctgtgggcggggaggcgggcagggctgcccacatagccagcttggcagcgctctggctctggtggggggctgtatgtggtgcgtgctcacccggccagtggtctgtgtgtgcatgtgtccgatgtgtctgtggtacgcctccacatcagtgcccacccaggggcatggggccccctgcacctgtgtcctgtagcctgcctggccttcctgtgggccccagccttcttgtctgagaagtgggtgaagcgggagtgaggacgggctctgggccttccccaggtctaggggctgtgggatgttcgtcaccgggtctcagaccatggcctgaccacagtcccatcatctcatcctgggcagctccctggacccagagagccaagaaaggggagccggtgaaaggtcatgtgtgggccgggcgtggtggctcgcacctgtaatccagcaatttgggaggccgaggcgggtggaactcctgagcctgaccaacatggagaaaccccatctctactaaaaatacaaaattagccgggagtggtggtgcatgcctgtaatcccagccactcaggaggctgaggcaggagaattgcttgaacctggaaggcggaggttgcggtgagacgagatcgtgctattgcactccagcctgggcaacaagagcaaaactccaactcaaaaaaaaaaaaaaataaaaaaaaataaaaaaaataaaagaaaggtcacgtgtggaagctgtaccccatccggggcaacactgcctccatccacttacccggaaagcctgacttcctcctgaccctggaatggctgacattaagccccaggaggaggacttgacctctgacccctaccctctctctctggcctcaggtgagggagattctgggccgctgcacctgccctgaccagtttcccatgatcaaggtctcagaggggaagtaccgtgtgggggactcgagcctgctcatctttgtgcgggtaagggcctggggccgccccagcgggcagcagccaaggtggtgggctgcggggcgcccggggcacagccgtgacctgcccacacctgcaggtgctgaggagccacgtgatggtgcgagtgggtggtggctgggacacgctggagcattacctggacaagcacgacccgtgccgctgctcctccactggtcagtgccagggtggggctggggctggacgggcaggggacttgcttctgtggctctgtccctcacatgctgcctgtcctctctccccgcagctcatcgcccaccccagccgagggtctgcaccttttctccacagagggtgtcgcccaccaccagtccccgccctgctagcccagtccctgggagtgagcgccggggctcccggcctgagatgactcccgttagcttacgaagcacaaaggaggggcccgagaccccacccaggtgagatgcaggaggacgaggagtgaggggtccagagggtgggggggcgtcagccctggcctgcatgatgggttgcctgtgcgccagagtgactcacaccctgggaaaagttcccgtgggtgggggcgggcctggcttcccatctccatggcaacccaaccaaaccaacaacacagctggggcgggccctgtggctgggcggcagccagtccagctcttgcttcctctggcccgtcctgggaaggggggtgtctagagcccaggaaacttcttcttccgtggcttttggggccctgggccgctggaggaagctgctcacttctccctggaagtccccaggacagaccgatgcccctgacagccccgtccaccagccacataccctgctgttcctctccctgcctgttctgcatgccagtccttccgtggtaccccatctgtctctattgtccccctgccccaggccccgggatcagctgcccccccatccccgctcccgccgctactccggggacagtgactcctcagcctcctccgcccagagcggcccccttggtacccgcagtgatgacacaggcactggcccccggagggagcgacccagccggcggctgaccacaggcaccccggcctctccgagacggcctcctgcctgcgcagccagtcccgagaccggctggatcgcggccggccccggggggccccaggaggcaggggagcccagctgtcggtccccagccctgcccggcgggcccggagccagagccgcgaggagcaggctgtgctgcttgtgcgcagggatcgagacgggcagcactcatgggtgccaaggggcaggggcagtgggggctcgggcaggagcaccccccagactccccgtgcccgcagccctgcagcaccccggctttcccgggtctccagccccagtccagagttgggcaccacaccggccagcatcttccgcacacccctgcagctcgacccgcagcaggagcagcagctgttccggcgcctggaagaggagttcctggccaatgcccgggcccttgaggctgttgctagcgtgacccccactggaccagcccctgacccagctcgggcccccgaccctccagctcctgactctgcctattgttcctccagttcctcctcttcgtccctcagcgtcctgggtggcaaatgtggccaacctggggactctggccggacggccaatgggctgcctgggccccgaagccaagccctttccagctcctccgatgaaggcagcccctgccctggcatgggggggccactagatgcacctgggagccccctggcttgcactgaaccctcgaggacctgggcacggggtcggatggacacacagccagaccgtaaaccctcacgtatccccacgcctcggggcccccgccgcccctccggacccgcagagctggggacatggcatgccctgcactcagtcaccccgagggctgagccagattcctggatgtgatggaccagctcagctgtccccagaccccatcccttctccttttcctttgtggccttaacccttctgcatcagggagccccctctgcctcttgagtaccagacctcatgggaccagaccccttgggaccacatggcacaatgggacctctgttgtacattccggttgggggatgagcgttgctatttaattactaatattattgaatgccttagaggaggccgggcgagcccggtgttctgaagacctgtggccca

SEQ ID NO: 2211 - DNA, 6000 bp, Homo sapiens
ttacccttagaggccaggaacatcccccagttgtgacaaccaaaaaagtctccagacattgccaaatgtcccctgtagggcagggaccactatctgagaaacactgatctggaagagcaaagtgtaaatcaggagagatatggatgaaaccactcctagatgcaaattgcagctctaccaatcatggctgtgggtaaattacctcttttcagccttattcagtttcctcagatataaactgaggatattacacctaccaaatgtggttttgaaaaaggtcaaaatagtctgggcgcggtggctcatgtctgtaatcccagcactttgggaagctgaggcgggtggatcacctgaggtcaggagttccagaccagcctgggcaacatggtgaaaccccgtctctactaaaatacaaaaaattatctgggcgtggtggcgcacctgtagtcccacctactctggaggctgaggcaggagaattgcttgggccccagaggcagaggttgcagtgagccgagatcgtgccactgcaccatagcttgggctacagtgcaagactccatgtcaaaaaaaaaaaaaagaagatcaagataaacaaagcatgcaaagcactttgcagagtgctgtatatggtaagcatttaaaatatggtagctactaatattgtccagaccatagttgacaccgtaagtatttctttatgaccgtcactcattcattcaacagatatttattaactggggtctgtgtgccagatcataataagctctatctgaattccccctcagacccttatctggtgcatataattatcatctgtgtttatttatttattattattttttgttttgagatggattttcactcttgttgcccaggctagagtgcaatgacgcgatctcggctcactgcaacctctgcttcctgggtttaagagattctcctgcctcagcctcccgactagctgggattacaggcacccagcaccaagccaggctaagtttttgtatttttagtagagacgggagtttcaccatgttgtccaggctggtcttgaactcctgacctcaggtgatccacccacctcggcctcccaaattgctgggattagaagtgtgagccactgtgcctggccgtatttattcttttttttttttttttttttttgagacggagtctcgctctgttgcccaggctggagtgcagtggcgcgatctcggctcactgcaagctccacctcccgggttcacgccattctcctgcctcagcctcccgagtagctgggactacaggcgcccgccaccacgcccggctaattttttgtatttttagtagaggcggggtttcactgtgttagccaggatggtctcgatctcctgacctcatgatccgcccgcctctgcctcccaaagtgctgggattacaggcgtgagccaccgcgcccggcccgtatttattctttatgaatggcattttttggggagctgggggtctcactctgtcacccaggctggtatgcaataacaccatcatggctcatgtggactccaactcctggtctggtgtgaccatcccgcctcagccccactgagtagctgagactgcaggcacactccaccacacaggctaatttttttttctttttttttgagatgaagtcttgttctgtcacctaggctggagtgcaatggcatggtctcagctcactgcaacctctgcctcctgggttcaagcgattttcctctctcagcctctggagtagctgggattacaggcgtgcgccaccacgcccggctaattttttttgtatttttgtagagacggggtttcaccatgttggccaggctagccttgaactcctgatctcaagtgatccacctgcctccgcctcccaaagtgctgggattacaggtgtgagccaccacacctggcacacactggctaaatttttacttttttttgtagagatggggtcttactatgctgcccaggatggtctcgaactcctggcctcatgtgatcctccaaccttggtcttccaaagtgctgtgattacaggtgtaagccactgtgtccaacctgtgaatggcacttttaataccagcaaaagattctatcacatcgatttttattcctggccctgacctcccttctgggattcaaacccatatgtccagctggatgtcctcccaggaacattaaatttggcatttggggccaattagcccagtgcctagcacctggcaagtcttttcataaaaatgagctattaccaatcatcagtgtcgctttttagtccctgctagctgatccacctccttttgctactcctcactgggttcccagtgtcacgcattttctttttcctttttttttgagacggagtctcgcactctcgcccaggctggagtgcagtggcgccatctcggctcactgcaagctccgcctcccgggttcacgtcattctcctgcctccgcctcccgagtagctgggactacaggcgcccgccaccacgcccggctaattttttgtatttttagtagagacagggtttcaccgtgttagccaggatggtctcgatctcctgaccttgtgatctgcctgcctcccaaagtgctgggattacaggcgtgagccactgggcccggcccggtgtcacgtatttttatcagcagccatttgttgtccctgtggggagcccagaaaacccagcccggttctcccacctgcggggaagaaatgaagcaatgataatgaagacactcccatgccaagcccatactgccctgagcaatcagttttggtggggagaatttgctagcagaaggcaggacataaagtccccacagcagcctcactgggtgtggcagcaaatcattcctgaggcctggccggtgctaccaggcacagcaggggtccgtgcagaagaactagatttattccattaatataccgttacagcaacaatgtctgctgagtactccggaactgtaattcacatttcctgaggctgtagtagggagaatttggaagcagggcagcacagtgctaaccagcaggctctgggtgggacagacctgggtttgagtcctagctttgcctttcactatctgcattatagtcagcgagtggctctatcatatctctcagtatcttcacctgtggagttgggggggtgatgctaatgttagctaacatttatggggtgattattgttgttaaaactcagtacaccgggcgcggtggctcacgcctgtaatcccagcactttgggaggccaaggtgggcagatcacctgaggtcagaagtttgagaccagcctggctaacatggtgaaaccccgtccctactaaaaatacaaaaattagccgggcgtggtggcgggtgcctgtaatcccaactactggggaggctgaggcaggagaattgcttgaacccgggaggcggaggttgcagagagccgagaccgccccattgtactccagcctgggcaacaagagcgaaactctgtctcaaaacaaaaaacaaacgaaaaaacacagtaaattgtccctatttgactactaagagctattttaaaatagaatttattatctaagtacagaaaggtgtaattatcccccctacacccgttagaacccttgatgacactaaataaataatacatgaatacggttcaaaaatgggcatcatagagtataaaataaagaatgctttcattttcaacccaaattcagcaatttcataggatgccaggctcagctctaaagccttatatgtattcagtgcgctgaaattcaacaacctcacgaggtaggtataaccaataataattctaggcggggcgtggtggctcacgcctgtaatcctagcacttcgggaggccgaggcgggcggatcacctgaggttcgagaccagcctgacgaacatggagaaaccccgtctctaataaaaatacaaaattagccgggcgtggtgacgcatacctgtaatcccagctactcgggaggctgacgccggaaaatcgcttgaacccgggaggcggaggttgcagtgagccgagatcgcgccactgcactccagcctgggcaacaagagcgaaactccgtcccaataataataataattaataataataataataacaataataataataattctaaagggaagcagagggatctggcgggaaagtgccagcaaacctaacaggcctccacaagtgtctttaaagtttcataggggtcggtatatgtgattaactgccaaagaagaatattcgccgtgtgtccgaaacgcagtcccctggggcgccacactcggagcctacttgaaccgaagagtccctccctgggccaacgaaggacccaattcccctcgccccggatccagcctctaagtggtttcccgggtaaggtcagcagaggtccgccgcctcaaccagtcttgttagagtaggcacaaaagcattcagagtgactgccactgtagccactcaacgccgagcctaggcctgctttttttgcagttagagtgaaactttccattggtggagtcaccccaaaggaggcgggacggagcgggaaagtcctgcctaccttggccttcccagccaatcgcagcatctatgcgtcagcctccggttcggttgcgctgcgcgtagtggtctgggcgacctgagggcggggccgggagcaggccccgggctgtggggagggtgcgcttcccgcgggcgcgcggagtgaggacggtgacagccacgcgcgcgcgtacgcgcccgatgcagcgcggccccgtgaccctagtcggccgctgagaggcgcgcggagtctgggccgctgccgtctaggggtcccgtcccgaggcgtccccggcatctccggcccgaatcccggagtgccgggtcgcgcctgcaccgaaggtcccggctcctgtgccctccctgcagccgtcagggcccgtcccccaactcccctttccgctcaggcagggtcctcgcggcccatgctggccgctggggacccgcgcagcccagaccgttcccgggccgggcagccggccaccatggtggccctgaggcctgtgcagcaactccaggggggctaaagggctcagagtgcaggccgtggggcgcgagggtcccgggcctgagccccgcgccatggccggggccatcgcttcccgcatgagcttcagctctctcaagaggaagcaacccaagacgttcaccgtgaggatcgtcaccatggacgccgagatggagttcaattgcgaggtaaccggccggcagccccgactgctgcggtgacagtcgaggtggaagctcgagaggttctctttatatcatcttatgggtgtagctagagacgggcagaaccggaagggccaactaggcccaaaacctcatgttaaagatgattgctgctttttttcataggacttttgggttttggcatttcctgaaggttattttcattcattgttattggaagaagctggatgctcctgtgatagaaaattcaggatttcagtgtcaggcttaagttaggcttacgcttaaaagcttgaaagtttattctttcattaggtaatattgttatgtacccaggtattagaagttgcgtcttgtttattggaaagccaatacttgtttcccttttctaaagcttgcatattctgggaaaaaaaaccctttgaagaacgatataacatctcatacttactttccacatagtttccaacatgatgataacagctatcaattgttcagtattttcaaagtgctagacatttgcacatttaatcctcagaacaaacccatttatctagtaaatggcaaggtggggttttgaaccaagctcacagcccgtacagtactgcttctcaagtaatttaagttcttgctgctaaaagtgtggtttgtggaccagcagcattggcagcagtaagcaagggttggcatgctttttctgtacaggaccacatagtaaatattttc

SEQ ID NO: 2212 - DNA, 6000 bp, Homo sapiens
agcctcccaatctgggaaagtgaaaaaccttttgctgaaagtgtcctgggcagagcatgggacaagattttttttttttttttttttttttttttgagacagggtctggctttgtcctccacactggagtgcagtggtgtgatcttggctcactgcaacctccacctcttgggcttaagccatcctctggcctcagcctcctgagtagctgcggctacaagtgcacaccaccatgcccagttaatttttgtattttttttttagagatggggtttcgctatgttgcccaggctggtctcaaactcttgaactaaagtgatcctcccaccttggcttcacaaagtgctgggattacaggcgtgagtcactgtgcctggccaaggtgtatttttttttttttttttttttttgagatggagtctcattctgttgcccaggctggagtgcagtggtgcgatttcagctcgctgcatcctctgctgcccaggttcaagcaattctcctgcctcagcctcccaagtagctgggattataagcacatgacaccgcactcggctaatttttttagttttagtagagacagggttttaccatgttggccaggctggtcttgaactcctgacctcgtgatccacctgcctcggcctcccaaagtgctgggattacaggtgtgagccactgtgcccagccaaggtgtttctttataggaccagtacctaaggactggaagtcaggagacctttgtcactagtctgactatgccacttcaaggctcattttgttcactggtaaaatgagaacaatacacatacctctcacagctggtgggaggatccagtggtgtccaaacaccagtctgtgcatggtggcatcagaattacttggagatacttaaccacagaatccagggctccacctgggatggggctctagaatttttttttttttttttttttttttgagacggagtcttgctctgtcacccaggctggagtgcagtggcgcgatcttgactcactggaagctccgcctcccgggttcacgctattctcctgcctcagcctcctgagtagctgggactataggcacccaccaccatgcccggctaattttttgtatttttagtggagacggaggtcacaggtttcaccgtgttagccaggatggtctcgatctcctgacctcgtgatccgcccgccttggactcccaaagtgctgggattacaggcgcgagccaccgcacccagcctagaatcagtatttttgaaaagtaccttaggagagtccaacgcgcacccaggtccaggagcacgtatggtcacgtatgcaaagcataggcattcaaatagcagctggagctgggcacggtggctcacgactataatcccaacacttttgggaggctgagacaggcggatttcttgaggccaggagtttgagaccagcccggccaacacagtgaaaacctgcctctactaaaaccacaaaattagctggaagtggtggcgcatgcctgtaatcccagctactccgggggctgaggcaggagaatcacttgaatccgggaggctgaggttgcagtgagccgagatcgcaccaatgcactccagccttagcaacagagcaagactctgtctcaaaaaaacaaaacaaaaacccaatagcagctgggactctcctgccctgggcccagtttcctcatttgtgaaaggggaatagatattcattgtactgacaaagaaaggaaggaagaggggaggggagagagagaaactatcttgaattttactaataggagaatggctgaataattttttcctatcaattgtcgaacaaagccagacactagttaaagtggtaaggacgaccgggcacggtggctcatgcctgtaatcccagcactttgggaggccgaggagggcagatcatgaggtcaggagtttgagactggcctgaccaacatggtgaaactctgtctctactaaaaatacaaaaattaaccgggcatggtggcgcgtgcctgtaatcccagctaccaggaggctgaggcaggagaactgcttgaacttgggaaacggaggttgcagtgagctgaaattatgccactgcactccagcctgggtgataaagcgagaatccgtctcaaaaaaaaaaagtggtaaggacagattttaatcagtaatgattattgcaacagggaagagagttcagtatgaactgaactcagctttaatttgtatagaggtattttaaagggaggttgaccagcctgggcaatatggtaaaaccccatctctacaaatgaataaataaattcgccgggcatggtggtgaggttgaggtgggaggattgcacgagcctgggaggtcaaggctgcagtgagctgtgattgcaccaccgcactctagcattggcaacagagaccctgtctcaaaaaaataaataaaaaaaataaaggaagattgagggaggaaggggtgggcaagtgattagtagagtcagggaagtgaaatattacaaaaggttaagtcagtgtaaatgcagtgaggctagctgtgtctgccagttggcaatgatcaaagttagaatttttgcctcccacagagcctgggagacagaggtcacatcctcggttgttgcctggaataaacggtaaacatttaccagcagccttgagttttctcaggcaggcaccttagcgggggctggctagagtcattttagagatgttagcagctgttagaaactgttagtgtttgtttaagtctttttttcttttctttttttttttttttgagattaagtttcactcttgtcgcccagactggagtgtagtggcacgatctcggctcactgcaacctccgcctcccaggttcaagcgattctcctgcctcaggcttccaagtagctgggattacaagcgcctgccaccacgcccggctaagttttgtatttttagtagacacagggtttcaccatgttggccaggctggtcttgaactcccgcctcagcctcccaaaatgctgggattacaggtgtgagccacggcgcctggactgtcttttttttctttttagagatgagtctcgctctgtcgctcaggctgaagtgcagtggtgcaatcaaaactcactgcagtctcaaactcctgggctcaggccatcctcccaccttggcctcttgagtagctaggacaacaggtgtgctccaccatgcccagctaattaaaaaaaaatttcaagccgggcgcagtggctcatgcctgtaatcccagcatcttggaaggctcaggcgggtggatcacctgaggtcaggagttcaaggctggccaacatggtgaaaccctgtctctactaaaaatacaaaaaattagccaggcgtggtggcacacacctgtaattccagctacttgggaagctgaggcaggagaattgcttgaacccaggaggtggaagttgcagtgagccgagatcgtgacactgcactccagcctgggcaacagagtgagactctgtctcaaaacaaaaaaaattataaaaaaatttctagagaagcgggatcttgctatgttgcccaggctggcctcaactcctggactcaagggatcctctcatcttggtctcctgaagtgctaggattacaggcatgagccacagtgcctatagatcaaggttgaggcttagaagtgaagggagcccagaggaacctggctagagtttggtcaaggagagtctttgtcaccatactacagaaaattaagcagctgttaaacagaatgaggccggtctgggcatggtggctcacgcctgtaattccagcactttgggaggccgaagcgagtggatcacttgaggccagaagttcgagaccagtgtgggcaacatggtgaaaccctgtctccactaaaaatacaaaaattagctgagcatggtggcgcctgcctgtagtcccagctagttgggaggctgaggcaggagaatcgcttgaaccggggaggcagaagttgcagtgagccgagattgagccactgcactccatcctgggggacagagtgagactccctctcaacaaataaataaacaaataaaagcagtgtgttagggtgcgagaacccgggtcggggacgcgggtgagccgcgcggtaatcgccctgtcctgccaccagctggaggacaggggctcctcagagcctcaggcccagagaacgggccccacgaccgggaagcgaatactccacagggcacagtctcccaatgcaaaatgggcacctggacccaatcatttctgaacttctagttttttctccctatggctatgaaaagggtcattttttttcataggactttaaaagaaggcttaagaaaagcacgcaggcctggccgggtagctcacgccagtaatcccagtgctttgggacgtcaaggcaggcgggtcgcttgagagtagagtttcgagacctgggcaagatggtgagactccgtctttatgaaatattttaagaaaatcacgtacacctgtggtccccgctacaagggaggctgaggcggaaggattgcttgagcccaagaggttgaggctacagtaagccgtgatccagccactgcactccatccccggcaacacaacgagaccatgcgtcaggaaaaaaaaaaaaaaaccaagaaaataaaaaagaaaccacctaaaggcgtcctccgcgcgcccgcccctccgccatctttgcgtccgccccgtcctgcgccgccacttccttcccagccagaagtttcgcgccaaattgttccgcacacaaaatggagcccggaaggaggcgaggtcatgcactttgcagccaatcatcttcggcagacagtccgggcggcggggctggagggctcagaacggtccaatcgctggccgcgaggctccggcgaaccaatgggagcgcagcggctgcggcgtccgaacaccgcctcttgtttttcccgcgaaactcggcggctgagcgtggaggttcttgtctcccctggtttgtgaagtgcggaaaaccagaggtgaggctagtgggagtgggactgggactgggagccagcaggcatctggatttccgggtgtagttggagtgggacaggagtttctcgggaactggggttggagtccgggagcgcggccgggggtccccctgctccggactcagggcagggacccaggcgtcggaggggaggaggtgccaggcgctgcccccagcctgttctggccgtttgttcccaccccaggcgcagtcatgtcgggattcgacgatcctggcattttctacagcgacagcttcgggggcgacgcccaggccgacgaggggcaggcccgcaaatcgcagctgcagaggcgcttcaaggagttcctgcggcagtaccgagtgggcaccgaccgcacgggcttcaccttcaaatacaggtgcggctcctgcggggccgggggctcgagttccagtgtggccgctcacacgcctctaccagcctgctagagtcctggacagtcagggcacagatgggcccagacgggggaaagagccggtcctgggtcacagggctcatcccggcagcctcacgccttggtataaggctttgtgtattttgttttactttattttattttattttattattaacgtatttgtttattattttgagacggagtctcgctctgtcgccaggctggagtgcagtggcacgatctcggctcactgcaacctccgcttcccgggttcaagcgattcttgtgcctcagcctcccgagtaggtgggactacccccgccatcaccacgcccggataattttttgtaattttagtagagatggggtttcgccatgttcgccaggctgctctcgaactcctgacctcaagtgatccacccgcctcagtctcccaaagtgctgggattacaggcgtgagccaccgtgcccggcctgctttgtgtattttatctgtacctggagttaacttctgggtgagtcacctgt

SEQ ID NO: 2213 - DNA, 6000 bp, Homo sapiens
gatggcaccactgcactccagcctgggcaacagagcgagactccatctcaaaaaaaaaaaaaaaaagaaaagaaaacgaaaagaaaagaaaaggaaatatggccttaatgtgtgctgccagtcagtacgcgaaggatataggtttcattaagttggactaagtgatcttccttgaatagattatccagggcatccactcaatgaaagaaaaaatctttttacataaaataaaaatttaaaattttttttttgagacggagtctcactctgtcatccaggctggagtgcagtggcgcgatctcggctcactgcaacctccgactccctggttcaagcgattctcctgcctcagcctcccgaatagctgggatgacagccacgctccacgacacccagctaatttttgtatttttagtagagacggggtttcaccatgttggccaggatggtctcgaactcctgacctcgtgatccgcctgccttggcctcctgaagtgctgggattccatgcgtgagctactgcaactggcctaaaacaatttttttaaaggaacaacctgtttatcggtctgcctctcccaagcactgttgctttccacagcagagacttagtcacctttctatctgtgtgcttagcacagtgcacactatttttcccttaatgcatttttcacaattctgcttatatagttctttgtataaaatctatctttcctactagactgtaagctctgtgacagctatgaaataaccaactctttctctgctggtaaatggaaactagaaaatggaaactagtacaaccaaatatttccatgagctttaaatatttatcaatagccttaaaattgtccacagcctttcaatcaatgattataaatccagaaatctaccctaagaaaagtgatcctcagccgggtgcagtggctcatgcttgtaatcccagcactttgggaggccaatgtgagaggattgcttgagcccaggagttcaagaccagccttggcaacgtagcgagaccccatctctatttttttattataaataaataaaagtaatcctaaaaaacaaacaatgcaaaaagatgctgacactaattagtaatgtccaataacagggaatttgttaataatacattcaatggaatattatgcaatcatttaaaattatgcttaagacatggaaaaatgcttattaggtgactgaaaagtaggatcagaaataaacagatatgcggccaggtgtggtggctcacacctgtaaacccagcactttgggaggccgaggtgggcagatcacgaggtcaggagatcaagaccatcctggccaacatggtgaaaccctgtctctacaaaaaatacaaaaattagctggatgtggtggcatgtgcctgtaatcccagctactcaggaggctgagtcaggagaatcgcttgaacgagggagtcagaggttgcagtgaactgagatcacgctactgcactccaggctggtgacagagtgagactctgcctcaaaaaaaaaaaaaagaaagaaagaagtagatatgcaaaaatatatacaacttttgccttttatttttgctaatcaatgctttgaataaagatgggaactttggttttttattttttggttcataatcctacagattttttttctttccagtaaatctatactaaacccctttaggttaatgcaaatccacacactgcagaattagtatctttcagaatattccctctgctgaggcaagaaacacagtatttgaaatgtctatataaactagaagtgtaagaaaaaaagcatgacaagattgatggaactagaatactgagaaaaaaagagaaagtttggcgaatgtaagaggtgttttactagtcattcattctacaaataagtattgagctccagctaaatgcactctcttaagttagtactggttccctcttattacctgactaatgaattactcatgggtgtcagcctctaaatgccatgttccccacttacccacaaactgaataagatgtccctcccatgtgttcctatggtaccccgtattccttcttgtaactggaggtgaataatgtaagaccctaggttaaaattttaatcgactctttacaaacagcagtcattttaaacctttatgtagccaggggaagagccactaagaggtacaggtctcagcaataggctacaagtaccttattcttaaagggaaattatttgaaattggagataaagaaatggaacactgctggatgcagtggctcacgcctgtaagcccagcactctgggaggctgagatgggaggatcacttgagcccagaagtttgagaccagggcaacatggtgaaatcacatctctacaaaaaaaataccaaaaaattagctgggtgtggtggcttgtgcctgtagtgccagctactcaggaggctgaggtgggaggatcgcttgagcccgggagattgaggctgctgtgagccaagatcttacttaccactgtactctagcctgggtgacagagggagaccctgactcaaaaacaaaaagcaaaacaaaacaaacaaatatttttaaggggaattctacccagtgaaatttgtacgtgatgagccttcattctttagttctctactaaagcatttctcaaattcaagctcttgaaatttcaagaatatgtatcagcaagcatcactttgtagaagcccaactatacgcgctggaatcctgtgcctctatttggttataaggtgactgtccacggaggggcagtaaagtgtaatagtttaaaattcaggtcttaactataatcccactgcctatttttttatttctaaaaatatcataaaaagacacaaaattttaaaattgtgtagagaaattgtggacttcctgaaggatttgaaaaattaggcaagctatattatccagttaataattgacacaaaagctctggtttgccatgttctatattgtggataggaaagtaccattttgccatgcaggatatatttttttaaatataagcatacttaacaatctttcatggcttctgagttttgtagcatacttaaaaagatgtttcttattacaaagtaattttaaatatcccatattttcttctagtacttttattattttattgttcagatttaattttttgatctgtctggaatttattttggtataatgtgtaaagtgtggttccaattttatttttcttccagatggttacctagttgttctaacactattcactgaattcatcatttctccactgatgtgaaatgccaccttcatgatattcagagtttttgtatgatacgaaagacaatttttttggttccgattttagtggaaagtcttcatgtgcactttttaactgtcctagagtttgttgttgttttaaatatcttaaaagttgtctctaaccatcgatatgatacccagataagatttttctcctcccttcatgaatttgtcattacccagctcattttagtttttttaagtgtactgcacacaaccttcaaatattatgaacatttctctctcccagctgtcactacaccaaactacatatgttatatttccctaaatcatcttgctgtgctctttgcagctcttctgtagactgttgatgtcttcacctaacgagttgctcaaaagttcccataattatttaggtgaggcctcagagcgaaagcctttcaccactatccagttcctcccccaaatgggcattcatctccatataacaaggacgactgtgtttgggggaaaataacagatttggaagcacaatggcagttatttgttggctcttaaaacaatccacctgttgggggggtgcgtcctacacaaaatgccaactgctattgtgggaatgttttgctatttattccaccaaaatgattcagacagaaaaaacaaaaaggatcgccctgtactaggtcttgaacccaaagaactgtttgcacagagattcatccaagatacatcacagcctccacctcggcagctgctctctcaaatgtttcctgactctccccaagtcagtctccgcgtgaggggaggaggaggatgctgccagcgatggcgctgctggcacgaaggctggcctgcgacttctatttaaaagctgaaccaaaatatacttggcgtctgtggtctatttaaaacttcaagttaagacagagaaaaaattactctccatcctgaatgggcctcgggtgtctcaatcacagacaagagtggcaaatggtgagagtcagaaagtgggaaattaggaacgctgagggagcacggccaaactctgaagccagcatgaaaacctggaggtgaaaagagaagccatgggcagcgggggcggggggaaacgggcccggattcgaccttctaagccaaggctccatctgcaaccctcgcgaccaagacctatcgccaaagtcagccacctctgctcatcgcccctcccccgactcaaggctacctcctcagaaccccgcctcagggtcttctcccggactttagcgaggtgctcagctcgagggacgccccagctcaacggtctcccttcaaggccccgctcctcagcgcgctccttccacagcgcccctccctccctccctccgtcatcccagctcgccacccgctggggctcctcttcgttttccgcgcctcagccctcgccccgccccctcgccctgagccccctccaggccacgccctctggtccccccacctgtgagcccgctcgttccccgcccttcggtcttcgccccgcccccattgctccccgcccctcgtcgccctctgtaggcctgctccctccccgcccttccaccctcaccctgcgccccgccccggccccttggtcctcgccccgccctcctcgtttggcgccaaaccctgtggtcaacggcgcgcgggtctccaggctccgtgttctaggcccgagttagaatcctgtcagctgaggaggtcgggcggggcagaggggcttcaccttgaaaatctcggggagactgtgggtacgaggggggtaagtggcaaaaacgaacagcgtgcgaagactctgaggggacgctcgttttgagaaggcgcgcttccctttctcgctccttttttggggtccctgggctagtgactttgagcgttccgctccgacctttggggaggaattttagtgatcttgagggatttccaacctcattttcaatcgaatcggacctgagtctaggagagcccgcctcatcctcctgaccagggaatccggtgtcaggaaaatgtccggcggccgcagggggtctgcccaggcctcctgctgagggaggcgtcgagggcgacccgaccgcgctgctgcccccaccagaggggacagctgggtcgtcttaaaccgggggattggggagccctactttcaatccaacggttcagtctatcaacggctccttgagagatgggggacaatcttttcatttcatcacggggagaagaaatgaatgctgtttttctcttcgatggggacagtaaatgtggaattggggtactcatagctagccatctgaaggacagtgtccccgaagatcccatccgaacggtctcggttgccttccatcctttgccgtttgaggtgctgggtggtaggaccctgctcctgccttagtattaatggttcgttccctttgttctagggtccaacccctgactttggtatcaaatgaggaaatggaatcgaccaagaaaaatgatgatttggaccgcattttattgtaataaataaacacaatcacgccttgtggattcctgagatttctttttgagtctacaatgttaaaaactttaactgcttatcagccttaatataatattatgatccaccaatttttttttttttttttgagactgagtctcgcactgtcgcccaggctggagtgcagtggcatgatctcggctcagtgcaacctccgcctcccaggttcaagcgattctc

SEQ ID NO: 2214 - DNA, 6000 bp, Homo sapiens
gcctgcgtgtcccgaggggggtgctgggcccagtgtgagtacgtgtgactgtgactgagacagtgtgactgctgaaggcagggacacagcagctccctgactgggggcagaaggcgttaactgtgtgaaggctggttgtgggtgggtgggctctgggcctcgaacccgggggctgagggagatagtaaacagcagggtgactgacgggaagatcatgttggtagccctgcgaagatgctgcagggctgtgggggtttgtgtgactttgcagttcaacaaattcaaattcagccaacgctggcagggcctgttgtgccaggcaaccagctaggaggaggagactcggacccagcttgcagctgaagggcgctggctgccgggttctgtgggttcaccttgcggtgtcttcccttgctaacactgagtccttacaatagccccatctccaggttgaggctagatggaggggacagagggaagtgacttgcccaaggtgacccaagctcccgagtgccagggcaggatctgaattcaggctctcagactgcagagcctgagtccctccctgccatgcctgtgccagggtggaaatgtctggtcctggaggggagcgtggactcctggccttggctctggagacatccccctagaccacgtgggctcctaacctgtccatggtcactgtgctgaggggcgggacggtgggtcacccctagttcttttttccccagggccagattcatggactgaagggttgctcggctctcagagaccccctaagcgccccgccctggccccaagccctcccccagctcccgcgtcccccccctcctggcgctgactccgggccagaagaggaaaggctgtctccacccacctctcgcactctcccttctcctttataaaggccggaacagctgaaagggtggcaacttctcctcctgcagccgggagcggcctgcctgcctccctgcgcacccgcagcctcccccgctgcctccctagggctcccctccggccgccagcgcccatttttcattccctagatagagatactttgcgcgcacacacatacatacgcgcgcaaaaaggaaaaaaaaaaaaaaaagcccaccctccagcctcgctgcaaagagaaaaccggagcagccgcagctcgcagctcgcagctcgcagcccgcagcccgcagaggacgcccagagcggcgagcgggcgggcagacggaccgacggactcgcgccgcgtccacctgtcggccgggcccagccgagcgcgcagcgggcacgccgcgcgcgcggagcagccgtgcccgccgcccgggccccgcgccagggcgcacacgctcccgcccccctacccggcccgggcgggagtttgcacctctccctgcccgggtgctcgagctgccgttgcaaagccaactttggaaaaagttttttgggggagacttgggccttgaggtgcccagctccgcgctttccgattttgggggcctttccagaaaatgttgcaaaaaagctaagccggcgggcagaggaaaacgcctgtagccggcgagtgaagacgaaccatcgactgccgtgttccttttcctcttggaggttggagtcccctgggcgcccccacacggctagacgcctcggctggttcgcgacgcagccccccggccgtggatgctcactcgggctcgggatccgcccaggtagcggcctcggacccaggtcctgcgcccaggtcctcccctgccccccagcgacggagccggggccgggggcggcggcgcccgggggccatgcgggtgagccgcggctgcagaggcctgagcgcctgatcgccgcggacccgagccgagcccacccccctccccagccccccaccctggccgcgggggcggcgcgctcgatctacgcgtccggggccccgcggggccgggcccggagtcggcatgaatcgctgctgggcgctcttcctgtctctctgctgctacctgcgtctggtcagcgccgaggtgagttgccacggcggctggggctggttcttcattcattaccttcgccccccccttctgaccgccccctcctctccctgcagtgaactttggacccttgcagcccgcgagcctgacgccgggcgctgggtgacctcttcgggctgggagcgaggtccgggggtgacaggctctaagggaaggcaacagcggtggctttctttccaaccggcgggcgaatctggctccctaagccgttccgtgtcgggggagggtgtgtgtggccctgtcccccaccctttgggaacccgagaacaagccccttcccggccgggggagagggggtggggtggtgcccagggtgcagaaggcagcgcgtcctcccgagcccacttcggcgccagcctcggcttaggctctgtcctgccatcggcttgcccaggaggtgcaagcttgcgcaccggtgccatccacgccgacctttgacggggctcgggtcccaccctggctcccggtcggggtccgggtggacgccctccggcacgcgcagggcatgcccggccccagagcacggtctggaagcagcttgtgtctcgggcgcggggtttggggtgggagtaacagggagagagagagagagagagagaaagagagagagagagagagagacggagagagagacggagagagagagggagagaaagatagagacgcaggtaggtttcgggcactcgggtagggggaggactaggggctctgaaggaatccagcccccggggcgctgtgtgcctgaggccttgccgtacctgtgcccgcgccctgcaggaggaagcacctctctcccccgcatgcagggtgcggagcgcgccgcctgcaaaagcctagctgcacgggagatggggtataaaaacatctgagggagcgctggggtcggagccgtccccacccctcccagcctcacgtagccgtgagttggcaagtctacccggaatccaggtgggaaagggggcggggcaggacgacgcgcgcggtggaggggaggagagggcagccgggagcgcggcgtgactgggtaccgtcccacctccgcccggctgcggccgggagtccgcacctcgcccgcacctcgccggctcccggggagggtcggcccctgcggcctccagccaggcgcaggaaggaggcagcggcggcgaaggggttaaggcggagggctcggaggccgcggcccggccttgggctgccgccagcgcaggttgttttgaccacggaggagccgtcgccgtctccttttgttctcggggctcctcgagggccgcaggccgcccgcccgggggccccgcccttccgcggccgccccccgcggcccgcacccgggagggaggacgcggggctcggccgggccgccttcaggcccctcccgacgccccctctccgcctctcccgcagccccccgggccgcggccagctgttggggagggggtggccggccggccccagctgccgcctcgcctcgccgtgggacctgggggctgggcccggtgccagggcgtcctgggaacggcggcgccccgtggctgctctccgcagcccaccccgcccgggcccccgactcgctcactcaccccacgcatgcacactcctggccggaggcgatgctgcgctccggcgggcgggcgcgcagagcgacgggcacgcactaccgcggccaggtcgcgcgcccgcctctgccacgcccgtgcacacgcgggacacacgcgcgcgcaccgcacacaaacgcacgcacggcccctgcacgcgcggcctgagcacacgtgcgcgcacacccacgcacgtacacaggcacgcacgggcccccgtgcacccagcgcctggtgctcgcccccgcgcaacaggtgggccctccgtgggccctggcacctcaccacctctgtagcggccccatttccttcctggcgtcctgtgagggagggagaacctcccatcagcaccacagcacctacttttttttttgcctcgtcagcccgacgcccctcaaaccttacccatctgtgactcctttttttcaaccacctccgcgtggtggaaaatggtggtgatgtgactctgaggggcactgagctgtccagagcgattcccccttcacataagccttcatttgaacctgcaagactggagggacctggcgtgtgcaaccgcggagggggctcccacccctggctgttgcattctcttggctgatcccagcgtgccccggggaggccgctgacagctggatgtttccccagcctccccttaccatttccagcttcgtccagcacctcctccttctttcccacagctccacgggctcgtgtatctggggtggaggctgtggcacagaaactgcctttctcctcactttagtcacagcattcttgaacacatggccacaggcgcgatgtatgtggcactttgcagtttatgaagcactttgctgctaagcctgagtgagcctcaggctggccctgggggaggggacctgcatggggatggaaccacgcaggggtcagtccaggaaggagctgtaatggccagtgctgggagagtcagggcaggcctgctggtggaggtggccttggagctgtccacgtcctggtcgtgctcggactaatctttcagcagacggcaggcagccgtgaggcagggctgggtggagggcctgccgaggcctctgaggtgccatctccaccagctgagctggcttccaggagggcgagtcccactgtcacgtgacgcgtctggcctcagcacacttcttccgggaaagagtgaagggccccactgccctttgccatccagcttcctctggctttgctaatggccctagggggcaggagaccaactgctggaatcccagagccctggaggtgtgcaagggcaggtcaaacagaatttggaggatctggtgcaagagccaggaagagagagagagagagagtgtgtgtgtgtgtgtgtgtgcgcatctgagagagagagagagagagactgactgagcaggaatggtgagatgtttatcatgggcctcgtaagtacctctccacgtcttgtcttcccctccccacattgaggagcctcttctgtgacaactcttcctatgttctggtttatttcattgtttattacctgctttctctactggagtgtcaaccccattagagagctttcctcctggtccccacttttagaacagtgcccagagccctgtggacaatcagtaactattagtgcaaagaacagttagtgctgggttggtggggagggcaggacctggccccctgttgctccatggccccactgagtcctcgctttgctctgctccgagggcagccccccttttcagccctctggtaggcatcagtctttcaaagccccccatcttgagagagaagcatgtctgtctctcctctgtcttgggacttgggctaccaggattagacaggacagaggagaagaaacagaaagaaaatcagactgcaaaggttctgtgtatctttagctggggctaagtttctgccacctaaaaaaaaaaagagagagagaagattggattagtgcagagttcccaaagaatggcagaatcccctggccccgtcccctggctgggatggggatgggcagtgattgccgtggttgccagtattataaatggctggactggttcctctcttcctgctttaattttcctctgctcctgcaagaggtggggaggccagggttctgggcccacgtgaaggagcagaggctgagcgggagggtcccaagagcaataaagaaggggaatgctaggtgggaaacactggttctaatggcttctgtggtttgccccgagagggcttcttcaaaggggttggttggctttggcattcgatctaaataaggcctgcgactctcaggcaggcaggctctgggaggcctcatcagcttcttcctctgccagccacagacaacgcccctggttgcttgggcctgt

SEQ ID NO: 2215 - DNA, 6000 bp, Homo sapiens
atgagaccacgtgcattcagggtggtgtggcttcagacccttcccagttctgatacctccagaaggggtgcccttcaggggccctgtgcttccaagcttagaggctcatgctacaagcccctccccaactctttccaccctttaggaagggcctggcatctctgcaataactggtcaggactcagaaagagaaattggcaggattttaatcatttattcattccttcagcgagcggcacttcctgagcagccactgtatgctaggagctggcaggaggcccttgaacactctggactcagtctagtgctagattgatgatcaggccatgacgatgccaggtgtgcatgctgtggagcctggaacaagtgccaagcctggtgggccttctggaggaggtgcctgctacacccagcctggcaggaggcagacgatcaggtgttattaaaaaaaaatttttaggctgggtgtggtggttcatgcctgtaatcccagcacttcgggaggctgagtggggcagatcacttgaggtcaggagatcgagagcaccctggtcaacatggtgaaaccgtctctactaaaaatacaaaaattagctgggcatggtggcaggcgcctgtggtctcagctactcgggaggctgaggcaggagaatcgcttgaacctgggaggcagaggttgcagtgagaagagatcgcaccacggcactccagcctcggcgacagaccgagaccccgtctctgagatggctcactgcagtcttgaactcctgggctcaggggattctccctcctgactcagcctcctgagtagctggggccacactcagatatatatatatatatatatatatatatatatatatatatatatatatatttttttttttttttttttttttttttggtaattttttttaagagatgggatctcgctatgttgctgaggctggtctcgaactcctggctgcacatgatcctctggcctcagcctcccaaattgctgggaatacaggggtgagccaccgtgcctggggaggtgttctttacagactgttcctctgcacagagaaggtacaagaaaggagcccttagcacaacattcaggcccaggtgtcacgcaggtgtcacgtagcattcaggcccaggtgtctgctgggccctcttctgccacttctaacccatgtactggcacctgcactgcaatgatttgggtctatctcactgagagcatgggaagtccctgagtgccgaggctgggactccttcctcattccatttctcagcgcttcacacagggtctgcaaacagtaggcgttctacgatgctgctctgagtagccttccctctccctcaacttgtacctaagtcagagttcatatgggtccatcactttttagctggcagagcaggttcccacatattaatgcatgtggcgctcaccaaagcgctgtgtcaaaagtgtcatcattgtcatcagcatcacctgccagaaaattgcacagcacggtggtctcagcatgtgggctctgtagctggactgctcagattcaagtcctggccttaccacttacgggctgtgtgaccttgaacaagtgtattggcctctctgtgcttccatttccccatctgtaagataggaataacacatctcacaggagcatggagaggctacaggtagagtaagaaaaacactagctaccacatagtcagctcactaatcatggtagttgttaccattctatttatagaagacacagaaggtcaaggtcaaatgacccagctgtccggtggaagagggtttttatctctgagtcgttagacttcaaatctagtgtttgggggttatctcctcgtcccgctgccccatctcccttgtcaccctgtctcctaatttatctgtttatacatctggttgtccttctcaatggggctcttcaaaggcaggggcctgcattaggctggttcacacctgtctccccagtgcctggagcagtgcggggccaccagtgaacttgaaggctgcatggaaggttccaggcgcttgcttcctgctaaggtgttttgctgagcgcctccacatggaggacctcatgggagcctccagaccactccaggagcagggtaaaaattctctacaactgcactgaggtacaacaaactgcacacattttgttgtgatgtacgtatacacccataagcccatcaccacaatcaaaaatgacaaacatttccatcaccactaaaattttgccatgcctctctgttctctctcactccttcccattatagatttatttttatttctttagagatagggtcttgctctgttgcccaggctggagtgcagtggcacagtcacaactcactgcagcctcaaactcctgggctcaaaacgatccacagtctcctgagtagctgggactacaggagcttgttaccacacccagctccagtttataaattcatctccagtttataaaggaggaaaccgaggtactgagaggttaaaaaaccttcctgcagacacttgtccagcaagtggccactccaggatttggaccaaggtgatgtgtcttcaggctgtgtctctgccactgtgccacgctgctgggtggtaggcagcagtgggtgggtgcctgcagtggtctgtaaagaccacctgagatgtccttcctcctctgttccaccctgtccaggtccaagaagacagtctatgaagagagagcaggtgtgactctctcagtgtgctcctctgtgagaagcaggctgacatcccaaagggaagggcggataacagagacagtgcaagcggaggagatgagggtgcctcaaagccgggaggctgggtgatgcaggagcctgcgtgtcccgaggggggtgctgggcccagtgtgagtacgtgtgactgtgactgagacagtgtgactgctgaaggcagggacacagcagctccctgactgggggcagaaggcgttaactgtgtgaaggctggttgtgggtgggtgggctctgggcctcgaacccgggggctgagggagatagtaaacagcagggtgactgacgggaagatcatgttggtagccctgcgaagatgctgcagggctgtgggggtttgtgtgactttgcagttcaacaaattcaaattcagccaacgctggcagggcctgttgtgccaggcaaccagctaggaggaggagactcggacccagcttgcagctgaagggcgctggctgccgggttctgtgggttcaccttgcggtgtcttcccttgctaacactgagtccttacaatagccccatctccaggttgaggctagatggaggggacagagggaagtgacttgcccaaggtgacccaagctcccgagtgccagggcaggatctgaattcaggctctcagactgcagagcctgagtccctccctgccatgcctgtgccagggtggaaatgtctggtcctggaggggagcgtggactcctggccttggctctggagacatccccctagaccacgtgggctcctaacctgtccatggtcactgtgctgaggggcgggacggtgggtcacccctagttcttttttccccagggccagattcatggactgaagggttgctcggctctcagagaccccctaagcgccccgccctggccccaagccctcccccagctcccgcgtcccccccctcctggcgctgactccgggccagaagaggaaaggctgtctccacccacctctcgcactctcccttctcctttataaaggccggaacagctgaaagggtggcaacttctcctcctgcagccgggagcggcctgcctgcctccctgcgcacccgcagcctcccccgctgcctccctagggctcccctccggccgccagcgcccatttttcattccctagatagagatactttgcgcgcacacacatacatacgcgcgcaaaaaggaaaaaaaaaaaaaaaagcccaccctccagcctcgctgcaaagagaaaaccggagcagccgcagctcgcagctcgcagctcgcagcccgcagcccgcagaggacgcccagagcggcgagcgggcgggcagacggaccgacggactcgcgccgcgtccacctgtcggccgggcccagccgagcgcgcagcgggcacgccgcgcgcgcggagcagccgtgcccgccgcccgggccccgcgccagggcgcacacgctcccgcccccctacccggcccgggcgggagtttgcacctctccctgcccgggtgctcgagctgccgttgcaaagccaactttggaaaaagttttttgggggagacttgggccttgaggtgcccagctccgcgctttccgattttgggggcctttccagaaaatgttgcaaaaaagctaagccggcgggcagaggaaaacgcctgtagccggcgagtgaagacgaaccatcgactgccgtgttccttttcctcttggaggttggagtcccctgggcgcccccacacggctagacgcctcggctggttcgcgacgcagccccccggccgtggatgctcactcgggctcgggatccgcccaggtagcggcctcggacccaggtcctgcgcccaggtcctcccctgccccccagcgacggagccggggccgggggcggcggcgcccgggggccatgcgggtgagccgcggctgcagaggcctgagcgcctgatcgccgcggacccgagccgagcccacccccctccccagccccccaccctggccgcgggggcggcgcgctcgatctacgcgtccggggccccgcggggccgggcccggagtcggcatgaatcgctgctgggcgctcttcctgtctctctgctgctacctgcgtctggtcagcgccgaggtgagttgccacggcggctggggctggttcttcattcattaccttcgccccccccttctgaccgccccctcctctccctgcagtgaactttggacccttgcagcccgcgagcctgacgccgggcgctgggtgacctcttcgggctgggagcgaggtccgggggtgacaggctctaagggaaggcaacagcggtggctttctttccaaccggcgggcgaatctggctccctaagccgttccgtgtcgggggagggtgtgtgtggccctgtcccccaccctttgggaacccgagaacaagccccttcccggccgggggagagggggtggggtggtgcccagggtgcagaaggcagcgcgtcctcccgagcccacttcggcgccagcctcggcttaggctctgtcctgccatcggcttgcccaggaggtgcaagcttgcgcaccggtgccatccacgccgacctttgacggggctcgggtcccaccctggctcccggtcggggtccgggtggacgccctccggcacgcgcagggcatgcccggccccagagcacggtctggaagcagcttgtgtctcgggcgcggggtttggggtgggagtaacagggagagagagagagagagagagaaagagagagagagagagagagacggagagagagacggagagagagagggagagaaagatagagacgcaggtaggtttcgggcactcgggtagggggaggactaggggctctgaaggaatccagcccccggggcgctgtgtgcctgaggccttgccgtacctgtgcccgcgccctgcaggaggaagcacctctctcccccgcatgcagggtgcggagcgcgccgcctgcaaaagcctagctgcacgggagatggggtataaaaacatctgagggagcgctggggtcggagccgtccccacccctcccagcctcacgtagccgtgagttggcaagtctacccggaatccaggtgggaaagggggcggggcaggacgacgcgcgcggtggaggggaggagagggcagccgggagcgcggcgtgactgggtaccgtcccacctccgcccggctgcggccgggagtccgcacctcgcccgcacctcgccggctcccggggagggtcggcccct

SEQ ID NO: 2216 - DNA, 6000 bp, Homo sapiens
aatttgcttaaggtcacagagttagtagatggtagggcagggctttgaacccaggtggtctttgacgggaagcctagtcccttgccctctctcagcctcactttcctcatctgtacaatgggcatatacgatggcaatgccttctccctgggcgactgtgagggtgaggcaggcagaggggaaggaagtgctttgtggacagccaaaggccctgtagacagggaggcaggggatggggcagcaaggggcatgggggagctgatgagggccacgcggagtggggtagggcttggagtttcagaccatttgtggcatggtcttggacggtctccagcttagagcctcacttcctctccatcaagtatggagaagcagagctgcctggcccaggtgttgctggcccctctcagtggcggggaggctcccagtgatcatcgctctcacctttctggacttgagggcgtgagtttgcccccgggatggaacccaactccttccttggtatttcttcaccccagccagtgtcctggacccccacgcccagggtgtaagatgctcttcatggatgagggcttggatagctctgagcacacagtctaaaaagcccccaaccttgggcagcacccccatcccccacggctgtggccactctttttccctttggctcagatctgtcctggagtggagggtggagagttacgggggtgtgggcgcccccatccctagctctgctggagaaccttatttcccagtggcctgaacgcgaagatgggcgggggccttcccagttctctcattcaagtgctcctcagacccagccctgatgaagttccgaggtcagatgagaccacgtgcattcagggtggtgtggcttcagacccttcccagttctgatacctccagaaggggtgcccttcaggggccctgtgcttccaagcttagaggctcatgctacaagcccctccccaactctttccaccctttaggaagggcctggcatctctgcaataactggtcaggactcagaaagagaaattggcaggattttaatcatttattcattccttcagcgagcggcacttcctgagcagccactgtatgctaggagctggcaggaggcccttgaacactctggactcagtctagtgctagattgatgatcaggccatgacgatgccaggtgtgcatgctgtggagcctggaacaagtgccaagcctggtgggccttctggaggaggtgcctgctacacccagcctggcaggaggcagacgatcaggtgttattaaaaaaaaatttttaggctgggtgtggtggttcatgcctgtaatcccagcacttcgggaggctgagtggggcagatcacttgaggtcaggagatcgagagcaccctggtcaacatggtgaaaccgtctctactaaaaatacaaaaattagctgggcatggtggcaggcgcctgtggtctcagctactcgggaggctgaggcaggagaatcgcttgaacctgggaggcagaggttgcagtgagaagagatcgcaccacggcactccagcctcggcgacagaccgagaccccgtctctgagatggctcactgcagtcttgaactcctgggctcaggggattctccctcctgactcagcctcctgagtagctggggccacactcagatatatatatatatatatatatatatatatatatatatatatatatatatttttttttttttttttttttttttttggtaattttttttaagagatgggatctcgctatgttgctgaggctggtctcgaactcctggctgcacatgatcctctggcctcagcctcccaaattgctgggaatacaggggtgagccaccgtgcctggggaggtgttctttacagactgttcctctgcacagagaaggtacaagaaaggagcccttagcacaacattcaggcccaggtgtcacgcaggtgtcacgtagcattcaggcccaggtgtctgctgggccctcttctgccacttctaacccatgtactggcacctgcactgcaatgatttgggtctatctcactgagagcatgggaagtccctgagtgccgaggctgggactccttcctcattccatttctcagcgcttcacacagggtctgcaaacagtaggcgttctacgatgctgctctgagtagccttccctctccctcaacttgtacctaagtcagagttcatatgggtccatcactttttagctggcagagcaggttcccacatattaatgcatgtggcgctcaccaaagcgctgtgtcaaaagtgtcatcattgtcatcagcatcacctgccagaaaattgcacagcacggtggtctcagcatgtgggctctgtagctggactgctcagattcaagtcctggccttaccacttacgggctgtgtgaccttgaacaagtgtattggcctctctgtgcttccatttccccatctgtaagataggaataacacatctcacaggagcatggagaggctacaggtagagtaagaaaaacactagctaccacatagtcagctcactaatcatggtagttgttaccattctatttatagaagacacagaaggtcaaggtcaaatgacccagctgtccggtggaagagggtttttatctctgagtcgttagacttcaaatctagtgtttgggggttatctcctcgtcccgctgccccatctcccttgtcaccctgtctcctaatttatctgtttatacatctggttgtccttctcaatggggctcttcaaaggcaggggcctgcattaggctggttcacacctgtctccccagtgcctggagcagtgcggggccaccagtgaacttgaaggctgcatggaaggttccaggcgcttgcttcctgctaaggtgttttgctgagcgcctccacatggaggacctcatgggagcctccagaccactccaggagcagggtaaaaattctctacaactgcactgaggtacaacaaactgcacacattttgttgtgatgtacgtatacacccataagcccatcaccacaatcaaaaatgacaaacatttccatcaccactaaaattttgccatgcctctctgttctctctcactccttcccattatagatttatttttatttctttagagatagggtcttgctctgttgcccaggctggagtgcagtggcacagtcacaactcactgcagcctcaaactcctgggctcaaaacgatccacagtctcctgagtagctgggactacaggagcttgttaccacacccagctccagtttataaattcatctccagtttataaaggaggaaaccgaggtactgagaggttaaaaaaccttcctgcagacacttgtccagcaagtggccactccaggatttggaccaaggtgatgtgtcttcaggctgtgtctctgccactgtgccacgctgctgggtggtaggcagcagtgggtgggtgcctgcagtggtctgtaaagaccacctgagatgtccttcctcctctgttccaccctgtccaggtccaagaagacagtctatgaagagagagcaggtgtgactctctcagtgtgctcctctgtgagaagcaggctgacatcccaaagggaagggcggataacagagacagtgcaagcggaggagatgagggtgcctcaaagccgggaggctgggtgatgcaggagcctgcgtgtcccgaggggggtgctgggcccagtgtgagtacgtgtgactgtgactgagacagtgtgactgctgaaggcagggacacagcagctccctgactgggggcagaaggcgttaactgtgtgaaggctggttgtgggtgggtgggctctgggcctcgaacccgggggctgagggagatagtaaacagcagggtgactgacgggaagatcatgttggtagccctgcgaagatgctgcagggctgtgggggtttgtgtgactttgcagttcaacaaattcaaattcagccaacgctggcagggcctgttgtgccaggcaaccagctaggaggaggagactcggacccagcttgcagctgaagggcgctggctgccgggttctgtgggttcaccttgcggtgtcttcccttgctaacactgagtccttacaatagccccatctccaggttgaggctagatggaggggacagagggaagtgacttgcccaaggtgacccaagctcccgagtgccagggcaggatctgaattcaggctctcagactgcagagcctgagtccctccctgccatgcctgtgccagggtggaaatgtctggtcctggaggggagcgtggactcctggccttggctctggagacatccccctagaccacgtgggctcctaacctgtccatggtcactgtgctgaggggcgggacggtgggtcacccctagttcttttttccccagggccagattcatggactgaagggttgctcggctctcagagaccccctaagcgccccgccctggccccaagccctcccccagctcccgcgtcccccccctcctggcgctgactccgggccagaagaggaaaggctgtctccacccacctctcgcactctcccttctcctttataaaggccggaacagctgaaagggtggcaacttctcctcctgcagccgggagcggcctgcctgcctccctgcgcacccgcagcctcccccgctgcctccctagggctcccctccggccgccagcgcccatttttcattccctagatagagatactttgcgcgcacacacatacatacgcgcgcaaaaaggaaaaaaaaaaaaaaaagcccaccctccagcctcgctgcaaagagaaaaccggagcagccgcagctcgcagctcgcagctcgcagcccgcagcccgcagaggacgcccagagcggcgagcgggcgggcagacggaccgacggactcgcgccgcgtccacctgtcggccgggcccagccgagcgcgcagcgggcacgccgcgcgcgcggagcagccgtgcccgccgcccgggccccgcgccagggcgcacacgctcccgcccccctacccggcccgggcgggagtttgcacctctccctgcccgggtgctcgagctgccgttgcaaagccaactttggaaaaagttttttgggggagacttgggccttgaggtgcccagctccgcgctttccgattttgggggcctttccagaaaatgttgcaaaaaagctaagccggcgggcagaggaaaacgcctgtagccggcgagtgaagacgaaccatcgactgccgtgttccttttcctcttggaggttggagtcccctgggcgcccccacacggctagacgcctcggctggttcgcgacgcagccccccggccgtggatgctcactcgggctcgggatccgcccaggtagcggcctcggacccaggtcctgcgcccaggtcctcccctgccccccagcgacggagccggggccgggggcggcggcgcccgggggccatgcgggtgagccgcggctgcagaggcctgagcgcctgatcgccgcggacccgagccgagcccacccccctccccagccccccaccctggccgcgggggcggcgcgctcgatctacgcgtccggggccccgcggggccgggcccggagtcggcatgaatcgctgctgggcgctcttcctgtctctctgctgctacctgcgtctggtcagcgccgaggtgagttgccacggcggctggggctggttcttcattcattaccttcgccccccccttctgaccgccccctcctctccctgcagtgaactttggacccttgcagcccgcgagcctgacgccgggcgctgggtgacctcttcgggctgggagcgaggtccgggggtgacaggctctaagggaaggcaacagcggtggctttctttccaaccggcgggcgaatctggctccctaagccgttccgtgtcgggggagggtgtgtgtggccctgtcccccaccctttgggaacccgaga

SEQ ID NO: 2217 - DNA, 6000 bp, Homo sapiens
gcggcctcccaaagtgctgggattacaggtgtgagccaccgctccgggcctaatttttgtatttttaatagagacagggtttcaccatcttggccaggcttgtcttgaactcctgacctcaggtgatccacctgccttggcttcccacagtgctgggattacaggcgtgatctatttttcttttcttttttttgaaacagggtcttactctgtcgcccaggttggagtgcagtggtatgatctctcagctcactacaacctccacctcctgggttcaagcaattcttgtaccttggcctccggagtagctgggattacaggtgtgtgccaccatgtccagctaacttttttgtatttttagtagagacggagttttgctatgtgggccaggctggtctcaaactcctgacctctagtgatctgcccgcctcagcttccaaaatgctggcattacatgcgtgagccaccatacccagcttcaattctgctgttctgaagccatcttaagagtcaccttgattgtctttgtgtgatccatattttcttgccatcagccacttccaacatggccaatttcaggttcagggtcctggggaaaggccagaggagcacatctcaagaagatgccccaagcatcagagttctgcatgtacagcagagccgggggccatggcctctgatttcttttggttgaattttctcatgggatgttcctcagatctccttcaatccacttcttatatctagtcctacagtatttttggccaggtgggcaaggtatgtttgaatgctgctttgattcaagctggatcctgtgtaaaactaagcaaatctttttcctaaagtttacagaaactctttaaaaagaaaaaaaaaaaagctgggtgcggtggctcacgcctataatcccagcactttgagagtccaaggcaggcggatcacgaggtcaggagttcgagaccagcccagtcaacatggtgaaaccccatctctactaaagatacaaaaaattagccagcgtggtggcgcaagcctgtaatccaagctattcgggaggctgagacagcagaattgcttaaacctggtaggcggaggttgcagtgacccgagatcgcaccactgcactccagcctgggtgacagggcgagactctgtctcaaaaaaaaaaagaaaagaaaagaaaagaaaagaaaaagaggccaggctcggtggctcatgtctgtaatccctgctactagggatactagggaggctgagtcaggagaattgcttgaacctgggaagcagaggctgcagtgagccaagatcatgccactgcactccagcctgggcaacagagtgagactctgtctcataagaaaaaaaagaaactcttaaaaaaaaaaaaaccagctggggccaggtacagtggctcattcctgtaacagcactttgggaggccaaggtgtgtggatcaactgaggtgaggagtttgagaccagcctggcatggtgaaaccccgtctctactaaaaatacacaaaattagctgggtccgtggtggtgcatgcctgtaatcccagctaccagggaggctgaggcggaagaatcacttaaacctgggaggcagaggttgcagtgagcggagatcatgccactgcactacagcttgggtgacagagcaaggctctgtctcaaaaaaacaagaaaacaaacaaacaaaaacaggccgggtgcagtggctcacgcctgtcatcccagcactttgggaggccaaggcgggcagatcacgaggtcaacagatctaaaccatcctgaccaaaatggtgaaaccccatctctactaaaaatacaaaaattagctggatgtggtggcgcacacctgtagtcccagctactcgggaggctgaggcaggagaatcacttgaacccaggaggcagaggttgcagtgagctgagatggcgccattgcactccaacctggcaacagagccagactccgtctcaaaaaaaaaaacaaaaaaaaaaaactgggcaagcaatctcccaccaggaaatgacagagcaagtttccaggtgtcctccacatttctcatttctttgctttgttttttaaaatatttatttatttattttaagagacaggatctctcactctattgcccaggctgtagtgcagtggcatgattacacctcactgcagcctcgacttcccaggctgaagtgattctcccatttcagtatctggagtagctggactacaggtgctgtgtacaccaccgcgcctaagtaattttttttttttaacttttgtagagatggggaataggggggtctctttatgtttgctgggctcaagcgatcctcccaccctcgtctcctgaaacgttgggattacaggcatgagacactgtgcccgaccaacattctttcctttgtactccttagtctgaatatgggtataaactattaaaaataacaaaattatccctgaaggccaatcttgatctcactcctacacattgaattcatcctgtaacaactttaagataaagaagttctgtccttttcaatttgcctgctttttttttttttttgagacggagtctcgctctttcgcccaggccagagtgcagtggcgcgatctcggctcactgcaagctccacctcccgggttcacgccattctcctgcctcagcctcccgagtagctgggactacaggtgcccgccaccgtgcccggctaattttttgtatttttagtagagacggggtttcaccgtgttaaccaggatggtctcgatctcctgacctcgtgatccgcccgccttggcctcccaaagtgctgggattacaggcgtgagccaccgcacctggcctttttttttttttttgagacagagtctcgctctgtcgcacaggctggagtgcagtgggcgatctctgctcactgcaggctctgcctcccaggttcacgccattctcctgcctcagcctcccgagtagctaggactacaggtgcccgccaccacgcccagctaatttttttgtgtgtgtttttagtagagacggggtttcaccgtgttggccaggatggtctcaatctcctgacctcctgatccgccctcctcggcctcccaaagtgctgggattacaagcgtgagccaccacgcccggttcaatttgcctgcttttctactgcagtttgggtgatctaggcctgatcattagaggacagattccatccctgtcagcaacttcaattgctccattaggatcttcactcttatgttcttatttattcatcccaacattaatttaaaaaacaaacagaaacaatataaaaaaaaaaacaaagaaaatccaacaatttgcaaataccagctacggagcatgagatatgaaataaaagaaaaaaaatttttttttctttgggacagagttttgctcttgtcgcccaggctggagtgcaatggcacaatctcagctcactgcaacctccgcttcccgggtttaagagattctcctacctcagcctcccaagtagctaggattacaggcgtgcaccaccacacccggacaagttttgtatttttagtagaaacggggtttcaccatgttggccaggcttgtctcgaactcctgacctcaggtgatccactggcctcggcctcacaaagtgctgggattacaggcgtgagccaccgtgcctggccgagaaaaagcttttaaccgtatcagtagatactggtttcggggtttctttcggggtcacttacacccctgccacctcctccagtaccaatttacccatggccaaacacagggtgatgtgtaggaacctgaaagcacgtctccgacctcagctgcaaaactgtggagtcccacacactagactttatattccagcatttcctctcaccattacatttttgcttttttccatccttacattacctttaccacatttttgtttttcccataattacattagataaggcaatggctagacgtggtcttttactaacttgttctattgggagcggacgagaaaaaaaaaaaagacaaaccctagaaatgtcttcaggtcccagccatgtttaggaaaatacttgaaggcttctgcggtgagagtgctacctggtaagggcgtatggacacacgtggagggcaagaaatgaatttgggtctggtgccgaaacatctttccactgctgtgattttgttttctggtcagagtaataatgctcgttgtaaaataaataaataaataatacataaaaaggaaaaggaaaattcagagaaaatgaaaacaactcgtaatcaacgtgctttttggatgtgaactgctccctttgggagggcaatggagaagtgaggacgcactgggtatctggcccggaacagccggcagtgggtacaccctgcctggtgaattcgaccggggttttgggggacccgccacccaagggccgaagagcagggccgccctacgggcgctcccatttggccacctgagtggcgacttggcgccttcctcggagcagctccggggttccgtcgtcccggttcccactggtcccttacgcagagaccaaaggcaggaaccttccctcgtaactatccaccgactgaaaatagattctgagtccgcccccgcccctccccccttaaaatcctccccactcttaaaatcctcccctttaaagggagccacagggtgacgccgggggagtttgcggaagcgctaaccgcgttggggcctagggcggatcccgtgattgggacaggccccgcccccggctccacttcccccattgtgtgagcggctcgggcctaggccccgcccccctccggaggcccggccactccccttttccacccccccttggctcatttccggccgccgccgctaccgctagcctgtaaggaggattcggcagagggaagaaacaacagccgccatcttgtttgtgtgctaggctgggggggagagagggcgagagagagcgggcgagagtgggcaagcaggacgccgggctgagtgctaactgcgggagccagagagtgcggaggggagtcgggtcggagagaggcggcaggggccgagacagtggcagggggcccggggcgcacgggctgaggcgacccccagccccctcccgtccgcacacacccccaccgcggtccagcagccgggccggcgtcgacgcctaggggggaccattacataaccccgcgccccgcggcgtcttctcccgccgccgcgggcggccccgaacggagccccggggggcgggcgctcccagcacctggccgccggcggtgggggccgtagcagcggccgtatttatttattttccgcgggaaaggaaggcgaaggaggggagcgcggcgcgaggaggggccgcctgcgccgccgccggagcggggcctcctcggtgggctccgcgtcggcgcgggcgtgcgggcggcgctgctcggcccggccccctcggccctctggtccggccagctccgctcccggcgtccttgccgcgcctccgccggccgccgcgcgatgtgaggcggcggcgccagcctggctctcggctcgggcgagttctctgcggccattaggggccggtgcggcggcggcggcgcggagcgcggcggcaggaggagggttcggagggtgggggcgcaggcccgggagggggcaccgggaggaggtgagtgtctcttgtcgcctcctcctctccccccttttcgcccccgcctccttgtggcgatgagaaggaggaggacagcgccgaggaggaagaggttgatggcggcggcggagctccgagagacctcggctgggcaggggccggccgtggcgggccggggactgcgcctctagagccgcgagttctcgggaattcgccgcagcggacgcgctcggcgaatttgtgctcttgtgccctcctccgggcttgggcccaggcccggcccctcgcacttgcccttaccttttctatcgagtccgcatccctctccag

SEQ ID NO: 2218 - DNA, 6000 bp, Homo sapiens
agaccagcccagtcaacatggtgaaaccccatctctactaaagatacaaaaaattagccagcgtggtggcgcaagcctgtaatccaagctattcgggaggctgagacagcagaattgcttaaacctggtaggcggaggttgcagtgacccgagatcgcaccactgcactccagcctgggtgacagggcgagactctgtctcaaaaaaaaaaagaaaagaaaagaaaagaaaagaaaaagaggccaggctcggtggctcatgtctgtaatccctgctactagggatactagggaggctgagtcaggagaattgcttgaacctgggaagcagaggctgcagtgagccaagatcatgccactgcactccagcctgggcaacagagtgagactctgtctcataagaaaaaaaagaaactcttaaaaaaaaaaaaaccagctggggccaggtacagtggctcattcctgtaacagcactttgggaggccaaggtgtgtggatcaactgaggtgaggagtttgagaccagcctggcatggtgaaaccccgtctctactaaaaatacacaaaattagctgggtccgtggtggtgcatgcctgtaatcccagctaccagggaggctgaggcggaagaatcacttaaacctgggaggcagaggttgcagtgagcggagatcatgccactgcactacagcttgggtgacagagcaaggctctgtctcaaaaaaacaagaaaacaaacaaacaaaaacaggccgggtgcagtggctcacgcctgtcatcccagcactttgggaggccaaggcgggcagatcacgaggtcaacagatctaaaccatcctgaccaaaatggtgaaaccccatctctactaaaaatacaaaaattagctggatgtggtggcgcacacctgtagtcccagctactcgggaggctgaggcaggagaatcacttgaacccaggaggcagaggttgcagtgagctgagatggcgccattgcactccaacctggcaacagagccagactccgtctcaaaaaaaaaaacaaaaaaaaaaaactgggcaagcaatctcccaccaggaaatgacagagcaagtttccaggtgtcctccacatttctcatttctttgctttgttttttaaaatatttatttatttattttaagagacaggatctctcactctattgcccaggctgtagtgcagtggcatgattacacctcactgcagcctcgacttcccaggctgaagtgattctcccatttcagtatctggagtagctggactacaggtgctgtgtacaccaccgcgcctaagtaattttttttttttaacttttgtagagatggggaataggggggtctctttatgtttgctgggctcaagcgatcctcccaccctcgtctcctgaaacgttgggattacaggcatgagacactgtgcccgaccaacattctttcctttgtactccttagtctgaatatgggtataaactattaaaaataacaaaattatccctgaaggccaatcttgatctcactcctacacattgaattcatcctgtaacaactttaagataaagaagttctgtccttttcaatttgcctgctttttttttttttttgagacggagtctcgctctttcgcccaggccagagtgcagtggcgcgatctcggctcactgcaagctccacctcccgggttcacgccattctcctgcctcagcctcccgagtagctgggactacaggtgcccgccaccgtgcccggctaattttttgtatttttagtagagacggggtttcaccgtgttaaccaggatggtctcgatctcctgacctcgtgatccgcccgccttggcctcccaaagtgctgggattacaggcgtgagccaccgcacctggcctttttttttttttttgagacagagtctcgctctgtcgcacaggctggagtgcagtgggcgatctctgctcactgcaggctctgcctcccaggttcacgccattctcctgcctcagcctcccgagtagctaggactacaggtgcccgccaccacgcccagctaatttttttgtgtgtgtttttagtagagacggggtttcaccgtgttggccaggatggtctcaatctcctgacctcctgatccgccctcctcggcctcccaaagtgctgggattacaagcgtgagccaccacgcccggttcaatttgcctgcttttctactgcagtttgggtgatctaggcctgatcattagaggacagattccatccctgtcagcaacttcaattgctccattaggatcttcactcttatgttcttatttattcatcccaacattaatttaaaaaacaaacagaaacaatataaaaaaaaaaacaaagaaaatccaacaatttgcaaataccagctacggagcatgagatatgaaataaaagaaaaaaaatttttttttctttgggacagagttttgctcttgtcgcccaggctggagtgcaatggcacaatctcagctcactgcaacctccgcttcccgggtttaagagattctcctacctcagcctcccaagtagctaggattacaggcgtgcaccaccacacccggacaagttttgtatttttagtagaaacggggtttcaccatgttggccaggcttgtctcgaactcctgacctcaggtgatccactggcctcggcctcacaaagtgctgggattacaggcgtgagccaccgtgcctggccgagaaaaagcttttaaccgtatcagtagatactggtttcggggtttctttcggggtcacttacacccctgccacctcctccagtaccaatttacccatggccaaacacagggtgatgtgtaggaacctgaaagcacgtctccgacctcagctgcaaaactgtggagtcccacacactagactttatattccagcatttcctctcaccattacatttttgcttttttccatccttacattacctttaccacatttttgtttttcccataattacattagataaggcaatggctagacgtggtcttttactaacttgttctattgggagcggacgagaaaaaaaaaaaagacaaaccctagaaatgtcttcaggtcccagccatgtttaggaaaatacttgaaggcttctgcggtgagagtgctacctggtaagggcgtatggacacacgtggagggcaagaaatgaatttgggtctggtgccgaaacatctttccactgctgtgattttgttttctggtcagagtaataatgctcgttgtaaaataaataaataaataatacataaaaaggaaaaggaaaattcagagaaaatgaaaacaactcgtaatcaacgtgctttttggatgtgaactgctccctttgggagggcaatggagaagtgaggacgcactgggtatctggcccggaacagccggcagtgggtacaccctgcctggtgaattcgaccggggttttgggggacccgccacccaagggccgaagagcagggccgccctacgggcgctcccatttggccacctgagtggcgacttggcgccttcctcggagcagctccggggttccgtcgtcccggttcccactggtcccttacgcagagaccaaaggcaggaaccttccctcgtaactatccaccgactgaaaatagattctgagtccgcccccgcccctccccccttaaaatcctccccactcttaaaatcctcccctttaaagggagccacagggtgacgccgggggagtttgcggaagcgctaaccgcgttggggcctagggcggatcccgtgattgggacaggccccgcccccggctccacttcccccattgtgtgagcggctcgggcctaggccccgcccccctccggaggcccggccactccccttttccacccccccttggctcatttccggccgccgccgctaccgctagcctgtaaggaggattcggcagagggaagaaacaacagccgccatcttgtttgtgtgctaggctgggggggagagagggcgagagagagcgggcgagagtgggcaagcaggacgccgggctgagtgctaactgcgggagccagagagtgcggaggggagtcgggtcggagagaggcggcaggggccgagacagtggcagggggcccggggcgcacgggctgaggcgacccccagccccctcccgtccgcacacacccccaccgcggtccagcagccgggccggcgtcgacgcctaggggggaccattacataaccccgcgccccgcggcgtcttctcccgccgccgcgggcggccccgaacggagccccggggggcgggcgctcccagcacctggccgccggcggtgggggccgtagcagcggccgtatttatttattttccgcgggaaaggaaggcgaaggaggggagcgcggcgcgaggaggggccgcctgcgccgccgccggagcggggcctcctcggtgggctccgcgtcggcgcgggcgtgcgggcggcgctgctcggcccggccccctcggccctctggtccggccagctccgctcccggcgtccttgccgcgcctccgccggccgccgcgcgatgtgaggcggcggcgccagcctggctctcggctcgggcgagttctctgcggccattaggggccggtgcggcggcggcggcgcggagcgcggcggcaggaggagggttcggagggtgggggcgcaggcccgggagggggcaccgggaggaggtgagtgtctcttgtcgcctcctcctctccccccttttcgcccccgcctccttgtggcgatgagaaggaggaggacagcgccgaggaggaagaggttgatggcggcggcggagctccgagagacctcggctgggcaggggccggccgtggcgggccggggactgcgcctctagagccgcgagttctcgggaattcgccgcagcggacgcgctcggcgaatttgtgctcttgtgccctcctccgggcttgggcccaggcccggcccctcgcacttgcccttaccttttctatcgagtccgcatccctctccagccactgcgacccggcgaagagaaaaaggaacttcccccaccccctcgggtgccgtcggagccccccagcccacccctgggtgcggcgcggggaccccgggccgaagaagagatttcctgaggattctggttttcctcgcttgtatctccgaaagaattaaaaatggccgagaatgtggtggaaccggggccgccttcagccaagcggcctaaactctcatctccggccctctcggcgtccgccagcgatggcacaggttagtttcggcagccccggccttccacgttccctttaatcttttctactcggtgcgcctttattcttccattttttttttcttcctctctctctagttccctgccccttaattaattttaaaggtatttgaatgagctggtcgaagacgtccagtagcccaaccattttctttgcctcctaatacattgattgcaacactatgtcatatcggtgtgtgttctggaattagagctcgtaagtgggtgctatatagaaatggcctgtattgttgctctcatgcaatttaatttgggaaatgccaatgcatttgtgtgtaagagctcctatgcaatttaagtttcattttttttgttcttggcaaatgaatttcgaatcctttctctttactgtacttactgtgtttcctctactttccactcttcgaaattttctctcctttgcagaatattttctgttgaggaatagggtgtaaaaaaatcttgattttgtgtgtgcgaggtccaagatttcaggttagaggtgaagtttaacaattcttttatcttacctaccattcttagcttttttttcctttttcttcttatttgctttaagaatcaatatggagcgcagttcatttcacatctcccagttctttggtgtgagaccaaaatgtctgaaactctgggtttttaggttgggagaacaggggcatgttct

SEQ ID NO: 2219 - DNA, 6000 bp, Homo sapiens
aggggccatggcatgcatgatggtgctaccaccctgacgttgatcctggcaggataattgccacttggttatataaaggcagataagctccctgtttttgtgggtagaagaaatagaaaaccggaaatattgactttaggccaggccttttcactatttatttttctaaatactccctggcttacggcttaggtataaagtctctgccagctttcaagacattttaagctttcatgtttcttgtcagccatgattattctgtataatcaatgctttaaaagaacatagaaattcctatatgtacatgcatgttttcacaggatatttttaaacaagctactgaagatagattaacaagtgcaaaggaattgccttatttcgagggtgatttctggcccaatgttctggaagaaagcattaaggaactggaacaggaggaagaagagagaaaacgagaggaaaacaccagcaatgaaagcacagatgtaagggcattgagtttcctttgaaacttctatcatgattctaatatttaatccagaagtgcacttaaactttcaattgggttttaaagctttcaggtgtaaaagagctctttaagttggacaagaaatattggcttagagaggttattagggttctgtttcagtggtattaaacttttaaagcatcagagccccttttaaaatggcatctcagactttgagtaatgtgaaatgataaaagaaactgaaggaaatcctgaaaaactgatagaagattacttatctgaaggactaggttatgaatattataggccttgtgggtcacatatctctggcatattttctgtcttttaaaaacacactctttttaaatgtaaaaaaccattcttagctatacaaaataggcctgagccagaatttaagttactaagcctggcttagtaacctcaccagttatttccccatagcatatctcgaattacctccattgaatttaacttaacaaaaggcacccttaaatagtctgttaacaaactcttacagccttgtcatttagtatttgtaggctcataacattttagaatatgagtggaaggaaataaaaccaaggtcttctggctccccactttgatacactcttcactaccccaaagtgccaccccttccttgttccctagccccaatctgggatacattcaatcaatctacagggtctgcacattctgtggcctcttctaggcaaaaagctaaagggctgccattgccttaaagatcactgggagaaaattaggtcaaataacaactttaaggagaaagaataagtgaagagaacagctagtaaaataagttacaggcataagattatgatatctagtttcaaagaagggagatattctgtgctattcccaaattacttaacaaaaaccttattttcttgtctcctttgtgctactctgcaggtgaccaagggagacagcaaaaatgctaaaaagaagaataataagaaaaccagcaaaaataagagcagcctgagtaggggcaacaagaagaaacccgggatgcccaatgtatctaacgacctctcacagaaactatatgccaccatggagaagcataaagaggtaagatgcagccacccagagttggggaaaaacggcaagatttctggccaggcatggtggctcacacctgtaatcccagcactttgggaggccaaggcgggtggatcacctgaggtcaggagttcaagaccagcctgaccaacacggtgaaaccttgctctactaaaaatacaaaattagctgggcatggtggcacatgcctgtaatcccagctactcaggaggctgaggcaggagaattgcttgaacctgagaagcggagattgcagtgagccgaggtcactccattgcactccagcctgggcaacaagagcgaaactccacctcagaaaaagaaataagaaatgaataaaaacactgactgttcgctgggcgtggtggctcatgcctgtaatcccagcactttggaggttgaggcaggcggatcacttgaggtcaggagttggagaccagcctggccaacatggcgaaccgaaaccccgtctctactaaaaatacaaaaattagcctggcgtggtggcacacacctgtaatccttgggatgctggggtgggaggatcacttgaacctgggaggcagaggttgcagtgcacttacagcctgggtgacagaacgagactctgtttcaaaaaataaaaagatttaacctttctgaaagtgaattagtaaatagaattggagaaaagttaaacttccacatatggacttacaacccccttctcaaaactttttgagttatttcatcatttacattgtttagttgttcttgcagtcatttgggaaaataactgggtaaggttttttttttctctctttaatatcatataattgataacgaaagccaggagaattgaagagtaattcctctcagggtttgtccaatggtagtaatctcgattgttcagtcagactcctcattttactatctcggttctcagacatataatcaagttcttataggaagtggtaattaagttgagagggaaatgaaggcttgatttcaggttgtaattccgtacctaaaaattggttaaacagtctctttgggagagaaatagttaacaaaatcttttttagagaggaatttgttataatgatgttatcatggtgaacacctatatacataggtgttcaaagtatcttttcccccactgctccccccatcaccaccccttttttgttagcctagaataatgggctacgatgtaataatggtaataaccattatctcagccatgctagtgaaatggaaggattcctgagttctaatacgttaggtaatgattattaacaattaatagttactagctatttcaagcagtaagtaatgccacagaatcctaggcagttgggaaaagcccttagaatatattgtaataggtttgacttaaattgtggacacattccatggctgtttaaatttaggttgtaaatccaagtattggcctggttgtagggtgacagaagcagcgaacattgctggccagagactgtgagtgtggctgccagtgtgcacagatgttgaataatctgttatcagtacagcagtttctcacaagttcctaatttcttaaggggatgttttacattttattactttaataggtgtttatagttatatactaattaatgtcaaatacatatgtaataccagctttttataccttttacactaatggttatgagaattgatggttgttacaagttttttcaaacttcaatgaacaagaattttattgctttgtcaacaaagactaagattttttatccattccattcccttccaaacctgtaggaaaagttacacaggaaagttgcataggggaccttcatgagtccaggccagttgtttttcatactgtctccatatttggatttgtctggtttgttgtaattagattgaggttaaaccatggattgcatcttaaagtagactgccttgaggcaaaatgtccactgtgcatggtgctatacctcacccagaccattgttactctgaaggagttactgaatgaaggagaaaaaaatcacaggatgtgcatttcagttctatttatagtcagtctcaagagaccaaagaggtaaagcaggaaaaggaacaggaggcgtatggtggtgaaactaactcagcattcgccagtctcattggtgctcagcctgctgtacctgctcacacctgtaatcccagcactctgggaggctgaggcaggcagatcacttgagcttaggagtttgagaccagcctgggcaacatggcgaagcctcgtctctacaaaaaatgcagaaattagccaggtgtggtggtgtgggcctgtggtctcagctattcaggaggccatggtgggataattgcttgagcccaggaggcagaggttgtagtgagccaagatcacgccactgcattccagcctggatgacagagcgaggccctgtctcaaaaaaaagagactgtctgtttttcaggtcttctttgtgatccgcctcattgctggccctgctgccaactccctgcctcccattgttgatcctgatcctctcatcccctgcgatctgatggatggtcgggatgcgtttctcacgctggcaagggacaagcacctggagttctcttcactccgaagagcccagtggtccaccatgtgcatgctggtggagctgcacacgcagagccaggaccgctttgtctacacctgcaatgaatgcaagcaccatgtggagacacgctggcactgtactgtctgtgaggtaggcaccgggttgtgggaaggaggaggtgagctccgcagggttgttctgaggggccatgcagccacgtattttatagaggcctgtgggatgctaggggcttggcctcgtgtttgaggggcagagctgaagaggctagtttttgttctacgaaaggggcttttctagcccaaacaatatctaaaatacttttgaatgacttaaatcttggagagtttacgtgcacctcctgttttttccctaggattatgacttgtgtatcacctgctataacactaaaaaccatgaccacaaaatggagaaactaggccttggcttagatgatgagagcaacaaccagcaggctgcagccacccagagcccaggcgattctcgccgcctgagtatccagcgctgcatccagtctctggtccatgcttgccagtgtcggaatgccaattgctcactgccatcctgccagaagatgaagcgggttgtgcagcataccaagggttgcaaacggaaaaccaatggcgggtgccccatctgcaagcagctcattgccctctgctgctaccatgccaagcactgccaggagaacaaatgcccggtgccgttctgcctaaacatcaagcagaagctccggcagcaacagctgcagcaccgactacagcaggcccaaatgcttcgcaggaggatggccagcatgcagcggactggtgtggttgggcagcaacagggcctcccttcccccactcctgccactccaacgacaccaactggccaacagccaaccaccccgcagacgccccagcccacttctcagcctcagcctacccctcccaatagcatgccaccctacttgcccaggactcaagctgctggccctgtgtcccagggtaaggcagcaggccaggtgacccctccaacccctcctcagactgctcagccaccccttccagggcccccacctgcagcagtggaaatggcaatgcagattcagagagcagcggagacgcagcgccagatggcccacgtgcaaatttttcaaaggccaatccaacaccagatgcccccgatgactcccatggcccccatgggtatgaacccacctcccatgaccagaggtcccagtgggcatttggagccagggatgggaccgacagggatgcagcaacagccaccctggagccaaggaggattgcctcagccccagcaactacagtctgggatgccaaggccagccatgatgtcagtggcccagcatggtcaacctttgaacatggctccacaaccaggattgggccaggtaggtatcagcccactcaaaccaggcactgtgtctcaacaagccttacaaaaccttttgcggactctcaggtctcccagctctcccctgcagcagcaacaggtgcttagtatccttcacgccaacccccagctgttggctgcattcatcaagcagcgggctgccaagtatgccaactctaatccacaacccatccctgggcagcctggcatgccccaggggcagccagggctacagccacctaccatgccaggtcagcagggggtccactccaatccagccatgcagaacatgaatccaatgcaggcgggcgttcagagggctggcctgccccagcagcaaccacagcagcaactccagcc

SEQ ID NO: 2220 - DNA, 6000 bp, Homo sapiens
aaaaaaatgaggctggacatggtggctcaggcctgtaaacctaccactttgggaggttgaagcaggtggatcacttgaggccaggagttcaagagcagcctggccaacgtgatgaaaccccgtgtgtactaaaaatacaaaaattagccaggtgtggtggtgcatgcctgtaattccagctactcagtaggctgaggtgggagaattgtttgaacgtaggaggcagaggttgcagtgagtcgagatcacgccactgcattccagcctgggtgacagagacttcatgtcaaaaaaaaaaaaaaaaagccaggtgtggtggtacatgcctgtagtcccagctacttggaggctgaagtgggaggatcacctgagcccagggaggtggaggctgcagtgagctgtgatcctgcaccctagcttgggtgacagagtgagaccctgtctcaaaaaaagaaaaagaggccaggcgcggtggctcatgcctgtaatcccagcactttgggaggctgaggtgggtggatcacgaagtcagcagttcgagaccatcctggccaacatggggaaaccccgtctctactgaaaaaaaaaaaaattagccaggagtggtggtgcacgcctgtaatcccagctacttgggagactgaggcaggagaatcgcttgaaccggggaggcagaggttgcagtgagccgagaccgtgccattgcactccagcctgggcgacagagcaagactccgtctcaaaaaaaaaaaaaaaaagaaagaaaaagaaaaaaatagacatttgaagaaacttagagatgaagtctgtgttggaggctgggaaaagagggaaaccagggtattctgagtcctgagtgttcttgtggagggtttgggagaggcatagttgtggtacctctgctgactcccatgtgaccttctctgttcctcagaactgaaatgagggttaactagattcagccactgtcatgctgctccagattgacccagtgagtcttctctgatacattcaccccagaaatctttttctgaggatttagtcccaaaaatgccccttaaggccgtgtgtgttggctcatgcctgtaatcccagcactttgggagaccaaggcaggcggaacactttaggttaggagtttgagaccagcctggccaacatggtgaaaccccatctccactaaaaatacaaaaactagccaggcgtggtgacgggcacctatagtcccagccattcaggaggccaaggcacgagaatcacttgaacctgggaggtggaggttgcagtgagccaagatcacgccactgcagtccagcctgggcgatagaacgagactcagtctccacatacatacatacatacatacatacatacatacatacatacatacatacgtaaaattaaattaaattaaatgccccttaagagccatgggcccaggcctgagaattacagggaaatgtgttggggcaggtgtttagaaaactcaaaatccccaagcctgaaattagcacctggatacttcaagctggatccagaaaggatttgaatcaaaatccagccccaagtctttcataggacagaagatgcccttgacagttcatggagcagtcatgtctctttgcttagctcagcagcacagccttgcccagaggtctggctaggaacatgttctggctctgcctcctctcagagatggctctttcagttcagtttctcccccagcatgagccccggagctgcccttttggagaaaatgagattaggatcactggctctcaggacctcacagatcatcttcctgagacatgaggctggcccaggccaagggaataaacctttttgacctcagtgggatctggctgtgagagaatcccaaaataacaatctggtgtttatcttgggctgccttctctccggggatctcaaaacacttgataaatctgatctgctgccgaggacaggtggtcagacagtccctgggagactgagtgatgatgggtccctaccggaggctgcagggtgatggaaaatttctttcctctgccaccctcatcacttacattctcaccagaaactacagagattccccctccttttctctgcttccctgtggcagccccgagtcagcagttcccttgttggtccacatctctgattgtgacaggtcttgcctttttcctggggctcatgctcttgtcttatgtcttattcctttttttttttttttttttttttttttttttgagacagagtttcgctcttgttgcccaggctggagtacaatggtgcgatctcggctcaccacaacctccgcctcctgggttcaagcgattctcctacctcaacctcccgggtagctgggattacaggcatgcaccaccatgctcggctaattttttgtatttttagtagagacagggtttctccatgttggtcaggctggtctcgaactcccgacctcaggtgatccacccgcctcagcctcccaaagtgctgggattacaggcatgagccactgcacctggccggagttcttaaatcagttctgcaaacctggactgaaccagacagcatacacacccatggggcccatgatgacagatggatgtgactggagtccaggcccccagtgaagaattggcagtgctctttcctgttcagtgacctgtatcccttttcatttaaggaggacaaccaaatattttaaacttacatcttagtctgtgacagtttgggggcacgacttcaccaagatattgcagagacagcaagagacttcttcttcacctgatttagggacttgatttttttagtgtcattcatacagtgacctgaattctcaagatggtggaaaacacagcttccctatttctttagaattactttaaaatagtagcttttttttttttttttttttttttttttgagatggagtctcactctgtcgccaggctggagtacagtggcatgatctcggctcactgcaacctctgcctcctgggttgaagcaattctcctgcctcagcctcccaagtagctgagactacaggcatgcgccactatgcccagctaatttttgtatttttagtagagatggggcttcatcatgttggccaggatggtcttgatttcttgacctcgtgatctacctgcctcagcctcccaaagtgctgggcttacaggcatcagccaccgcgcccggccaatagtagctaactttatcaattaccttttaattgccaggtacactgtgaggcagtttatatccttgaactaccttaacttcatgatggcctcatgttactaatgaggaaactggggcccacagtcagacatgagccactggtggggcagaaataggctcctggttctgtgtgatccaaagttggtgcttttctgtctatccctagctgttggtcaccaccagctttctgcatattttctcacggtgcctctcatttcccagagccgcctggagcccaaggctgtacacgtgccctgtgctgattctctgcctaggaaaggaccatgcagctagagatcaaagtggccctgaacttcatcatctcctacttgtacaacaagctgccccggcgccgggcagacctgtttggggaggagctagagcggcttttgaaaaagaaatatgaaggccactggtaccctgagaagccactgaaaggctctggcttccgctgtgttcacattggggagatggtggaccccgtggtggagctggccgccaagcggagtggcctggcggtggaagatgtgcgggccaatgtgcctgaggagctgagtgtctggattgatccctttgaggtgtcctaccagattggtgagaagggagctgtgaaagtgctgtacctggatgacagtgagggttgcggtgccccagagctggacaaggagatcaagagcagcttcaaccctgacgcccaggtgttcgtgcccattggcagccaggacagctccctgtccaactccccatcgccatcctttggccagtcacccagccctaccttcattccccgctccgctcagcccatcaccttcaccaccgcctccttcgctgccaccaaatttggctccactaagatgaagaaggggggcggggcagcaagtggtgggggtgtagccagcagtggggcgggtggccagcagccaccacagcagcctcgcatggcccgctcacccaccaacagcctgctgaagcacaagagcctctctctgtctatgcattcactgaacttcatcacggccaacccggcccctcagtcccagctctcacccaatgccaaggagttcgtgtacaacggtggtggctcacccagcctcttctttgatgcggccgatggccagggcagcggcaccccaggcccgtttggaggcagtggggctggcacctgcaacagcagcagctttgacatggcccaggtatttggaggtggtgccaacagcctcttcctggagaagacaccctttgtggaaggcctcagctacaacctgaacaccatgcagtatcccagccagcagttccagcccgtggtgctggccaactgaccatctacctgcccgtggggccaggagcacccaagaccacagaaaagagaaaggaaaggccaaaaaaaagaggaaaagaaaaatgtacaaaaagattttcgatcttctcactcttacttctagaaaaaagatccagcccaggcacggaatgggagggccctgcaaagcacccaagtgtgtttcactcaccccttaccgctcgcccaccggcctgtgatttatttggttggtttgggttttatatttctttttcttttttttttttcttacatgtagttttctatataacatctttaatgagtggcttcctgtgctaagaatggtccagatgtgaactgctgctccctgctcctcccttcctccttcacactcctagtttaggattgatgtgtccaagctcatagggaagaaagagctgcagctggagcctgaccctccctggaacagggagaggctggcccgtgtcactgcctctgtcacccagctatcctcgcactcaaagccatccaacctcagcaggccttctcgggccctgccacctgaataggtctgaccccagtccccactccctttcaggctgggccacagggagttgctggctggccacttgacaccctccccctggagctgatgtctgtgactacagggagattagcacttcgtctagtgaaactcctttcatctctgtcctatggccccaccccaccattccctctaggcccagaccatcatcatggccctggccattgatgtgtatgggctttctttccctcatgcagccccttcttccccaggctggatgttgtgggtagggaggggtgtgtgtgtgtgtatttggtttgctgtccttttttaaaggattccaagccatgtgaaacttcccttctggatgtgattctgggtcgcaagtccttatttatatgtgaggctggggaatgggctgggggtattggcagtccttttgcagggcagtgtgtgtggtggggtgacaccgctgtggcttagcccaagacactcccagaggaaaacactgcagaaggaactggtttgcagactgtggaaggatctgcagttttgtttttgaccaaaaaaataataataagttagctctgaagggcagagggaatacccaagcccctgatgcctatgagaagtccctggacttcaaccctcctgttgtttggccttagcccagagggagctgctcacctgagcacccttgggggtgggcagagaggcagggtgggattttagagttagtgtctgtgcgggggcagccctgagcctggagttgagactttggggtctcttagtttggaggtgttgagtgcatttgtgcccctgcctggttgagagcttcttggtacctcttgccaccccttctcactgccctgacccaaccccactggaccttgatgctgcgaggagtggtgt

SEQ ID NO: 2221 - DNA, 6000 bp, Homo sapiens
tacggagtagtgggattataggcacccgcaatcatgctgggctaatttttatggggttttttcttttcttttttttttttttgagaaaaatcactcttgcccaggctggagtgcagtggcgcaatcttggctcactgcaacctccgcctcctgggttcaagcaattctcctgcctcagcctcctgagtagctgaggttacaggcgtgtgccaccacacccggctaattttttatttttagtagagacggggtttcaccatgttggtcaggctggtctcggactcctgaccttgtgatccacccgcctcagcctcgcaaagtgctgggattacaggcatgagccacaatgcccggctaatttttgtgtttttagtagagatggggtttcgccacgttggccaggctggtcttgaattcctggcctcaagtgatccacctgccttggcctcccgaagtgctgggattacaggtgtgagccaccacacctggctcttcacaactttttagtctgctccttgttggacacctctatggactatgtggcccttcagacctctgttcctgagagaaggctcatggttctggtgggtagttttgtatctgctgatgagcctgatcctcataaacagaaagccctttattctttctactattcttacttttttttttttttgaggtagagtcttgctctgtcacccaggctagagtgcaatggcacgatctcagctcattgcaacctccgcctcctgggttcaagcgattctcctgcctcagcctcccgagtagctgggactacagctgcgtgccaccacgcctggataatttttgtatttttatagagatggggtttcaccgtgttagccaggatggtctcaatctcctgaccttgtgatccactcgccacggcctcccaaagtgctgggattacaggcgtgagtcaccgtgcccggcctctactatccttactttttatacccaaaaaagccctgaaattggtctgtattgatcattaatagacatttgaggctgaggcacgtggatcacttgagcgtaggagttcaagaacagcctgggtgacatggcaaaaccccatctctacataaaaatacaaaaaaaaatgaggctggacatggtggctcaggcctgtaaacctaccactttgggaggttgaagcaggtggatcacttgaggccaggagttcaagagcagcctggccaacgtgatgaaaccccgtgtgtactaaaaatacaaaaattagccaggtgtggtggtgcatgcctgtaattccagctactcagtaggctgaggtgggagaattgtttgaacgtaggaggcagaggttgcagtgagtcgagatcacgccactgcattccagcctgggtgacagagacttcatgtcaaaaaaaaaaaaaaaaagccaggtgtggtggtacatgcctgtagtcccagctacttggaggctgaagtgggaggatcacctgagcccagggaggtggaggctgcagtgagctgtgatcctgcaccctagcttgggtgacagagtgagaccctgtctcaaaaaaagaaaaagaggccaggcgcggtggctcatgcctgtaatcccagcactttgggaggctgaggtgggtggatcacgaagtcagcagttcgagaccatcctggccaacatggggaaaccccgtctctactgaaaaaaaaaaaaattagccaggagtggtggtgcacgcctgtaatcccagctacttgggagactgaggcaggagaatcgcttgaaccggggaggcagaggttgcagtgagccgagaccgtgccattgcactccagcctgggcgacagagcaagactccgtctcaaaaaaaaaaaaaaaaagaaagaaaaagaaaaaaatagacatttgaagaaacttagagatgaagtctgtgttggaggctgggaaaagagggaaaccagggtattctgagtcctgagtgttcttgtggagggtttgggagaggcatagttgtggtacctctgctgactcccatgtgaccttctctgttcctcagaactgaaatgagggttaactagattcagccactgtcatgctgctccagattgacccagtgagtcttctctgatacattcaccccagaaatctttttctgaggatttagtcccaaaaatgccccttaaggccgtgtgtgttggctcatgcctgtaatcccagcactttgggagaccaaggcaggcggaacactttaggttaggagtttgagaccagcctggccaacatggtgaaaccccatctccactaaaaatacaaaaactagccaggcgtggtgacgggcacctatagtcccagccattcaggaggccaaggcacgagaatcacttgaacctgggaggtggaggttgcagtgagccaagatcacgccactgcagtccagcctgggcgatagaacgagactcagtctccacatacatacatacatacatacatacatacatacatacatacatacatacgtaaaattaaattaaattaaatgccccttaagagccatgggcccaggcctgagaattacagggaaatgtgttggggcaggtgtttagaaaactcaaaatccccaagcctgaaattagcacctggatacttcaagctggatccagaaaggatttgaatcaaaatccagccccaagtctttcataggacagaagatgcccttgacagttcatggagcagtcatgtctctttgcttagctcagcagcacagccttgcccagaggtctggctaggaacatgttctggctctgcctcctctcagagatggctctttcagttcagtttctcccccagcatgagccccggagctgcccttttggagaaaatgagattaggatcactggctctcaggacctcacagatcatcttcctgagacatgaggctggcccaggccaagggaataaacctttttgacctcagtgggatctggctgtgagagaatcccaaaataacaatctggtgtttatcttgggctgccttctctccggggatctcaaaacacttgataaatctgatctgctgccgaggacaggtggtcagacagtccctgggagactgagtgatgatgggtccctaccggaggctgcagggtgatggaaaatttctttcctctgccaccctcatcacttacattctcaccagaaactacagagattccccctccttttctctgcttccctgtggcagccccgagtcagcagttcccttgttggtccacatctctgattgtgacaggtcttgcctttttcctggggctcatgctcttgtcttatgtcttattcctttttttttttttttttttttttttttttttgagacagagtttcgctcttgttgcccaggctggagtacaatggtgcgatctcggctcaccacaacctccgcctcctgggttcaagcgattctcctacctcaacctcccgggtagctgggattacaggcatgcaccaccatgctcggctaattttttgtatttttagtagagacagggtttctccatgttggtcaggctggtctcgaactcccgacctcaggtgatccacccgcctcagcctcccaaagtgctgggattacaggcatgagccactgcacctggccggagttcttaaatcagttctgcaaacctggactgaaccagacagcatacacacccatggggcccatgatgacagatggatgtgactggagtccaggcccccagtgaagaattggcagtgctctttcctgttcagtgacctgtatcccttttcatttaaggaggacaaccaaatattttaaacttacatcttagtctgtgacagtttgggggcacgacttcaccaagatattgcagagacagcaagagacttcttcttcacctgatttagggacttgatttttttagtgtcattcatacagtgacctgaattctcaagatggtggaaaacacagcttccctatttctttagaattactttaaaatagtagcttttttttttttttttttttttttttttgagatggagtctcactctgtcgccaggctggagtacagtggcatgatctcggctcactgcaacctctgcctcctgggttgaagcaattctcctgcctcagcctcccaagtagctgagactacaggcatgcgccactatgcccagctaatttttgtatttttagtagagatggggcttcatcatgttggccaggatggtcttgatttcttgacctcgtgatctacctgcctcagcctcccaaagtgctgggcttacaggcatcagccaccgcgcccggccaatagtagctaactttatcaattaccttttaattgccaggtacactgtgaggcagtttatatccttgaactaccttaacttcatgatggcctcatgttactaatgaggaaactggggcccacagtcagacatgagccactggtggggcagaaataggctcctggttctgtgtgatccaaagttggtgcttttctgtctatccctagctgttggtcaccaccagctttctgcatattttctcacggtgcctctcatttcccagagccgcctggagcccaaggctgtacacgtgccctgtgctgattctctgcctaggaaaggaccatgcagctagagatcaaagtggccctgaacttcatcatctcctacttgtacaacaagctgccccggcgccgggcagacctgtttggggaggagctagagcggcttttgaaaaagaaatatgaaggccactggtaccctgagaagccactgaaaggctctggcttccgctgtgttcacattggggagatggtggaccccgtggtggagctggccgccaagcggagtggcctggcggtggaagatgtgcgggccaatgtgcctgaggagctgagtgtctggattgatccctttgaggtgtcctaccagattggtgagaagggagctgtgaaagtgctgtacctggatgacagtgagggttgcggtgccccagagctggacaaggagatcaagagcagcttcaaccctgacgcccaggtgttcgtgcccattggcagccaggacagctccctgtccaactccccatcgccatcctttggccagtcacccagccctaccttcattccccgctccgctcagcccatcaccttcaccaccgcctccttcgctgccaccaaatttggctccactaagatgaagaaggggggcggggcagcaagtggtgggggtgtagccagcagtggggcgggtggccagcagccaccacagcagcctcgcatggcccgctcacccaccaacagcctgctgaagcacaagagcctctctctgtctatgcattcactgaacttcatcacggccaacccggcccctcagtcccagctctcacccaatgccaaggagttcgtgtacaacggtggtggctcacccagcctcttctttgatgcggccgatggccagggcagcggcaccccaggcccgtttggaggcagtggggctggcacctgcaacagcagcagctttgacatggcccaggtatttggaggtggtgccaacagcctcttcctggagaagacaccctttgtggaaggcctcagctacaacctgaacaccatgcagtatcccagccagcagttccagcccgtggtgctggccaactgaccatctacctgcccgtggggccaggagcacccaagaccacagaaaagagaaaggaaaggccaaaaaaaagaggaaaagaaaaatgtacaaaaagattttcgatcttctcactcttacttctagaaaaaagatccagcccaggcacggaatgggagggccctgcaaagcacccaagtgtgtttcactcaccccttaccgctcgcccaccggcctgtgatttatttggttggtttgggttttatatttctttttcttttttttttttcttacatgtagttttctatataacatctttaatgagtggcttcctgtgctaagaatgg

SEQ ID NO: 2222 - DNA, 6000 bp, Homo sapiens
aacctccacctcccgggttcaagcaattcccctgcctcagcctccctagtagctgggactacaggcgcgtgccaccatgcccggctaattgtttgtattttagtagagacagggtttctttttcttttttttttttttttgagacaagagtcccactctgtcgcccaggctggagtgcaatggcgcagtctcagctcactgcaacctccgactcctgggttcaagtaattatcttccctcagcctcctgagtagctgggattacaggcaaccaccaccaagcccggctagtttttttttttattttattttttttatttttaatagagacagtgtttcaccattttggccaggctggtctcaaactcctgacttcaggtgatccgcccgccttggcctcccaaagtgctgggattacaggtgtgagccaccacgcccagccctgacctgtagcatttttttttgttttgtggggtttttttaaaatattttttttgagatggagtttcactcttgttgctcaggctggagtgcaatggtgcaatctcggctcactgcaacctctgcctcccaggttcaagcaattctcctgcctcagcctccctagtagctgggattacaagcatgtgccaccacgcccggctaattttgtatttttagtagagatgggctttctccatgttggtcaggctggtctcaaactcccgacctcaggtgatctgcccgccttggcctcccaaagtactgggattacaggcgtgagccaccgtgcccagccagacctggagcttttttattgtagtttgaagcaaggacatagaaggaaaagattctttgccttgcttggaattttcctgtcttaaaagactctgattatttccatctgttcccagtcactcaattccttatcagctctgtcccgagtggcctgttgacaccaccaaagctaaaatgttactttctttgaacactgcattttagcatcttagcaagacaggtttgtttacttaccttgtttactagacttcacagtattggtgaatatataaaaaatcatttgtcggctgggcatggtggcttatgcctgtaatcccagcacttcgggaggccaaggcaggtggatcacgaggtcaggagatggagaccagcctggctaacacggtaaaaccctgtctctactaaaaatacaaaaaaattagccgggcgcggtggctcacgcctgtaatcccagcactttgggaggccgagacgggcggatcacgaggtcaggagatcgagaccatcctggctaacacggtgaaaccccgtctctactaaaaatacaaaaattagcagggcgtggtggcgggcgcctgtagtcccagctacccgggagactgaggcaggagaatggcgtgaaccccgggagacggagcttgcagtgagctgagatcgtgccactgcactccagcctgggcaacagagcgagactccgtctcaaaaaaaaaaaattagccgggcgtggtagcgggcgcctgtagtcccagctactccggaggctgaggcaggagaatggtgtgaatccgggaggcggagctggcagtgagccgacatcgcaccactgcactccagcctgggcgacagagcgagactccgtctcaaaacacacacacacacacacacacacacacaaattagccgggtgtggtggtacatacctctaatcccagctactcgggaggctgaggcagggcaatcacttgaaaccaggatgtggaggttgcagtgagccgagatcatgccactgcactccagcctgggcaacagagcaagactccgtctcaaaataaataataaataaaaattttttaaaaataatttttcttaagtaggcaaccacgcttccccaaagccagtttcttcctttgcacctgctgaagagatcaaattgaggaagtattttcttggataacttcaaagaaacaatacaaaatttcttgccctggagtgtgtatgaaagggtgacgcatctatgcgagttaactggggccaattatgaccagcctgacttgtcatggcgtcacatcttgcttactctcagacaggtgatgtgcccccaccttctccctgcctcacttgcttgctcatggagctcactattttgcaagcacggtgcatgccgttcaacatatgattattcaaaatgggaggggaatctggaatgcctgagtaggcattcagctcacaattaagccctggcaagatgtaatcacacactgggaaggaaaaaaaaacttcatcaccacatgataaatggagacatcagcagttgagaagggcggttacgttttttcccctcgattttatcttttcctacttatatgctaaccttttacccagagctcccaccaaggaggctggatttctcatttcattctaatgatgctactcagggctgatgtctttccagcgttgcagaagagattctattaaacgcacaaacatgcagaaactcatggccttccttccaaggattcagtccgccctccctcaacctgtccggaatggtagaagacgtctaccctctaactgcttatatgtactccagctgttcctcctaagatgccgtaggacaactcgcttcagctcaccttcacctttaccattgtcagaagtttcacattggagagtggacaccatactcagcccaggatatgcaggatgtgcagaggcaatttggcccaaacactaatctttaaattaagaatagcaacgatttgagccaggctttacatacagcatcatatttaatccccgacacgagctccattttatagatggggaaactgaggtttggtgatgtcaagcgttttgctgcattaaatcaagatcacacagtcggtagccgaactgggatgtaaacccacctatttacatggctgccttaatcaatgactacaaataccagcatcccttgccgtgcccgctggcgcaaacgcacactcccaagggcccagtcttagcggctggatcctaaacccaatcagacaccgcttctccctttcccccgaccaatgggaaggctgttgctaacacaccggctatatttttagctttcagtgctctgggagcgtgtgggtcggctgagcctctctgcctggtgggaagagctaggggaaaagagagaagggaaggggagggggaaagggagggtgcagcgggcatgtgcgggagggggcgtgtgtgtgacgctgtcactcgctgacgcacaaggcaagtagtccctggaggtgcccccggggttgcgacgctcagagtgtgggggatgggggggcgctcaggctatctcccgcctccctgtcccggtggagtttgccctccagcccggcatttctctgttgcattcagggaaagtgcatttaaaccccccacgctactggtgctctccgcccttgccaaaaaaagcgatcaaggaaaaaaaaaaagcaaactgttcgtagctggaaactttcggatctcgccacccaacgtggggatggcggctgctgctgggccggaaccgtctggaatgacaaaaaaggtgtgggcgggaggggagaactgggaaatgggagatctaaggagggaccggggagaagacctcactcacagtcccccgggggctccagactgcatcttccggcactcctgtctgcctgtgaccgcagaacacggccctccctccccctggctctgtgtcccgcacactcacagaggcagagcagcccgcgtggccagagccgggggagggggcctcagcgcgcgggcctggcgcgcccagtcccgggttcgcggagcctcgctccgccgcccgaggggccgtagtgggtgcgagccttgcgcccgttgcacggtcaggggccaccccacgccggcgggactgcgactagaagaaatgtggggctctcccgcgtgccccacactggggtcgctggccagaaagagcaaacaagagttgggagaggggctgcgcccgcgcgcctgcgcagagccagagccggccctccaggctgcaaggaaaggagcgccagaggcggtgaggggaaggtcctttgtggcactcggctagtttcacggccgtcagcctcgtcctcggctcctcttactcccgcacagcgtggcccaggccccagagtctccctcgcctttctttcgacgttgagccccccgaggaatcacaaggcgctcggaagactcatgcctgcccgaaacgggtccgaaatgtttccagagcccgcgtcgtcccctcagttccccctcccgcagaggccgtaacggggcgatgctatcgccgcggacacggccagacgctcggagctggagggaaggccccgggaaacggctcgggcaaacgtccgaaccatgggctccgaggcaggtgcagggcggacgactcagcggggggtttccggcgggcatggtgactccctcccctcccccgcgatactcgtcccccaaacacaactaaagggagagtgcactgtgcccggctcgtgagcaacccggccccaggtggtccccggccctcacggagcgcccctgggagaacacctcacacgacgcgcacaagttcagagtggtatgggaatgaaggaaaggagtgcggcgcggcgctgtgacagggaggggaagacggggagccggacgcacgaccggcgagcacagaagggcacaggagctgctccgcgagataccagcgagctgaggcgcggggctggctgggaagtagtcccggccgggccctggccccgcccctgcagggcggagggacgcatcacgcaggggtggggaagccggatccgtgcgcagggttgctaagggtgaaacttttcattgactttgctcacttcgggccggggcgcgggaaggtgcgggttgttggctgaggcaagccgtggctcgggcgacgcggggccaggagggcaggaccgtctgccggcgacagcccataccgtctgccgttgcgcgacacgaaccaccctccgatccgccatccccgcgtcgtcgccgctagtccgcccgcccgccctcgggccccccgctgccgagcccgacctcctaagagctgaaagaaattattgagagtcatagtccatagccccctgcttcgtcccccaaccctcaacgacgaaaaggacttcggtcccctggcccggcgacgcccgggaaggaaaggagagcgacctccgccccgcgctcaggccaccctggagggagaagccgccccgcggccggtagagcgccccgccgccgcggagacccgagtgagtgagttggggggcgtgcgggcggggggcccgccccgagacccagccggccggactacctcttccaccccgccccactcccgctttgctggactctccacgttgctgccgctccctccccgcctggccagcattttctttccccatccagcttccctccagaccccactttccccagctcctcttctcacgccatctgtgctcctggggtgcccaagagctcctttttctcccagttccaagagtggccctctcctgggtggggtgcatttcctcccttccccgcctcccccggttctttatatcctagctactcgctagatcttccttgttctccaaagaaacataactccccccaccgttaaataaatccgaggaaggaaggggatccaggccttgtttttctgcttcttttcccgtgtgcagggaaggggggtggtaattgttaatagactctatttctggctctgtggagcctgaagggtggagggtggacaccccctttggcgacgggacaggtcagtggagattgtccttgggccactgagccagagttcaccgtttcggctgagctctttatactcttaagtgttttaatggaaaattgggcagaaaaaagtacccttagagcagtgccagtgagtggattctgcttatcttggtaaggtgcctgcgaggtggggccctacccccaaactccttcccctcctgtccgg

SEQ ID NO: 2223 - DNA, 6000 bp, Homo sapiens
gatttccagagaatgggttgttggaaacaatggcaatttttaaagtttttttaaattgacatatcatagttgtacatactttgggggttccatgtaatatttctaagtatatctattttaaaacatgcaacagggccaggcgcggtggctcatgcttgtaatcccagcactttgggaggctgaggcgggtggatcatggggtccggagtttgagaccagcctggccaacatagtgaaaccctgtttctactaaaaattcaaaaaaattagccaggcgtggtggtgggcacctgtaatcccagctacttgggaggctgaggcaaggagaatcgcttgaacctgggaggcgggggttgcagtgagccaagatcacaccactgcactccagcccgtgtgacagtttgagactccgtctcaaaaaaataaataaataaaacttgtgataaattattaaccaaaatttccagctgggcacggtggctcacgcctgtaatcccagcactttgggaggctgaggcgggtggatcatgaggtcaggagttcaagaccagcctgaccaacatggtgaaaccccatctctactaaaaatacaaaaattagccaggcgtggtggtgcgtgcctgtaatcccagctacttaggaggctgaggcaggagaatcactataaccggggaggcggtgtttgcagtgagccgagatcatgccactgcactacagcctgggtgacaaagcaagactgtgtcaaagaaaaaaaaaatccctactgtagtatcaaataaaacatttgtatggccggacgtggtagctcacacctgtaatcccagcactttgggaggccgaggcgggtggatcaccttaggtcaggagttcaacctggccaacatggtgaaacccccatctctactaaaaatacaaaaattagctgggcgtggtggtgcatgcctgtagtcccagttactcgggaggctgaggcaggagaattccttgaatatggaaggcagaggtttcggtgagccgagattgcgccactgcactccagcctgggcgacagagggagatgccgtctcttaaaaaaaaaaaaaaaagataaaagaataaactccaaatcagtagaggggaaaatagtgcaaatgcaatgataaatccagagaaaggaaagaaagaaaaagaaacagaacaagtggaacaaatagaaggcacaaaagaaggaaaatttgaaaccattataccaatacttaaatatgtaaagggactgagtgctccagttaaaagacgggatgtggccaagcactgtggctcaagcctgcaatcccagaaattgggaggctgaggcgagagaatctctttagcccaggaattggagaccacccagggcaaaatagtgagatcctgtctctacaaatttttttttttttttttttgagacagagtctcgctctgtcacccaggctgggtgtgcagtggcacgatcttgactcactgaaacctctgtctccttggttcaagcgattctcctgtttcagcctcccgagtagctgggattacaagcatgtgccaccatgcccggctattttttgtatttttttagtagagacggggttttgccgtgttggtcaggctggtctccaactcctgacctcaagtgatctgcctgcctcagcctcccaaagaggtgggattacaggcgtgagccaccacacccagcctaaacaattttttttttaattagccaggagttggccgggtgcagtggctcatgcctgtaaacccagcgctttgggaggctgaggtgggcggatcacaaggtcaggagttcaagaccagcctggccaacatggtgaaaccccgtctttactaataatacaaaaattagccgggcatggtggcgcatgcctgtaatcccagctactcaggacgctgaggcaggagaattgcttgaacctcggaggcagaagttgcggtgagccgagattgtgccactgcactccagcctgggcaacaagagcaaaactccgtctcaaaaaataaaaaataaaataaaataaaattagccaggagtggtggcccacacttgtagttccagttactgaggaggctgaggcaggaggatcgcttgagccctggaggtcgaggctgcagtgagctattgtcatgccactgcactctggtctcagtgatagagtgagaccctgtctcaacaacaaaaagggtgtaattctttttttttttttttttgagatggagtttcactctttcgcccaggctggagtgaagtggcatcatctcaacctactgcaatctccgcttcccgggttcaagccattctcctgcctcaacctccaagtagctgggattacaggtgcctgccaccacacccagataatttttgtattcttagtagagacgggggtttcaccatgtcatccaggctggtcttgaactcctgacctcaagagagccacccaccttggcctcccaaagtgctgggattataggtgtgagccactgtgcctggactgccccagctaagtttttaaatatttttagagatgggggtctcactgtgtggcccaggctggtctcaaacttcaggcctcaatcagtccccagcctcagtttcccaagttggtgggattataggcctgagccactgcagccagttcagaatacactcttcaaacatggaacgtttttgaaaattggccataaagcaagccctgcaaattttaacattggtaatattacataccatttttgcctaacccaaaaggaaataagttaaaaattagtaacaaagtagtttgaaatgaaaaatataaactatcagagagatttaaaaattgtagtaggaattcaaaaatagaacagaacaataatgaaaataccacataccagagcataagtgacaagggcagaggggggaagaaacaaatgaaaggatataatgaaagtattacttggagcctaagatgctaatgctagggagaaacgggataaaaaggtagaaaaaaacactagcacaaaataaccccaaagaaagtagaaggaaagaaaaaaaacaaaaggagaaattgctgaaatagaaagtagagcatactgctgggtcttttcctttccgaagcccctctttctcaccagagagagctgttctttctctttcttttgcctattaaacctctgctcccggccaggcgcagtggctcacacctgtaatcccagcactttgggaggtcgaggcaggtagatcacctgaggtcaggagttcgagaccagcctggccaacatggcaaaacccagtctctactaaaaaatacaaaaattagcccggtgtggtgacgcgcacctgtaatcccagctactggtgggggctgaggtaggagaattgcttgaacccaggaggcagaggttgcagtaagccaagatcgcactactacactccagcctgggcaacagagcaaaactccatctcaaaaaaaacaacaaaaaaaaaccctgctcctaaactcctgtgtgtccatgtcctaaattttcttggcatgagacaacaaaccctggatatttaccccaggcaacgaagctagttcagtttgacactgttgtcaaagttttggggaattagtcactgtcatgcattgctggtgggtgtgcaagttgttaaaccctatatagggtcaatttagaatagatataaaagttacaaatgcatattatatcttttgactcgttaatcccacttctaggagtttatcttacagatatactgaatgaaacataatatagattaggtatagatgagattagacattatagcatttacataatagtgaaagattaaaaaatatataaatgggctgggcacagtggctcacacctgtaatcccagtactttgggatgcccaggcaggaagattgcttgaggccaggagttcacgaccagcctggacaacataataagacagtgcctctaaaattaaaaaattagccagacgtggtggtgcatgcatgtagtcccagctacttgggagtctgaggcaggaggaccacttgagcccaggaaagtccccctcagaaagattaatcgaaaaaataaggccaggcacggtggctcacgcctgtaatcccaacactttgggaggctaaggcaagcggatcacttgaggtcagcaattgggagaccagactggccaacatggtgaaagaccttctctactaaaaatacagaaaaattagccgggcgtggttgtgcatgcctgtagtaccagctgctctggaggctgaggctggagaatcgcttgaaccccggaggaggttgcagtgagccaagatgccaccactacactccagcctgggtgacagagcgagaccctgtctcaaaaaagaaaatgtttaagtaggtaacatgtgaaggagacatactctatagacattaaaaagaaaggatggccaggtgcggtggctcatgcctgtaatcccagcactttgggaggctgaggcaggcagatgacctgagatcaggagttcgagaccagcctggccaaagtggtgaaaccccgtctctactaaaaatacaaaaatcagccggccgtgatggcggtcacctgtaatcctaggtactcaggaggctgaggctgcagtgagccgagatcgcgccactgcactccaacctaggcgacagagggagactccgtctctaaataaataaatgtatgaggaagagaaaaataatatggaggtcttcccttgacctcccccaacccccttcctttagagaactcctccatccttcacctaattcttcctagttgtcctgggaccaagacaaattcgcctaagataaggagttacgtagaagacagggcgtcctggtgtacgggctggccctggacgtcacttccgctggcggcagtggcgtcacttcctgctcttgggggcggggcatccgtgtccttgcggtgctgggcagcagaccgtccaaaccgacacgcgtggtatcctcgcggtgtccggcaagagactaccaagacagacgctatggtgagtgttcctactgggccattatctccgggtcacctcccgagagctgtggtgccgcgagcgtggtcccgctgtgtcagaaaagctgtaaaaaaacggaaggaggaaaaggcaggtgcgcggtgtcgggcaggagaccaccgaggcaggcgctatagatgagtggtcccaccaggccatctccgtctccagcgactgccgtccaccctatgtccagcctccaaggccgaggttaggtggtagccgcagtgaatcactcgcgattcgcacgttacacacgatggcgacatgtggggccgcacctgggttataatatgaatatatccttgtatataaatatgtgtttgtaaaaacaaaaaaaaaaagagaaaaattaatgaaaatgatttactggagcagtgggaatgagatggaaggagcggaataggcaggccactcacccaatatgctccctacatgggtgtgtatttatttatttattgagacggagtctcgctctgtcgcccacgctggagtgcagtggcgccatctccgctcattgcatcctccgcctcctgggttcaagctattctgcgtcagcctctcgagtagctaggactacaggcgtgagacaccgcgctcgtcccctacatgggttattttgacacagatctgaatgacatcattttatccataagtattacagtatatatctataaagtaagaatttttaacataactgcaaatgccattaattagttaataagggttgcaagttggtgatatttaactgtaccattccctctttatttattaggcggaagagtgatacaagaggtacttctcatcttctacctggttaccgcctaatacagcatttaggaaaggcacagaagatgattgtttccctttcccagttttcaaaatattgagttgctatcacttgcatagttttgacttttaaaccatgaagatattttacatatt

SEQ ID NO: 2224 - DNA, 6000 bp, Homo sapiens
caaggcagggcgagtctgaccatcatggagacaccaaggcacctgccatgctttccaggaactgttctgaggcagtaaacaggtgtttgaaatggaggtggtacaaaagatgggctcagagtgggtgtggacacccgaaggtgggcctggacatgggtgctgtggagagagcaggttctgggcccatgattcctggaggctcctccggtatccccatctctgcctttgtgcgcattgttgagaatctaggcccctggactttccaggactgaagaattcaggagtcagcttgaagacagtttcgcacctcatggagggcactgcccgcttctgcagtggcacctgtagatgagaacagagaagcaaaatccttgcacacataataacttgcataatccgcacagacagaatagtcaggaaaggcttcttggaggaagtgacatttgactggagcctgaatgaagtaaggggcaaaccaagtgacatctgaggaaagagcgttgtaggcagaagagacattaagtacaaaggcttgaggatggaacaaaattacatgtacaggaacagcaaagaagactgtgtggccagaatggaaccagtaatgaggagagcactgggagataagatcggagacaaacatgggacagattatgctggtccttagagtcgtgattaggagcgagaattttattctgagtttgccagataatgtaagtataggagccattgcagggttttgagcagctaagtgctatgttctgtttctaaaagtttgttctgatggcagggcatggtggctcatgtctgtaatcccagcactttgggaggccaagatgggtggatcacttgaggtcaggagttccagaccagcctggccaacatggcaaaaccccttctctactaaaaatacaaaaattagccagccatcatggcgcatgcctgtaatcccagctactcaggaggctgaggcacaagaattgcttgaacccaggaggcggaggttgcagtgagccaagatcacgccactgcagtccagcctgggtgacagagcgtgactccatctgaaaaaaaaaaaaaaagaagaggctgggtgcactggctcacgcctgtaatcccagcactttgggaggtcgaggtgggcggatcacaaggtcaggagattgagaccatcctggctaacacgatgaaaccccgtctctactaaaaatacaaaaaaaaaaaaaaaattggccaggcatggtggcgggcacctgtagtcccagctactcaggaggcttaggcaggagaatggcatgaacccgggaggtggagctttcagtgggccgagatcgcgccactgcactccagtctgggtgacagagcaagactccgtctcaaagaaagaaagaaagaaagaaagaaatccagagtcgaccaggcgtggtggctcacacctgtaatcccaacgctttgggaggccaaggtgggtggatcacttgaggtcaggagttcgagaccagccagaccaacatggtgaaaccctgtgtctactaaaaatacaaaaattagctgtgcgtggtggcacatgcctgtaatcccagctactagggaggcagagtcaagagaatcacttgaacctgggaggcagaggttgctgtgagccgagatcgcaccactggactttagcctgggccacacagcaagactccatctcaaaaaaaaaaaaaaaagaaaagaaaaaaaagaaaaacaagaaagaaatctgcagagttggctaggagtggtggctcattcctgtaatcccagcactttgggaggccaaggcaggcggatcacataaggacgggagttcgagaccagcatgactaacacggagaaacctcgcctctactaaaaatacaaaattaacgggtgtggtagtgcatgcccataatcccagctactcaggaggctgaggcaggagaattgcttgaacttgggaggcagaggttgaggtaagccgagatcacaccattgcactccagcctgggcaacaagagcaaaactgcatctcaaaaaaaaaaaaaggaaaagaaaaggaaatccgcagagttgtgactaaaacttctgggctgctggtaatcatttgtttcttaatctgcatgctacaaactgatgtattcaattatgaaaatttactgatctacacacttgtaattgtgtgtgtgtattatccttggaccaatttttttttttaaaagagagaaaaaagaggccaggcacagtggctcacacctgtaatcccagcactttgggaggccgaggcaggcagatcacaaggtcaggagctcgagaccagcctggccaacaaagtgaaaccccatctctactaaaagtacaaaaaaaaaaaaaaatttgccaggcgtggtggcgggcgcctgtaatcctagctactcgggaggctgaggcaggagaatcgcttgaaccagggaggcggaggttgcagcaaaccaagatcacaccactgcacaccagcccaggcaacagtgtgagactctgtctcagaaaaaaaaagagagagagagagagagagagagagagaaagaagaaggccattctggtgactgtatggaggataggctgtggttggataagagaagcagcaagaaccaggcagaaggctgttgctatggtccagttgagacatgatggtgtctctgcccaggagggtgtggtgtggttagaagtgatcagatttgagatacaatttgcaagtatagcccctgggacctgcagatggattgaatgtgtggagtgagggaaagagaggagctcagggtgactcctgggtttggggcttggccgatgctctccctgagcagcctgagtttccctctgattcatttctggtacaccaggcataaaacaaggtccttgtaacaagtgacagagacaatcatggtgctgagggaagaagggtgaaggtgtatggggcccactcaccttgatgacattccttgtgctgaagcgggtcctggtgacctggtgccaacagtgccggacctgccagaccagaaagaggcagaggacaagcaggttgccacagcactgagggtccctgcagctgtgattctgggagagcaggccctgcactggctcccactcagggccatggaatggccccaccacagcacaggcacccagcagtgacaacaacatggcaaagcttagatcaggcagatggtgttgggagctagagggcaggcctggcacatctgatgcagccagctgcagtaggatagccgccacctcatagcacccctgtcactgaggccacctcacaaagggggctgatgccccagcctcaactctgaccctggtgccaggcctggttagcatgctcttggtgcaggtaaggacagtattggggaattgttcaaaagtaattaggaggaagaacttgttttaaacaaacccatcctctggaatgaaaagattaagttccctgaatgtgtgatggggtgatataacctgcggtctgcttgatttctttcttcctatgaaatacttggatctgcctgtccttctattatcaaacatttaatgaacactgtattgaatacatgtattcttgtttaaccactcaacatgcctttctcgttgcttgcagtatcctgatttcctgtgggggaattacttttcccatcttaggatcagtgttggtgggaaaataaatgttaccctgaagactcttttacccaaaagttctattcaaaatattaaatatctgagcaggcagggacgtcagccaattataatgagccaggccttaactgtttagtggctggaatttttttttttttttttgagaccgagtttccactcttgttgcccaggctggagtgcaatggcgcgatctcggctcactgcaacttccacctcccaagttcaagcgattctcctgcctcaacctcccgagtagctgggattacaggcatgcgccaccacgcccggctaattttgtatttttagtagagacgggggtttctccatattggtcaggctggtatcgaactcccaacctcaggtgatccgcccgcctcagcttcccaaagtgctgggattacaggcgtgagccaccgcacccggccctcttttttttcttcttttttttgagacggagtctcactctgttgcccaggctggagtgcagtgtgcagtggtgcgatctcggctcactgcaagctccgcctccggggttcacggcattctcctgcctcggcctcccgagtagctgggactacaggcgcccgccaccatgcccggctaattttttgtatttttagtagagacggttcactgtgttagccaggatggtctcgatctcctgacctagtgatccgcctgcctcagcctcccaaagtgctgcgattacaggcgggagccaccgcacccggccggcctttttttttttttttttgagagtctcgctctgtcgcctcagctggagtgctagagtgcagtggcatgatctcaacttactgtagcctccacctccggggttcaagcgattctcctgcttcagcctcctaagtagctggggttacaggcgcccgccaccacgcctggctaatttttgtattttttagtagggacgaggtttcgccatgttggccaggctggtctcgaactcctgtcctcaggtgatgcgcccgcctcggcctcccaaagtgccgggattacagccataagccgctgcggccggccggtgggttactttttgaatgtttaattcattgtttctgccaataatttgtactaggcagctcataagaacgccaaagtacgttccttcttcgacacagggccagtttccgcgccagtgcccccgtagagggcggggcccactcgctcgcgtagcgtcaccttcgcttcctgccgcgcggggccatttccgctgctgcttctgtgagtttttccggtgcacgcgagtgcttctgaaacgtcagctgcgctcccctaggagtgctgagcccgcggaaccgcagccatggtgagtgcgtgcgccggccgagggaccgggaagcgggagactcagggttgcgttcactccctagcctgttagatggaggcttagagcctgcgccgtctcatccgccggcgttgggtcttaaccgccgggcccttagttagaaccccagcagcggcggggtcccagcagcctggcccgaggttagaactcaggaaaccttaggatccccgcagctgtgttgctttgccgcacggtctgtttgcttggcaaaaggcctgcagcgagcggagggggcatggcccagcctgggagaaagagaccaacccacgtgggagagggcaaaaagttgggtgaagaaaacttggctccaacttttttttttccttgtttcttttcatacgaaatctacgatggcgtgggaccctgggattcggatcaacctctcctacccaccctacctcaccccacccccgttgctggggttcaggaggagatctcccatgggtctgcgcttagtgcccgccgcgagtcacacgcgccagggacctagaggagcctttggcatttgggggctgtggggaacatgaagtgagcgcgactcacggcctggagtgcaggaaaggcttctcctgcaaggcggtggcttcaaaaaccagaagtctggtagcaccacgtgcggcgtctctaaactcttggtcgtctctgacttttaaacatctagggaaagttctaaaacgtgtgtcctggcgtagtagttttggttggcacttggtgaggagggaagaatttgtaaagcactgtaacttctatagttaatccttccagtggagcttggatcccggcggtagcactccccacaaacctcctcccatgcattttgaagcttagtacgtggctgagcctagaacttgaagcttccaaactcagtgctcgctttaacgcagctccctgaaacgttttggaatcggatggtctcaggttgaactttgcagttttcctcaactgtaaaa

SEQ ID NO: 2225 - DNA, 6000 bp, Homo sapiens
gcttactgcaacctctgcctcctgggttcaagcaattctcctacctcagcccccaccagtagctgggattacaggtgcgcgtcaccacaccgggctaatttttgtattttttagtagagactgggttttgccatgttggccaggctggtctcgaactcctgacctcaggtgatctacctgcctcgacctcccaaagtgctgggattacaggtgtgagccactgcgcctggccgggagcagaggtttaataggcaaaagaaagagaaagaacagctctctctggtgagaaagaggggcttcggaaaggaaaagacccagcagtatgctctactttctatttcagcaatttctccttttgttttttttctttccttctactttctttggggttattttgtgctagtgtttttttctacctttttatcccgtttctccctagcattagcatcttaggctccaagtaatactttcattatatcctttcatttgtttcttcccccctctgcccttgtcacttatgctctggtatgtggtattttcattattgttctgttctatttttgaattcctactacaatttttaaatctctctgatagtttatatttttcatttcaaactactttgttactaatttttaacttatttccttttgggttaggcaaaaatggtatgtaatattaccaatgttaaaatttgcagggcttgctttatggccaattttcaaaaacgttccatgtttgaagagtgtattctgaactggctgcagtggctcaggcctataatcccaccaacttgggaaactgaggctggggactgattgaggcctgaagtttgagaccagcctgggccacacagtgagacccccatctctaaaaatatttaaaaacttagctggggcagtccaggcacagtggctcacacctataatcccagcactttgggaggccaaggtgggtggctctcttgaggtcaggagttcaagaccagcctggatgacatggtgaaacccccgtctctactaagaatacaaaaattatctgggtgtggtggcaggcacctgtaatcccagctacttggaggttgaggcaggagaatggcttgaacccgggaagcggagattgcagtaggttgagatgatgccacttcactccagcctgggcgaaagagtgaaactccatctcaaaaaaaaaaaaaaaaagaattacaccctttttgttgttgagacagggtctcactctatcactgagaccagagtgcagtggcatgacaatagctcactgcagcctcgacctccagggctcaagcgatcctcctgcctcagcctcctcagtaactggaactacaagtgtgggccaccactcctggctaattttattttattttattttttattttttgagacggagttttgctcttgttgcccaggctggagtgcagtggcacaatctcggctcaccgcaacttctgcctccgaggttcaagcaattctcctgcctcagcgtcctgagtagctgggattacaggcatgcgccaccatgcccggctaatttttgtattattagtaaagacggggtttcaccatgttggccaggctggtcttgaactcctgaccttgtgatccgcccacctcagcctcccaaagcgctgggtttacaggcatgagccactgcacccggccaactcctggctaattaaaaaaaaaattgtttaggctgggtgtggtggctcacgcctgtaatcccacctctttgggaggctgaggcaggcagatcacttgaggtcaggagttggagaccagcctgaccaacacggcaaaaccccgtctctactaaaaaaatacaaaaaatagccgggcatggtggcacatgcttgtaatcccagctactcgggaggctgaaacaggagaatcgcttgaaccaaggagacagaggtttcagtgagtcaagatcgtgccactgcacacccagcctgggtgacagagcgagactctgtctcaaaaaaaaaaaaaaaaaaatttgtagagacaggatctcactattttgccctgggtggtctccaattcctgggctaaagagattctctcgcctcagcctcccaatttctgggattgcaggcttgagccacagtgcttggccacatcccgtcttttaactggagcactcagtccctttacatatttaagtattggtataatggtttcaaattttccttcttttgtgccttctatttgttccacttgttctgtttctttttctttctttcctttctctggatttatcattgcatttgcactattttcccctctactgatttggagtttattcttttatcttttttttttttttttaagagacggcatctccctctgtcgcccaggctggagtgcagtggcgcaatctcggctcaccgaaacctctgccttccatattcaaggaattctcctgcctcagcctcccgagtaactgggactacaggcatgcaccaccacgcccagctaatttttgtatttttagtagagatgggggtttcaccatgttggccaggttgaactcctgacctaaggtgatccacccgcctcggcctcccaaagtgctgggattacaggtgtgagctaccacgtccggccatacaaatgttttatttgatactacagtagggattttttttttctttgacacagtcttgctttgtcacccaggctgtagtgcagtggcatgatctcggctcactgcaaacaccgcctccccggttatagtgattctcctgcctcagcctcctaagtagctgggattacaggcacgcaccaccacgcctggctaatttttgtatttttagtagagatggggtttcaccatgttggtcaggctggtcttgaactcctgacctcatgatccacccgcctcagcctcccaaagtgctgggattacaggcgtgagccaccgtgcccagctggaaattttggttaataatttatcacaagttttatttatttatttttttgagacggagtctcaaactgtcacacgggctggagtgcagtggtgtgatcttggctcactgcaacccccgcctcccaggttcaagcgattctccttgcctcagcctcccaagtagctgggattacaggtgcccaccaccacgcctggctaatttttttgaatttttagtagaaacagggtttcactatgttggccaggctggtctcaaactccggaccccatgatccacccgcctcagcctcccaaagtgctgggattacaagcatgagccaccgcgcctggccctgttgcatgttttaaaatagatatacttagaaatattacatggaacccccaaagtatgtacaactatgatatgtcaatttaaaaaaactttaaaaattgccattgtttccaacaacccattctctggaaatcaggattctcaaatctcaataaacatcaaattcataaaagaggaagacttcaggaatctgaacaatcattaaatacctaaatgtttcactattagtcaacaaaaaagttaaactcaattttaaaaccaaactagcttataaacactaattgaaacttgcttagggtgtatttatttgcctttcaatttcttcaggggttaaataaattaacgaatgatatcataccaccagccaacctaaatccctacctagcatgatcagtttggtttcgctgtacaccagacagccaaaacttgcaaggttttgattgaacaacaaatactgcgtgcttactctgtaccaagcatcaggactagatgtttaccatgctttatttcatttgatcctcacaacaccctcatgcactgtcatccccattttacagttgaggaaaactgcaaagttcaacctgagaccatccgattccaaaacgtttcagggagctgcgttaaagcgagcactgagtttggaagcttcaagttctaggctcagccacgtactaagcttcaaaatgcatgggaggaggtttgtggggagtgctaccgccgggatccaagctccactggaaggattaactatagaagttacagtgctttacaaattcttccctcctcaccaagtgccaaccaaaactactacgccaggacacacgttttagaactttccctagatgtttaaaagtcagagacgaccaagagtttagagacgccgcacgtggtgctaccagacttctggtttttgaagccaccgccttgcaggagaagcctttcctgcactccaggccgtgagtcgcgctcacttcatgttccccacagcccccaaatgccaaaggctcctctaggtccctggcgcgtgtgactcgcggcgggcactaagcgcagacccatgggagatctcctcctgaaccccagcaacgggggtggggtgaggtagggtgggtaggagaggttgatccgaatcccagggtcccacgccatcgtagatttcgtatgaaaagaaacaaggaaaaaaaaaagttggagccaagttttcttcacccaactttttgccctctcccacgtgggttggtctctttctcccaggctgggccatgccccctccgctcgctgcaggccttttgccaagcaaacagaccgtgcggcaaagcaacacagctgcggggatcctaaggtttcctgagttctaacctcgggccaggctgctgggaccccgccgctgctggggttctaactaagggcccggcggttaagacccaacgccggcggatgagacggcgcaggctctaagcctccatctaacaggctagggagtgaacgcaaccctgagtctcccgcttcccggtccctcggccggcgcacgcactcaccatggctgcggttccgcgggctcagcactcctaggggagcgcagctgacgtttcagaagcactcgcgtgcaccggaaaaactcacagaagcagcagcggaaatggccccgcgcggcaggaagcgaaggtgacgctacgcgagcgagtgggccccgccctctacgggggcactggcgcggaaactggccctgtgtcgaagaaggaacgtactttggcgttcttatgagctgcctagtacaaattattggcagaaacaatgaattaaacattcaaaaagtaacccaccggccggccgcagcggcttatggctgtaatcccggcactttgggaggccgaggcgggcgcatcacctgaggacaggagttcgagaccagcctggccaacatggcgaaacctcgtccctactaaaaaatacaaaaattagccaggcgtggtggcgggcgcctgtaaccccagctacttaggaggctgaagcaggagaatcgcttgaaccccggaggtggaggctacagtaagttgagatcatgccactgcactctagcactccagctgaggcgacagagcgagactctcaaaaaaaaaaaaaaaaaggccggccgggtgcggtggctcccgcctgtaatcgcagcactttgggaggctgaggcaggcggatcactaggtcaggagatcgagaccatcctggctaacacagtgaaccgtctctactaaaaatacaaaaaattagccgggcatggtggcgggcgcctgtagtcccagctactcgggaggccgaggcaggagaatgccgtgaaccccggaggcggagcttgcagtgagccgagatcgcaccactgcacactgcactccagcctgggcaacagagtgagactccgtctcaaaaaaaagaagaaaaaaaagagggccgggtgcggtggctcacgcctgtaatcccagcactttgggaagctgaggcgggcggatcacctgaggttgggagttcgataccagcctgaccaatatggagaaacccccgtctctactaaaaatacaaaattagccgggcgtggtggcgcatgcctgtaatcccagctactcgggaggttgaggcaggagaatcgcttgaacttgggaggtggaagttgcagtgagccgagatcgcgccattgcactccagcctgggcaacaagagtggaaact

SEQ ID NO: 2226 - DNA, 6000 bp, Homo sapiens
taatttctttgactacactgaagaaagcagattaaacataccatatccactcaatgcttacctcagatagaagcaaacgccttcagtacaaagtaagctgatagaaccaaacaccttcagtactaagtaatgtatacaattcaaaattaaataaaaccaccaaaacaagacatagagaacatatttccttgacaacttcatcaaggaaatctgtattataattaggaagtcacggaaaatgaaccatgggatgattatgccagaaagatggcacttcattgcatggaggtaacatttgggagattgaaaggggaaagaagaaagctgtaaagaacactggagcatgatcagtggacccaggccttagctctgactctgccaccaactcagtgacctcaggaaagctccttttcctccctggacttcaatctctcatttgttcaaagggttgacccagctctgacatctgaggattctgagagactcaagaacccatagctattttctgacctctttgtggcactcatccagcaggcaacggatagtctgctccagcttcagctgcgttgtgatctgaataaggactgaacagacacaacagtattactaaccaggaggcacccccaacccagagtccaccttccatggcccttctactcaatcagtgcaggatagtgatttgcctgggctaattggtattatacttttctatttcttccatttaactatgtgtgcacaggccaggcacagtggctcacatctgtaatcccagcactttgggaggccgaggcaggcggatcacctgaggtgaggaatttgagaccagcctgaccaacatggagaaacctcgtctctattagaaaaacaaaattagccggacatggaggtgcaggcctgtaatcccagctactcgggaggttgaggcaggagaattgcttgaacccggcaggcggaggttgtagtgagccaagatcgtgccattgcactccagcatgggcaacgagagcaaaaactctgtctcaaaaacaaaacaaaacaaaacaaaaaaacaactatgtgtgcacatctaaactaaaggagttctggcttcttttttttttttcttttgattttgcttttgctttgtttagagacagggtcatccaggctaaagtgcagtggtgtgatcatagctcactgcagccttgaactcctgggctcaagcaatcctcccactcaggctctcaagcagctgggactacaggtacatgccactatgcctggctaattttttaatttttttgtagggacagggtctgtactgcccagggtaatctcaaatgcctgggcttcagcagtcctcctgcctgtctcccaaagtgctgggataataggtgtgagtcaccatgcctggccttctttgatttattatcagtggttctcaactcaggctgcacattagactcacctaggaagctttaaaaaaattctaatgcccagccgggcgcggtggctcacgcatgtaatcccagcgctttgggaggccgagatgggcggatcacgaggtcaggagatggagaccatcctggctaacacggtgaaaccccgtctctgctaaaaatacaaaaaaattagccaggtatggtggcaggcatctgtggtcccagctactcaggaggctgaggcaggagaatggcatgaatctgggaggtggagtttgtagtgagccgagatcacgccactgcactccagcctgggcaacagagcgagactccatctctaaaaaaaaaaaaaaaacaaacaaacaaaactaatacccaagtcccaccccagaccaattgaatgtctaagggaaaagcccaatatattgttttgtttaatgtgaatatatatatatattgctccacacacacacacacacacacacacacacatctatttctatttaaatatacttaaatatatttaaatgttttatactttaaaatatttttctaaatataaaattctagtgtatttctaaagttctccaggtaagtctattgtgaagccaggtttgaaaactgcttttgagccgggcgcagtggctcacgcctgtaatcccagcactttgggaggccaaggcgggtggatcacgaggtcaggagatcaagaccatcctggctaacacggtgaaaccccatctctactaaaaatacaaaaaaattagccgggcgtggtggtgggcgcctgtagtcccagctactcgggagaccgaggcaggagaatggcgtgaacccaggaggtggagcttgcagtgagccaagatcgcgccactgcactccagcctgggcaacagagcgagactccgtatcaaagaaacaaacaaacaaacaaaaaaaacacaatgcttttttttttttgagccggagttttactcttgttgcccaggctggagtgcactggcatgatctcgcctcactgcaacttctgcctcctgggttcaagtgattctcctgcctcagcctcccgagtagttgggattacaggcacccgccccccacgcctggctaattttttatacttttagtagagatggggcttctacatgttggccaggctggtctcgaactcctaacctcaggtgatccgcccgccttggcctcccagggactataggtgtgagccactgtgcctggccaaaaactgctattttatattatctctactatttctttcctcagtttgctcctttatatatactaaaaaaaaagaattataggcaagttcctatagccaattattacaacattatctcttagctccaaacccacccttctctacaatcatttgtggtacttctgctggtggctttgaggagagatttggtaaggttggaaaagctgcaaactaaattcagcagctgctgtgggaaggttctgtcactggaggttcaagaagcattctaggcgaacacgcacagaaacaagaagcaggaagaaagcaaacaggaaccatgaggaaggagcaagtccttcacccctcacccttagtcttcctctagtgctttccacctaggtgaagttcctgaggtctgatggttctgcaagccatgctgataccaaccagaagtggatggctgcaggattgtagccccactcaagggtggcctagaaggaaaatgatgaaggaaaatcccccggggggtcagaacggatcatgaggtcaagaaatcgagaccatcctggctaacacggtgaaatcgtctctactaaaaatacaaaaaaattagccgggcgcaatggcgggcgcctatagtcccagctactcgggaggctgaggcaggagaatggcgtgaacccaggaggcagagcttgcagtgagccgagatcgcgccactgcactccagcctgggcaacagagtgagattgtctcaaaaaaaaagaaaaaaaaagaaatactggtgacaatgaggcctggagaagaagatggacctttcagagggagcataaagtgggaagacacttgtctcttgtgtgaatgctccctaaagaacatctattaaagaagagattctcagtaaccaggtagtcaaaatggcacattttgtgaatgctaatccacctgtttccctcaccatcaagtgcttattcaatggatccatgtacaagttggctatggtggcagagctggaggctatgcgctgggctcaacaacacggactttcccttgtcaaggctaaattgattactgctatgactgagtgcctaacctgccaacagcaaatggagaggcagagatttgtcctcactggaataaacatgtattctgaatacagacttgccttcccaaaccatgatacttctgccaaaaacacatttgtaagcttacagaatggcttattcaatatcatggtattctgcacaacatcacttggattaaggaactcatttcacaaaagaagtgaggcaatgggatcacacccataaaattcactgcccttatcccatactctatcagctggaaccacctgacctaaaagaatgtggaatggcctctgaagactcagttattccaccatctgaaagacaccactctgaaaggatagggttctatcttccatgtggtatatattttgatgcggtgatcaacattcggtgctgtcttacccacagtagaatacatgggtcagagaatcaaggggtaaagtgggagtcatttccctattacacttactaacccacttgcagaatttttgtatcctataatagctcactagggcttccataataaaataccacagactggatggcttaaacaacagaaattttctcacagttcttgaggttgaaagcccaagatcaaagtgtcagcagatttggtttcttctgaggcctctcttcctggcttgcagacggctaccttctcacttgccctcacatggtctttgcttggtgcacacacacccctggtgtctctgtgtgtgtgttcaaatttgctcttcttataaggatactagtcagattggattagggtccatcctaattgcctcattttagcttaatcaactttttaaaggccctatccccaaagacactcacattcagaggttctgagagttagggcttccacatataaatttgccgggggtggggggtacatataaatttagcccacaacatatcctatcctgcaactttgggctctgctaaagatcttagttcctaaggaaagaatgcttccatgagaggtcacacaatggtttcattgaattagaagttgtgactatcatctggccattttgaggcctcatgtcattcaaccaataggcaaataagggattattctactacctggaatgactgatcccaatatccaggggaaactcagttgccactaacaataatggcaaggaggactatgtctggaaccaggtattctctggggctcttcttactagtctcatattcaatagtaaaagttaatgaaaaacatcagcaaccaaaaaaaaaggaagagccactgaagattcagacctttcagaagaagaggcgagaacaacccctggaccgaccaaagcccgtgtgccgctgcatcccgcgcacagcacctacatcccgctgccgtcgctgctgccaccatgcccaagacaaaggctgaaggtgatgctaaaggagataaagccaaggtgaaggacgaaccacagagaagatccacaaggttgtctgcaaaatctgctcctccaaagccagagcccaagcctaaaaaggcccctgcaaagaagagaaggtacccaaagggaaaaagggaaaagtggatgctggcaaggaagggaataaccctgcagaaaatggagatgccaagacagaccaggcacagaaagctgaaggtgctggagatgccaagtgaagtgtgtacatttttggtaactgtgtacttctggtgactgtacagtttgaaatactattttttatcaagttttataaaaatgcagaatttttttaagctatgttgttagcacacagaacacttcactgttatattttggggaaggggcatatgtcactaatagaatgtcttcacagctggactgatgtggggaaacatctttcccttctagttgtgagagacttcctcttggctcccaggaggagggattccctgactttgacacacgtggccactttggcacaaaagccttgtggtatggaaaaacaaattcgtttttatgtcctcttctccctctctacctttcagcatagacttaactcccttaagacccagacatctgttgggacctgacccctaatcattggttaccagtgtgtcaggcaatctagactttccagtgatgccactgagatggcatctgtcgaaagaacagtgcctccatttttagattgtggatcttcagataaattctgccattttcatttcacttcctgaaagtcagggtcggcttgtttaaagttgttaaacaacatgctaaatgtgaaatgtcaaccctcactctaaacttttcctgttcagagcatcagatga

SEQ ID NO: 2227 - DNA, 6000 bp, Homo sapiens
gcttgccacggagaagcccctggtgagttcctacctagccttacctttccaatcccggttagcccagagtgcaccagtccttgcagagccaggctcgttgggccaggggcaccttgtctcagtgactgaccacatgcctaccagagcttctccaggaaaaggcaagccccgggccagggggatccccagaccccgggggcgtctccaaagggccaacacgactgtgaatttgactgctatggacacaaggacagacgcagccagacatttagccacaatggccaccaacagacctagcttggctatcaatttagccacaccaaacacatcccaactggacacaggcacagagttccctgccctggatatcaagctgggcacagccagagacttgtcttcggtagggacagtcaagtcaggcaaaaccgtgaacttggctacagcaggcacaatcaagccgggcacagccatgaatctgactacagttgggacaaccaagccagggatggtcatggatttgatagcctcagaaccagacaagctgggcaaagccatggctacaagaagcacagccaaaccagatatgaccacagagggtatagccatggattcagcaacatcagacccagtcaagccggacacaatcacagctacagtgggcaccagtaggttggaaacagccatggctttggccagagtgaacagagccaagctgggcacggctaagaattctcttgctttggacacaagcaggatgggcacagctgtgggttcagttgtgccagtaaccccagacccagccactgggaagaccacactgggcagtgttaataacctaaccatatcagacgttgctacatgcctgctaatgccaagcagatccacagacctagccctggacaacactaatgctgccatggacagagccacagagcctgcctcactggacctggccacagaatacaaaggtaaatgcagaaacttggttggggatggactaggctgccgggagggggaggtgtgtgagcttggagatggatcatgcttgcatgggttgagaaacggaggaaggactctaaggtcagggttgaatgggttgggagaaaaggaaatgggggttgtagggccagacatagggactgtaccctgagctgggttctaacctgccagtctgaggtcaggctgagggaaactatcagaaagaaggttttggccaggtgtggtggctcatacctgtaatcccagcactctgggaggctgagatgggaggattgcttgagtgcaggagttcaagaccagcctgagaaaaatggtgagactgtctctacaaaaaataaaaaataaggggctgggcacggtggctcacgcctgtaatcccagcactttgggatctgcccaaggcgggcagatcacaaggtcaggagatcgagaccatcctggctaacacggtgaaaccccgtctctactaaaagtacaaaaaaaaaaaaaaaaaaaattagccggacgtggtggcgggtgcctgtagttccagctacttgggaggctgaggcaggagaatggcgtgaacccgggaggtggagcttgcaatgagccgagatcatgccactgcactccagcctgggcgacagagcgagactccgtctcaaaaaaataaaaaaataaaaaataagggttgggcacagtggcgcacacctgtaatcccaacattttgggaggccaaggcgggtggatcacttgcggtcaggagttcaagactagcctggccaacatggtgataccccgtctctactaaaaatacaaaagttagccaggtgtggtggcacatgcctgtagtcccagctacttgggaggctgaggcacgagaagcacttgaacctgggaggcagaggctgcagtgagccaagatcgtgccactgcactccagcctggtgacagagtaagactctgtctcaaaaaataaaataagataaaataaaataaaaaattagcagggcatggtggcatgcatctgtggtcccagctactggggaggctgaggtgggagaattgcttgagcccaggaggtcgaggctgcagtgaaccatgattgtgcgacagagcaagaccctgtctcaaaaaaaaaaaaaaagaaaagaaaaagaaaggttaacaggggtaacttgtggaggagcaattatggtgagtcctcctttcagcatctcccgggattgtttgtttcctgaagacctggaataatcaggtgatcaataggtgtgtccacctttaaaagcagtggctcacacctgtaatcccagcactctgggaggctaaggcgggtggatcacgaggtgagttgttcaagactagcctggccaggccaggcgtggtggctcacacctataatcccagaactttgggaggccgagacaggtggatcacgaggtcaggagatcaagaccatcctggctaacaaggtgaaaccccgtctctactaaaaatacaaacattagccgggtgtggtggtgggtgcctgtagtcccagctacttgggaggctgaggcaggagaatggcgtgaacccaggaggcagagcttgcagtgagccgagattgcgccactgcaatccagcctgggtgacagagtgagactccgtctcaaaaaaaaaaaaaaagaaaaaaaactagcctggccaacatgatgaaaccccgtctctactaaaaaatacaaaaaattagccaggtgtgtaggctgagacagagaattgcttgaacccgggaggcggaggttgcagtgagctgagattgcgtcactgcactccagcctgagcgacagagcgagactctgtctcaaaaagaaaaaaaaaaaaaaaaaaaaaaaaaaaagcaagcctcctacctcctacgtgaaaatactgactagcgctttaggaagttgtgatttgtctaataggtagtctctgcagcctcctctggatgtgagataatgacctcactcgagactttccaaatccatttacgctcagccttttaggaaggtatctgttgcttaaaagttgtcttacctgaatgtctctttcttggtcccccacccccagccctttaatcctgaaaggtaagttggagccttgtatatatggaagtcctacacagaactctaaaatagggcaacacaagggctggacattcatttggtcttagaaagcctgtgacatgcctaaagtcacaccaaagctggctggtggcagtaagctgattggaatccagattgttaaaatctctactttgggcagcctcattcccaacatttcaagggctcagagtttttgggtctggaaaggtgcctagaaggcatccagtctaatgccttaattgagtcgttagattgtcagacccctttccctccaccccacacactcagtctgggcacctcacctaaattctggtcttcacttctccctacgagatctcagctctccctccatctgcagcccagccctgtctcctgaagtgcagatgtgggcagccagcagcctgctaggcttatctacccggatgtctcccgggcatgtccagaggtagcccttttcttcttgaactgactcctgcctccctgatctcactctctcagctgtaggcattgcctaccttttattaggtgcctagaaacccgggtatcctcttcttcctcatctctctcttgccatctcatccagtctacttcccaccttgttggtttacctcctcagtactcaactatctggctggctgtcccctcctctccatccttctgcccctgtgaggccacctcccacccaccagcttgttccctgtccacacacaactgctgcaacgactcccacattgaatggcagcactttcggcttaatattcgtcagtgactcaccattaccttccattaaaatccagcttccaaggctgcgtgcggacttctccagcctcttatttagctctacacacctgtctggaattttctctgcttcagcgacaccaaggactctgggctgtccaccagcaccacgcagctctcacctctggagaccctcacctctgctgtcctctctttgcagaatacctctccctttccattcttcccttccactcccatttgcctttccatctggccctcatctcctccaagaagtcttccaagccccctctccccagggtgcccacctgcctgcaccctcagttccctgtgtgcaccccggcccctgcattaggacattccatcttcctgtctcctccactagacccagaaccttcgaggggagggatggttgtcctcacccctgtgaggcaatatgctgtccattagtatccactgaatgcgtgaaatttttttctaatgggcaaactgaggctcagagaagttcctgtctggctcaaggttattggttcatcattctggagcagggcctggaacccgggcccctgactcggctctacaggcacccgcgcaacaccccagcccccgcgtgactcacgcgcgctcacggccgcccgcagctgccactggtcccctgcgcccctccgcccgtccccgccgcagcccagtgggtaaggggcggggagcaggtccagcggggagagacgggactgggatgcaggcacctttccgggcctggcacctggagcccgcgggggcggctcctggaccgcccgcagcgtggacccgggaccagttcccgcttgcgggcgcgggcgccgcgggaaggggaggggccctcggcggggccgacgggcgcgcggtcacgtggtgcgggtggcagcggcggcggctggcggcggcggcaacggtgcgcgcggacaggggcggcgcggcgccgagcgagccgaggcgaggtcccggggagggcgcggcggcgcggggcgcaggggcggcgcggcggggccgcgggccgggcgggtgggaggagagcgcgaaggggcgaggcccgtttgcaggggccgctcggcccggggaagcccgcgccccgctcagccttgcagccccgcgcccggagcatctccctggaggaacggagacaaaggaggattcatgtccaaaggtagggcggccggccaggccaccggcacccgccaggaggaggctgcggccccggccagcgcggctggaggcgctcctgggggagggtttccgcgccgaggagcccacgcgcggtgacagatgcgcggacacacgcacacacggtggcacccacctcgagagagacaatcttggagagaggcagacataggacgcggggagacgcagggacccacggacacgcaagcagggacccagatgcgcacagaaagccccatgctggagtacaccaagacacgcacacacacacacaccacgcacaggtgccagggccatgccagccggatgagagacctgtgcactgatacatacgtcccctcccccgcaacccctacaggcacacgctgagacaggcaccagctggtggtctccaagggaacccgttggcctccagaggactgggatgggggaacgggtgtcccagggccctctgctcctgcgaatgggaaaggaccgagagagctttcgtgattccttttcccagagcctagggctggaactggggtgggctggaattgcctttgtggggggcggtggggtcctgaaggctgcggggggctgaggaagatccatcttcagggtggaaggaagagggggggcctgcactaagcaggtgctattttggaaaagtaccctcccccagctgctaccttcctaacacaggggtggggtccctgggccagacaaagccaaagccattcatttgcctgtaaaaggaagtgccagggtctttgcttagcatgggaatggaggggctgtttcttggctgcaaccgagtcaggtggatggtgcctctccctggagcactgatggggcaggtagcttctggcagagggtgctgcaggcagatcccccttctccaggggccctaggagagccaggagctgaggggggccccaaggaccatctagccagg

SEQ ID NO: 2228 - DNA, 6000 bp, Homo sapiens
tgactgtggattatccaaggctggatttggctctctgacctcagctcacgcacacaggtgcacacacccctcttttccattaccctgacacttgactaccttgtttcttctcctcgcctctaggttcgcaaggagcttgaagtaaatggcattgaattctacccccagaaggaatttgatgaggatttggaggataagacggagaatgacaaaatcagggtgggtgcctggggcactgctcctccactgatgcccccttgcgacctctgggatgtgtattgtgcacgtcctctgtctgtcttttccctttctgtactccccccaaccttgcctgacccagaccagaagtgacatagggggatggggaggactatggccctggactgtgaacccacagaagggctccctgtacccagaaagccttctatccccagaccacataaaagcctccttttccccaacaaggtctggcaaaaacagtatttggggtgatgggaggggcagcaggcaggaagagcatcaggctggggtccaggaggatctatgctgtggtcagaccctgccttagtttcccctctatgaaatgcaggggttagactgagtggcttataggcttcccccgctagaataacttaaaaaaattaaattggctgggcgtggtgactcatgcctgtatcccagcactttgggaggcctaggtgggagaatcgcttgagcccaggagttcacgaccagcctgggcaacatggcaaaaacttatctctacaaaacctgcaaaaattagccaggcatggtggcgcatgcctgtaatcccagctactcgggaggctgaggcaggagaattgcttgaagccaggaggtggaggttgcagtgagttgaaattgtgccattgcactccagcctgggcaacaagagcgaactctgtctcaaaaaagaaagtacaaagcgctctgcagctgaaggagagctgattcctgaggttaaccagtgaggcagtggtacaattgggactagacccaggactcttcaatctcagtcgggtgctcttttcaagagactgagccttgcccttgccatcagtagtatctctgaatgagcatcagaagtgtgtggttcaaggctagaggaccatatgccatcctgctcctgaaagtccaggttgttggaggatgacggtgcacatgtgtctggtttgtgtttctgccccgtgcagcaggagagcatgccttttgctgtggtgggaagtgacaaggagtaccaagtgaatggcaagagggtcctcggccgaaaaactccatgggggatcatcgaaggtaattcactgcatcttctggaagaactggttgctgatcagttatccagtcaccatttattaagcatctataggtcaaggcactgtctcaggacatatgaaatgaatgccagccagattctgcccataaggagcttacagtctcattgagaagacgatgctcacaggcaggagtaacaagagactgatttagcacctgactgggtggcactgacttagcgcatcaaaggagttcagaacatggagagattagtaaggcctggaaaaactggagaaaggttttcataggaagggggatgtgatctgacaaactgccggagggttgttcaggtgttgccatttccattttattatgaatggatgtgaccctgggcgggtcttgatgattctgaaagtggtcaaagaatcactttaatgatttcattcaatatgataaccctatgaagggaggagagcgggtgctcctgttctcagagtataagctaccaaagcaccggaagctcaggttaaaagccttgtccaaagcacataacttgttagtggtgaaacttgatttcagactcagattttttttttttttgagacggagtctcactctgtcatccaggctggagtgcagtggcgcaatctcagctcactgcaacctctgcctcccaggttcaagtaattcttctgccttagtctcccaagtatctgggactacaggtgcggaccccgatttttgtattttttatttatccccaaaaattagcccagctaatttttgtatttttcgtagagatggagttttgtcatgttggtcaggctggtcttgaactcctgacctcaggtgatccatttgccttggcctcccaaagtgctgggattacagatgtgaaccaccatgcctggtgattttatttttatttttaatagaggtgggggtctcactgtgttacccaggctgatctcaaactcctgggctccagtaatcctcctaccttggcctcccaaagtgctgggattacaggcatgagccacagcgcctggccccatgtcttaatcctcattctgttccaacagtgcttggccaatgatttgcaaatactaggtattcaatatatgttgaattggatttgtcatgtagtgcatgacctttttaaaatggctcaattattattttctctgtgttacttccaaccggattataagcttctgaagaatgggaagtgtatcttaggccttggccagtttctcagacttggtattagttttctcttctataaaatggtaaaaattatagtccctcttggctattatgccacagcgtctagaaggatgtcgtgcccattgtagctgcttaatatttgttcaatgaatcaaatccagtacacccaagtgagcaaatctctggaagggttacaaaaaatgacctgtcccatagctttctcctaaatgcctccgtgacccaaacagaagctcacctcctgggtgttgctgtattaatgaactgactacctgttttgctttgttttgttttgttcatagtggaaaacctcaaccactgtgagtttgccctgcttcgagactttgtcatcaggtaagatgtctcccctccagctgtccagacagcaggttgaattatttggggtcagggtctatctgttcagattcacctcctgcatctccaggtctctctgacagagctttctgccccagttccagctcctgttgcaaaatggaaggtgctgtagaagaatccttagctcctgggagtggttcccattcactgggtccagtccctcgaagtgatgtgtgtcaccgcctcctcttcctgcccctaattgcagccctcttcttctcaccctgtgtcctctaggacccacctccaggacctcaaggaagtgacacacaacatccactatgagacttacagggccaagcggctcaatgacaatggaggcctccctccggtgagcgtggacacagaggaaagccacgacagtaacccatgacgaccacttctctgtgtcatcacacatacccacttcacacacacacatcccaaataccaccaccaaccaccttcttcctctcaactctgtcccacaggcctgtctggtatttgtggagcatcttgtctgtgtgtgtgtgtgtgtgtgtgtgtgtgtgtgtgtgtgtgacagagagagagcgagagagcctgtgtgtgtgcatgcaggggtgaggtattttcactgccctccctggagagtcccttgtaagtttggctcctccatgcctgtccattatctgtctcctttccttgtgtcccaaaacaaagctgtttgcctcactcaggagatctgggggaggtttcatttaaaagtgctgggagcaggtgagccacaggcaactcttctctcggaacctgcacacaaactggggctatagagattctccaaggacagatggcagtggagctagacctgagtagggggcagggagttcaggacaaccctcctgtaagttgggggtggtctgggggtaaggctggggcttcctgggaaaaggaaggccatgagaaggcagagaagtaggccagagctgggttcttgcagaaagcatcagtgcctacaaatggagctccacccttcagtctgtgtcgtgttcagtgtcacaaagctaccacctgtcaccagagcctactgctgctctccactcaactggcctctgctgccaggccactgcctgtctctgcttccgactttgtcttctttctccctttccctccttccctcatacattgctttctctccctctcctgcgtgtctctgacatctctcacttccttttagatgaatctactttaggttcattcctatatttagcatttatgcccagtctacttccagaaatgactttagactgcctttcacataaaatcacaaaactacaggacagtacaaacagattgccagagaaatctgggtcaaagaaaggaataggaaagaaagtttctgtagtcaagcacctgaacaggccctgagctcacaggcagccaatgtaaagagggaaacacagtgagttatgcagttcccagtgtccagttaaaggaagcacacatgctagtcatgtgagacaaccttttattgggacatcaggttctagaactaattctaaagaagtatcagaaacaatatacataatttgtctttcttagtaatttggcttcaaagacaaatttttgaccacacctccgttttctccgtcagacttctctcccttctaagcaggcttctctgttgctccatttgcttcatacatacttgacctctcttttctattccccatcacttttgtgctgaagctaatcatatttatgtctgtctttctctacttttccctaattccctctcctcctgactcctgtagacattcccaatgatacccaccgtcatacatttaggcttttcttgcctttccctgaagccctgtatttattaatgcatatatttcccctgcttgttgtacaagtaagttactcttttcctttaatctgtaagattcatgaaattcggggccagggaaacagtttagccttagggaagggaaaacactaagtgaaactgtttacaataacctcatacaaccttctgtcccatctcctggttcagcctaggtgtttcactggtcctctatgaatcccagcacttataatcccagtcttttatcactcaggtgctaggaaaaaaaacatagactcaagacccaagattcaatggaccaggagaaaggggggcggtgatcaggtcaccagtgaccccaacctatgctctcggtctttcctggaggctgccaacccagccctcatcctcccttgctcacaaagttacagggtaggcacctgtcaggacagaacagcagcagcgctacagcccagaggttatacatttcaacagaacagggatccttggctactgtagaagcagtcctgtatggagaccttggaccagcaggggaagatctatgggcatgggaggtgggcgttggaaaggctgagtaggaatggtgcctggcacccctgaaccatgatctgagcctccctggagaaggtattttatatgtctgctgccagctgctggtctccacaccctcaaccgttctcaacccccctgcagggagaaggcctcctgggcactgtccttccacctgtgccagccaccccctgccccactgctgaatgaaggccatttcaagcgctgcttctcactccattcctctcagctgttattgctgcagggccaagccctttttagtgctgtgctcgtccagctcaccaccacagcccctctcagccctcagtaggtgggaggggccagctgcctctttaggccagttgcatcctccatttatccaaaccactcctctcctcccagtggagtggggttctgccagtacagccctactgcatcatctgcgtcagccggtcctagcccatctgcagggtgaaagaactcatcaagagctccttctgcccttgtaagcccatcccagctacttgtaaccatctctaagggcaatggcattgctccctacccattcatctgcatgagctactcttggcttccttaaagggtcaagaaagcaatttttctgcttactagattcattgagatcagctgtgtgagccccaaagtgggacaagggtgtctccttcattacttaa

SEQ ID NO: 2229 - DNA, 6000 bp, Homo sapiens
ccaagagagcagggatgttgtcgtcttcgttacccggtctttccggcacagaagtggctgggcgggtcagtgctgctcgagtgcaggcatgaagaggagctgggagagcagaatgctgctgacctcagtgaggacacatggggctttctgcagttccctcaatgagaggctgtttcatgccttggagcctttgcccaagaggttccctgggcttggggagtcctggtgagggcatgtgaccaccatgcctgcaactacacccccaaagtcccctgtaggaatttctaccacagcacccaagagactcaggaagacctgcatctttcccattcaccttccccgcagactgggagggcagggaccgattctgagttacctctgcacgccggcatccaactgggaccccgacacggaaagtgttttccacatgactgaggtgtcattgcaggtgtttccctcctggagggcaggctctgacttttctttccccacagggccaaagtagcatgtggctgtctgtgcacattggtaggactttaaacaaatcccacaaaaactgtagggttgcttaaaaaaaaaaaaaaactgtagggttgcttaaaaaaaaaaaaaaactgtagggttggtttgttgaagagagcgttgagaccagctcgtctcttctgtttcattacctgcgcatttttgttcagcacgggcgttcttccattccctttgctgctgcaaagaccattctctgttttgttcctcttggaatttcttcctctcatggaagtttaaatcctctcccatgaatttctgcattcctgatatcgtattccgaacatcattatctgactgccgggctggaagatctttcttaagggctagggggtcggacagatcaaattcacggcgagtttctggcttctgaaagctctgttggaagtcattgatagccctacagagatttttcctatccctctttttccggttttccaatatgcacatgattttgtcattttgcctcatttcagcagctggaagagatacagcatatccataagcttaggattcagaggaaaaaataaatttgaatccattttattttttattatttacttttttagagatagggcctcattatgttgcctgggctggtctcctggcctccaaccatctttctgcctcagcctcctgagtcactgggattatagaagtgagccactgaacccagcccatgaatctactttaaaaactaattttttcagtgattgcaaaagtaatacaaccctccaaaaaagtaacacagccattaaaggattagtatcctgaatatacaaagagtacctacaaatcaattaaaaaaaccccaaaaccccaacccaataaatgggcaaagtgtaggaacggccaggcagatcactataaagaaacctgaggctgggtgtggtggctcacacctgtaatcccaacactttgggagcccgaggtgggcggatcacctgagatcaggagtataagaccagcctgaccaacatggtgaaaccctgtctctactaaaaattcaaaattagccgggcgtggtggcaggagcctgtagtcccagctactcgggaggctgaggcaaaagaatcgcttgaacccaggaggcagaggttgctacgagccaagatcacgccgctgcattccaggctgggttacagaatgagactctgtctcaaaaaaaaaaaaaaaaaaaacctgagtaatcaatacaattatgaaaggatgatcacccatacaaggtgggaaacatccaatgaatcgaaggcaaaatatttaaaatgctaataatggcacacattagtaaggatgtggggaaacaagatctctcatttgcggccaggcatggtggctcacgcctgtaatcccagcactttgggaggccgaggtgggcggatcacaaggtcaagagatagagcttatcctggccaagatggtgaaaccccgtctctactaaaaatacaaaaattagctgggcttggtggcacgtgcctatagtcacagctacttgggaggctgaggcaggagaatcgcttgaacccgggaggcagaggttgcagtgagccgagatcgctccactgaactccagcctggtgacagagcaagactccatctcaaaaacaaaacaaaacaaaacaaaaacctctcatttgctgcttgtaggagtgtaacttggtacacttacaacgaaacaatttttcaatatcccataaaactacctttgatccatcaattccacttctagttatccctttcacatgtgctagggacacaattcttggacagtcattgcagcagtgtccacaatgacaaaacaactgaaaaaaaaaaatctaaaccagccatcagtatgggaatggatgaagaaactgtagttaattcatataacaaaatgccataaaacaattaaaatgaatactctctatatgtaaatcactgattaatttcaaaaatacaagcctggatgaaagaaaagcatactgcaaatggatctattcaataggataccatttacataaattttaaaaacacataaaaacaattttatattgttatgaatacatacataaatagtacaagcataaatagtgcgtgggggctgggcctggtggctcatgcctgtaatcccaacactttgggaggcagaggcgggaagatcacctgaggtcaggagttcgagaccagcctggccaacatggtgaaacctcgtctctactaaaaatacaaaaatcagcccagcatggtggtgtgcacctgtaatcccagctactcgggaagctgagacaggagaattgcttgaacccaggaggcggaggttgcggtgagctgagatcgcgccacagctctccagcctggaagacagagcaagactccatctcaaaagaaaatagaaaaaaaagcatgggaatgataaacacttctgaggagaaaggaggggaaaattaagaggtagggggcagggcagtgttgttatatatatatatatatatatacacatatataaaaaacacaattctcaaaaaacactgaagatatctgaagccaatctggcaaaatgttaacatctagtctgatggtgggtacatatgtacctgtcacattgtttttgtaagattgaattacctcataactaaaaatattaataaaaaagataaaatgtttagaacatacagaacagtataaaggagaaaataaagtttactcataattctatccctccaacattaccctgctaacattttggcatatttcctctcttcttcttctgagcatattttaaaatattttaaaaacataacagcccattgtatgtacaattttgtatcctgcttttttttctattataaaaatctttatggtgtttaaaaacactgaaatttcttttttttttttttttcaatttattttttgtagagatggggtctcgctttgttgcccaggcaagtctggagctcctggtctcaagtgatcctctagttttagcctctcaaagtgtgaaatttcaacaattgttgaaattgttggacacgataggggaaaataagttgtatttgaagtggaataataataccttgaataacagtattcaaggtacttgaatactatgatttgaatcatgtctgtctctgagtcagcttgagggtgtgagcccggacatatgtgttgtctggtataaacagctgtccttcatagacggtcttaaacttttgagcagagcaagtgagtgtgtgtgtgtgtctttctgtgtttaaggcttttcctatccagttttttaagaaaatgaaggaaaacatacatatacccttaaaatctatttcttataatccacattcgaattcaatagctgtttttaagagaagaatcagtgcattaagttaactgggcacaagaaattgtgaaatttaaaaggaagaagagtgtgaaaatgacaactttttatatatgtgaagaaaggagggctgggtaccgtggctcatgcctgtagttccagcactttgggagactgacgtgggaggatcacttgcacgcaggagttccagaccagcctgggcaacatagtgagaccctatctctattaaataaaaaaaataaaaaataaaaaaaaaaaggcggggcagggggacggtggggaagactggagtctaaagccacacaatcctaaaccaatagataagcattcaggaaatgctcaccaaagtttcatgtctagctttttcagtagcttcttttatcttctggtcatgaacttgaacatcccaggcttcagtgtctccctataaatggaaaaacagaggagaagggttagagccagatcattttattcagtaataacaatcctacttattattatttttaatctctgccccactgtaaacgagttgtagaaaatctggctcaggggaggagaaccgttggtgactccaggcgagctcgagagggagcattattggccctgcaggaggccgtttgctgcctcctggctcagatgtttcatcctagaactcatctcctttccccctccacgcagcccctcgcccgcatctgccgctctaaccccgtcccggcccctgccctttcaccccaattatcctgtttctggcgttgaagacccgcttctgcctgcacagctccgcgtgcctcctctttgccaggttggcgtcctgccgcaagtccctgggcagcgccaccgccatggtctgggaacccatggaaagcctaaggggtttttagaacacgcaggatcaggagaacaggcgacgaaaataaggaagctgtagcgcaggcaaggtcggctccttcggtcgggcaggggaaagacaagcctttagcgcagttttccgtcgggctcccagtgacgccgcagaggtacagacgctcccgctctctcggaaatgtcaacaactcgttgctaaggaacggctccgcgcttgccgcgtctcgctctcttctcgcgacacttggcgaatcccttcccgcgctttttccgcgggcgcttgataacgcgggtgaggcgtggagggcggcgccatggcccacctggagctgctgcttgtggaaaatttcaagtcgtggcggggccgccaggtcattggccccttccggaggttcacctgcatcatcggccccaacggctctggtaactgagcagctcagggcgccaccggagcgcctccgccgtcccaggcgtccaggccacacgtggcctgtggggtgtgggcgtctgccgcgggcgcctggccggccttccccttccagtcccggagcctgaccgcgaccggatcccggcctggccctggcccagcccctgcccatcaccccacctcagccccggtcctcgccgtccacctcaggggtcccgacccttgtccctccgccccacctcggaggtcctgacccttccactcggccccgcctcgggccccgctctcgccctccacctcctggctcccgaccctcctccgacaccctgagggaccccaccccacctcagctccggccctcgcccttcatctcaggggctcccaaccctcgccccccaccctgggggtcctgacgcttcctctccgccccggtcccgccatgggccctgttctctgccctcactcctgcttcggggactgctctggcccttggccctggtcactcgcgtcccttttcccttctcatccgaagttgaagtgagagggagctgtcgaggaggtaatgggttccaagcagccagaaccaccatttggatccaagggagctttgacccaggaatgtagtgatgatgacccagtttactgagcttttcctaagttcctggcgacaccgtctttggttagccatggcgcatggctgctctccccattttatagttggggaaactgaggtctggagaggccagaggacctgcggaggtctctactaataataccaaaattagctgggtgtggtggcacacgcctgtaatcccaactactctggaggctgagg

SEQ ID NO: 2230 - DNA, 6000 bp, Homo sapiens
tcgccactttcctccacatatataatttttacacttgcagaagaagaaataggttttccaatatgtgctccatgaatgagttcttgaatatttttcactcttaaattagctattttctctcccattacaaaactaagtgcatccattacattagattttcctggggaagaaaagagataaaacattattcattcttaatgataaaaagccctacccagagctgaagaaatcaggccaccaatcgaagtgaaatatagccaaaagacatgtcctttttaatcaatgttcaaaatgcatgactgaaatatttgatgtagataactcatttcttctatgcatctattgtagactattaagaggtctaaatttaaggactgaaatacacctatctaaatcccagctctcttccattgttaggtatcacaccatggcaaatcatttaacttcactgagtttcaattatcctcattttataaatatggaaactacctaaagcattggtgcagcaccaaatcctcttatactctaaaaaagagaggctaaggctggacgcggtggctcatgcctataatcctagcactttggcaggccaaggtgagcagatcacctgaggtcaagaattcgagactagcctggccaacacggtgaagccccctctctaccaaaaaatataaaaaatagccgagcttggtggcacgcacctgtagtcccagctactcaggaagctgaggcaagagaattgcttgaacctaggaggcggtggttgcagtgagccgagattgcaccactgcactccagcctgggcaacgaggagagactccaactctaaataaataaataaataaataaataaataaataaataaataaataaaaacaagagaagctaactaaatccaggatcgagggctagattaaaattgtttgattggtatgagatggtgctacagaaaatttatatagcaggcttgatactgttatcttttgaaagtcctacttacaaggttggctggcttacagggatttggatttggatgttgggagggtttctaacattccctattaagaatggctcacagtgcctaaactatctgtacaaacaatatgatttaatctgaacatatgctttctttctaggattctggaatattattttataatttcttttgaggaaggtctggcctaagaagattctggaacttgggtacatgataggcaaacggtgcctatgtgacaatctcccgataaaaacgctgcacattgagtctttagtgaggttccctggtgggcaacatttcacatgtgtggactagctgctggaggaatgaagcactgagtgacaccaatgggtaaggacttggaatcttgcaactggtttcctaagactttgcctcatatatcctttccctttgctgagttcgctttgtattttttcactgtaataaataatagtattgagtcaaactatatgtagaatcctgtgagttttcccaacaaattactgaacctaagggtagttgtgggcattcctaaccccaatgttaaatctgttacccaatcattggcccataattttctctaagacaatttccaaggtgcaatgtcaatgcagctgtcaccatcactattatttctccttttcacatcccttcccctatatccacaaagcagtttaaattttcaggctgggcgcagcagctcacacctgtaatcccagcactttgggaggccgaggcaggaagatcacccgaggtcaggggttcgagaccagcctgaccaacatggtgaaaccccgtctctactaaaatacaaaaaattagccagctgtggtggcgtgcgcctgtaatcccagctactcgggaggctgaggcagaagaatcacttggatccagaaggcagaggttgcagtgagctgatattacaccactgtactccagcctgggcaagagagcaagactccatctcaagacaaaagaaataattaattaattttcaatgccaaaactaggaaagtaacataaacaaagcaaaggaatactatcagccaccggaaatatggcttagttttagaggtttagggtctttctaaaaagaactagaaataaattgctgcaaatttatttagctgagtctcagtcaactaacaggtatgaaacggcttttttgggttaatggataatctgcacattgagggctattgtaagacagtgcatatggacaagataaacattcactgaattaaattattaagtaatttaagtattaagtaacaaaactaaacataaacttttaaaatcaataagtcaatccttatttaaatctgcctaaaataaatacttctcatccaaatccatttattccattaaatttcattaatattgtccctgcctaataaaggttatagtctgtcaagagagtcaaggcagcataacataccacaaagtggcaacaacccaaactatcaactgatggataaacaaaatgtagtatatctatacagtgaaatattatttgaaaataagaaggaaataagtactaatacaaggagcaacatagatgaatctgaaaaacattatgctaagtgaaagaagtcagacacaaaaggccatatattgtctgattctatttatacgaaatgtcccaaataggtaaatccatagagacagaaagtgaattagtagataccaggagctaggtggagaggaaataacagggagtgattgctaatgagtacaaggtttctttgggggcaatgaaaatgttttggaagtagatggtgatgatggttgcacaacttttgaatatactaaaaaccactgaacggtgcattttatttatttatttatttttacttatttatttttgagatgcagtcttgttctgttgttgcccaggctggagtgcagtggcgtgatgtcagctcactgcagcctctgcctcccaggttcaagcgattctcctgcctcagtcccctgagtagctgggactacaggcgtgcgccaccacgccaggcttttttgtatttttagtacagatggggtttcatcatgttggccaggctggtcttgaacccctacctccagtgatctgcctgcctcagcctcccaaagtgatggaattacaggtgtgggccaccatgtcaggccttatttttttgttgagacagagtcttgctctgtcgcccaggctggaatgcagtggcacagtcttggctcactgcaacctccgcctcccgggttcaagtgattctcctgcctcagtctcccaagtagctggtattacaggcacgtgacaccacccccagctaatttttgtatttttagtacagacaggggtttcactatgttggccaggctggtttctaactcctgacctaaggtgatccgcccgcctcggcctcccaaagtgctgggattataggcatgagccacggcgcccggccaattttattttatatttatcttattttattttattttagagtcgaagtctcgctcttgttacccaggctggagtgcggtggtgctatcttggctcactgcaacctctgcctcccgggttcaagcgattctcctgcctcagcctcctcagtagccgggattacaggtgcatgtcaccacacccgattaatttttgtatttttagtagagacagggcttcaccatgttggtcaggctggtctcgaactcctgatctcatgatccacccgcctcggcctcctaaagtgctggaattacaggtgtgagccaccgcgcccagccttttttttttttttttttttttttttgagacgagagtcgcactgtgttgccaggctggagtgcaatggcgtgtccttggctcactgcaacttccacctcccaggttcaagcgattctcccgcctcagcctccagagtagttgggattacaggcgtgtgccaccacacccagctaattttggtattattagtagagacctccgcaggtcctctggcctctccagacctcagtttccccaactataaaatggggagagcagccatgcgccatggctaaccaaagacggtgtcgccaggaacttaggaaaagctcagtaaactgggtcatcatcactacattcctgggtcaaagctcccttggatccaaatggtggttctggctgcttggaacccattacctcctcgacagctccctctcacttcaacttcggatgagaagggaaaagggacgcgagtgaccagggccaagggccagagcagtccccgaagcaggagtgagggcagagaacagggcccatggcgggaccggggcggagaggaagcgtcaggacccccagggtggggggcgagggttgggagcccctgagatgaagggcgagggccggagctgaggtggggtggggtccctcagggtgtcggaggagggtcgggagccaggaggtggagggcgagagcggggcccgaggcggggccgagtggaagggtcaggacctccgaggtggggcggagggacaagggtcgggacccctgaggtggacggcgaggaccggggctgaggtggggtgatgggcaggggctgggccagggccaggccgggatccggtcgcggtcaggctccgggactggaaggggaaggccggccaggcgcccgcggcagacgcccacaccccacaggccacgtgtggcctggacgcctgggacggcggaggcgctccggtggcgccctgagctgctcagttaccagagccgttggggccgatgatgcaggtgaacctccggaaggggccaatgacctggcggccccgccacgacttgaaattttccacaagcagcagctccaggtgggccatggcgccgccctccacgcctcacccgcgttatcaagcgcccgcggaaaaagcgcgggaagggattcgccaagtgtcgcgagaagagagcgagacgcggcaagcgcggagccgttccttagcaacgagttgttgacatttccgagagagcgggagcgtctgtacctctgcggcgtcactgggagcccgacggaaaactgcgctaaaggcttgtctttcccctgcccgaccgaaggagccgaccttgcctgcgctacagcttccttattttcgtcgcctgttctcctgatcctgcgtgttctaaaaaccccttaggctttccatgggttcccagaccatggcggtggcgctgcccagggacttgcggcaggacgccaacctggcaaagaggaggcacgcggagctgtgcaggcagaagcgggtcttcaacgccagaaacaggataattggggtgaaagggcaggggccgggacggggttagagcggcagatgcgggcgaggggctgcgtggagggggaaaggagatgagttctaggatgaaacatctgagccaggaggcagcaaacggcctcctgcagggccaataatgctccctctcgagctcgcctggagtcaccaacggttctcctcccctgagccagattttctacaactcgtttacagtggggcagagattaaaaataataataagtaggattgttattactgaataaaatgatctggctctaacccttctcctctgtttttccatttatagggagacactgaagcctgggatgttcaagttcatgaccagaagataaaagaagctactgaaaaagctagacatgaaactttggtgagcatttcctgaatgcttatctattggtttaggattgtgtggctttagactccagtcttccccaccgtccccctgccccgcctttttttttttattttttattttttttatttaatagagatagggtctcactatgttgcccaggctggtctggaactcctgcgtgcaagtgatcctcccacgtcagtctcccaaagtgctggaactacaggcatgagccacggtacccagccctcctttcttcacatatataaaaagttgtcattttcacactcttcttccttttaaatttcacaatttcttgtgcccagttaacttaatgcactgattctt

SEQ ID NO: 2231 - DNA, 6000 bp, Homo sapiens
aaatatcaatagtgctaaggttgagaaagtgatctagagacacaccagtgaatgcatgattgtcgtcaatctattaggccaacaaatgtataggtgtactgtttgccacgcactgagctaactgggaattcaaagatgattaacactgtctctaccctcaaacagctcaactggatagcaaatatacagaaaataactatgatataaagatgacatgtgaaatatttagatttacaagtaatctatatttgcagaagaaactggttttgaaggtgaaatgggattaggaggagaaaaaggagaataaggacattctttttttttttttttttttgagacagagtctcgctctgttgcccaggctggagcgcggtggcacgatctcggctcactgcaagctccacctcccgggttcatgcccttctcctgcctcagcctcccaagtagctgggactacaggcgcccaccaccacacccggctaactttttgtatttttagtagagacagggtttcacggtgttagccaggatggtctcaatctcctgaccttgtaatctgcccgccttggcctcccaaagtgctgggtttacaggcgtgagccaccacaccctgccagaataaggacattcttaggagagggattagcttctagctgcactggtcagtccttgtatcagccaaattctttcccacctcagagctttacacatgcttgaccatctatctgtaggcttttctcctctttctttgcctaagtcatcctccagatctcagcttaattaaggaaggcctcttgagagagaccttgacatccccctataaagtatttattacaattgacaaaaaaatgtctttcatgtcttcttaatatttatttttgagagggagtctcgcttctgtcaccctcgctggagtgcagtggcacgatctctgctcacggcaatcgccgcctcctgggttaaagcgattctcctgcttcagcctcccgagtagctgggattacaggcgcacatcaccatgcctggctaatttttgtatttttagtagagacggagtttcaccgtgttggtcaggcttgtcttgaaatcctgacctcaggcaatccgcccacctcggcctctcaaagtgttgggattacaggcgtgagccaacgtgcctggccttttttatttttttttgagacagagtcttactctgttgtccaggctggagcgcagtggtgcaatcttggctcactgcaacctccacctcccgggttcaagtgattcacctgcctcagccatgcgaatagctgagatgacaagtgtgcaccaccgtgcctggttaatttttgtatttttagtagagatggggtttcgccatgttggccaggctggtctcaaactcctgacctcaagtgacccgcccatctcggcctcctaaagtgctgggattacagacatgaaccactgcacctgccctccttcatgcctttgtaagtgatttctcctttactaggctgtaaacctcatggtcaacagaccatatctattttattcacagctatatagcctccaacctagctcagtacctaacatatacagtgtctcactcatttcctgtagaataaataagcgaaagaaataattaagattagagtaacacaaaaggacagcaagagttccagagtagtaatgagtacaatgtttctgtatatgagaagcattttagattcactaaatgaggctgcagcggtaggctgaggtaagatcatggggaatcttgaatgccaggctaccaagtttagcttttctcttaagggggtaaggaactactggggctttctgaggaggaagttcatgactgcagctgcatgatggctctgtggagaatgatttggagagggaagtgagacatacagcagactgtatcacaagcaaagagtatcacaagcgttggactgacattagatggagtggataatggaactgaaaaaaaacttcccaggggctcacgcctgtaatcccggcactttgggaggccgaggtgggtggaccacctcaggtcaggagttcaagaccagcctggccaacatggcaaaaccccgtctctactaaaaatacaaaaaattagctgtggcgggtgcctgtaatctcagctacttgagaggctgaggcagtagaattgcttgaacccaggagactgaggttgcagtgagccgagatcacgccactgtgctccagcctgggtgacagagcgagactgtgtcttaaaaaaaaagaaaaagaaaaaccacttccaacgaactgtggtccagccattcaattaactactacttggtaataaaaaaagagtaactattgatacacacaacatggttgactctcaaatgtattatggtaagaagccacacttaaaagcctgcatactaaagaattccatttacatgacaatctgaaaaaggcaaaactacaggggggaaaaatcagtagttgtctggggtgggaaggagaggactgattacaaaagggcttgagggaactttttggggtgacggaaatgttctgtattttggttgcagtagtggttacacaacttgactttttttttttaagacacgggatcttgctatattgtccaggctgaagtgcagtggctattcacaggagtgatcacagtgtactacggcctcgaacttctgggctcaagtgatcctcctgcctcagtgtcctgagcggatggtactacaggcgcatgccaccatacccagcaagtttttgcaacgcttttttttttgagacggagtcttactctgttgcccagtctggtgtgcagtggcacgatctcgactcactgcaagctctgctttctgggttcacgccattctcctgcctcagcctcctgagtagctgggactacaggtgcccaccaccacgcccggctaattttttgcatttttagtagagaagaggtttcaccgtgttagccaggatggtctcgatctcctgacgtcgtgatccgcccgcctctgcctcccaaagtgctgggattacaagcgtgagccaccacgcctggcctttgtcaacagttatagaaagtaaacctaaaaagggtgactggctccgtgacgcctgtcctttcatgaataaaacagatgtagtctcatgtaatacctcaataaacttgaacttttaaaaatcaagaggcatgtgccccactagaaaaaaaaaatacagatttttagcagagacatgaggtcacaaaagtttgccaggatagggaacccaggaggaagaacaaatttagaatagaatatgagttttgaactagaggtctaatttcaaggtctcttcaagatatccaggcaaaccttgaaagagagctgagaagccagattaggagtcatcagaatgaagaaagttatcgaagccaggagactagatcggtatcaccagggaaggtgtgacgaagagggagatggtcatccaaagtcacaactcccaggaatgcccacacgtatgaaaaaggcccacatgtatgaaaaaggcccacatgtatgaaaaagggaggacttccaggaagggagggatgagcagtatcacagctaacatacactaaggctgacacagttcagttctgaccaggaagggcctgaatggaagcaacacgagagatcctccaatggggtggaagcagggctggaggtaccaagaatgggataaggaagtgtggccgcctgccttaagcaactgtagggtcaggaaggcagaagaggacaaagggcgtatgtcgtgaagttccactgtggataggcaggtggacttgcttcatgcctcagaggctaagaggccgactacgtaccctcgaaatgctccaaagagcctaggagaccccacttccgggttcctacagggctcaggaaaagcccctacctgcttcgaaggctgaccgtgaagccacaaggcccacttcataccagggagtacccccactcgccccttcctcacctcgggcccccgccccgtctctttttcccaccctcatcgtgtccccacaacccccggacatccctcggccccgcgcccctgcggcaaagccacatctcccaccgacccactgccctgaggccgaacagccgggggtccctggccgggggcccggctctctcaccatcgcgggcgctggctgggccggaaagcggaagtacggaagtggccagccccgcgatgcctgccctttcgcgagaagcgcagctacggtctccgcccggacttccggacggtaccatctatgctccgagcggggtagagagcccttacgaacgcttgggccttccggaagttttccacctagggctgtctcggtatttttaaattcttgcactcgagtcactatttaagctcctccaggaatgggtgcagcttccctttgtgccttcggccttcttgtcacctttgccacagcctcccccaggtatgcaatggtacagcccagcttcagattgggcaccaaattaggacaagccgaagcggacgagcccttcgtttcttccggttctgtacccccatcctttctctcgcccctcctacccgcagctcctggcgctcggcggggctaactgcagcgcggagatctcggccgccaagctccgcctcccgccccgggctgtgccccggggctcgcctgaggccgaccacccgcaccccacctctagcggctttgctcgaggcccaccttcttcccacccccggcaaactccagtaggctcgccctcgctgactccccgcccccgcgtcaactgcaaggggcccgcccatagccagttccggggcggttgctcacatcgaccggaactccccgccccctcccgcggcccctggggccgtaggaggccgcagcgaggaggtagagggggcgggggtcgcactagggtgtccctagagaacgaggactctgaaggcgggacatttgggcgacccccgggcggggccagccattaaacagtcccacttctgtgccagacactgaactgggctcttgacgggcatcatctcttaatcctcagaacatcccagggaggtaggtactattgttatccccatttttcagattcagacttttaatggggaaacagaccgagacttcttttgtccccattttacagatggaaaaactgagactgaaaaaggtcaaataacatgttcaggggcatataagtagagaatggtaaagcctgggcttgaacccaggtctgtctggcttaccagcccacgttctaaaccactgttagtgactagagaagggagaaaggtggaatagggtaagaaaagaggccaagagtcccagagaacatggtaagaatggggtgcttggaactcaaagtcttagcagaacccaagagaaatagaagggaaggaaagagcatcagaaaggcgaggcaaggcatagcagtatagcatggtgatcagggtgcagactcaagactagcggggttcaaattgcatcttggaagcataggcacatacccacccttacagagtctcagtttctttctctgtaaaaacgagatcacaatggtccttgttcatggtgctgagtgagaaattcagtgagataaactgataaagtgctctgcacctagcttggtacccagttaagtgccctgtgagtaggaactgtgccatcaattttgtcagtaagggactgaagctgggcttccttgaggctgtccctggaggtaagaagcccttgggcttttctcagaccactttgtctcccatcaatggccctgtcctctccagctccacaggatccccatatcctgggccatgagtgagttgaaagactgccccttgcagttccacgacttcaagtctgtggatcacctgaaggtctgtccccgctacacggcagtgctggcacgctctgaggatgatggcatcggcatcgaggagctggacaccctgcagctggagctggagaccctgctgtcttctgccagccggcgcctgcgtgtgctt

SEQ ID NO: 2232 - DNA, 6000 bp, Homo sapiens
agccaatctgaaataattcccaagatagaaggtgcagaatacgtacacagattgtctcaggtcacagcaattgcctctcgagagaattaggagccttcaggtcacgggtgacagggaattaccttttgtattgcttgaatttactgctgtctgtatgaactctttttcagataaatttttaagaaatcagataagtgaagtgaaagagagagatcaaagtgttgtggcagcacaaaggagagactgactaactttctgctggggaatctgaaagagtgctttggtggaggtaacatgagatcagggccttgaagggtgagtcaagtctgtcaaggagacaagagggagagaagagcttgccagaggcccagagaccagcgaggaggctgtggtgtcctggaatgagggcgagatacttggtgggactggtcaacacggcaatgaagagggatatggccgaggaaaatggagaggggcactggagctgtgccagcaaggactgggatgcgtggacttgatcctgtagataacgggaggaagaaaggcctggatgcagcgccatgtcatgagcacatctgatcatgacagctcacctatgggaggattctccctcaacatttttctgtattttctaaattttctttaatggagcatgttttatttattttcatcattaaaacatagttttatatcttcttttttttttgagacagagtcttgctctgtcacccaggctggagtgcagtggcacaatctcagctcactgcaagctccgcctcccgggttcacgccattctcctgccttagcctcccgagcagctgggactacaggcgcccgccaccacgcccggctaattttttctatttttagtagagacggggtttcaccgtgttagccaggatggtctcaatctcctgaccttgtgatctgcccgcctcggcctcccaaagggctgggattacaggcttgagccaccgcacccggcttttttttttttaatggatggaatctccttctgtcacccaggctggaatacagtggcacgatcttggctcattgcaaccgatgcctccccagttcaggtgattttcctggctcagcctcccgagtagccaggattacaggtgcatgccaccgtgccaggctaatttttgtatttttagtagagacggcgtttcaccatgttggtcaggctggtcttgaactcctgacctcagatgatctgcctgccacagcctcccaaagtgttgggattacaggcgtgaggtgacttttatatcttttttttttttttggagacggagtcttgctctgttgcccaggctggagtgcagtggcgtgatctcggctcactgcaacttccacctcccgggtccaagagatcctcctgactcagcctcccgagtagctgggactacaggcgcacaccgccatgcctggctaattttttgtattttggtagagatggggtttcaccatgttgcccaggctggtctcaaattcctgagctcaagcaatctgcccgccccggcctcccaaagtgctaggattgcaggcataagccactgctcccagcccaagttttatatcttaaagaaagaagaaaggttcctccagaggcctcgaaacaggaagagagttaagaggctgtttggatagaagttgatgaaggcttggaccaaagcagaggggatggggataaaggaacatgggcagacttcacttaagtagatgcttgagggcgtgttgacatttggctggggtagaggggaggcagtgcacggagaaagctgagtttgggcctaggtgtctggaggcactgatggagcagacagcagactgggcagggttggggaaggaagatgatgcatggctttggtagctttacttctcaggcacctctgaactctcttgttccgcatcatgtctatcaaggcccagagtttctaccttgtaatgctcagcctcatcttctgggggcttcagtaactcctcaagtgtgcggacctcctcgctggtgatgtcagcacagtagggctccactgaagcccagaacctgcagggagaagcagatcctgagtgggcgcccctgccccaccagtgcctccaccaccagaaccttgaggcccccttctatgttctctagcccagaacctgttgggggcatcatttttggggatccgtggcacgtcgatagggtcatcagtgaattcatattcctggatcttgggctgaaggtttttggatttgggccgtcctgggccagggcccggcccatgtcctgccttcccttccagtttctgcttcttgggcttcccatgtttggggggagctccaagttcatggtctcgacccagcttcaggaatcgtctgtcacctttcttatcctgccagtcggtgaggatctgaaatttacagaaagtgtcactgagggggagaagggaaaacacagaatatctctttcctctagtgaataaattaggatctagaatctacagaggctcctgggtctttccccatcctctttttacctagtaaactcttactcatccttcaaaattcagctcattttctgtgcctggcctcctagaactttattcatatacttctcataatctcattcacttgttcatctatactgattcacttctgtatcacccatgccagtcacatactgtttaacagaagagtcctctcagcaaaccttcacttcgatgtcaccactactgagatgccttctctcaatcagttacccaggttcttagatgctaaaatacaacttgagtcatagccttcctcaaggagggtccatggattcccagggacaagttaattccattcatccttttaggtccagttggcacctccttcctccacaagtctctggcacttcacagctccaacgtgcacccaatcgtgttgtttggtcacactggaatgaccatcacaccttgtctcttcaactagaccataagctactgaggaccagaaagcccaccttaaccatctctattttgcagaatacagcatagcgcctggcacacaaggctcaaggcatctttatgcagtgaataaagtcatcagagtagcaaataaataacatctgaagtacttacttagtgtctggcattgggctgagtttttgcaaaaaattctcttttaatcctcacaaaagcactaaggtaggtcctattattcaccccactttgcagatagggaaactgacactcagagatatgaggcaactttctcaaagtcacatagctaggaaacagcaatgctagcaagcgcttatgccaggattcaaatccaggtttccccattccagttccctaggactgctaaccacaacatcacatcacctggtatgtacttgactttctcactttcctagttgccaagctccctgacagccataactgtcctaattacctttctctaatgactagcataggacccagaacacaatgggggatgagtggggtgccaataaaagcttactgaattagaaatcttgcaatttaagaggatcatgcatattcttgtgtattttttgtgtcatgcaaacccagtttgcgtctctctccctctccccacaaacccctgtaccccaagtctcagcatatggggctaactcaatgacccatcccataacttgttgcagtccatctctggtgctggcccctctctggggttatcacctgggtttcggcctcaagcacacgcaggcgccggctggcagaagacagcagggtctccagctccagctgcagggtgtccagctcctcgatgccgatgccatcatcctcagagcgtgccagcactgccgtgtagcggggacagaccttcaggtgatccacagacttgaagtcgtggaactgcaaggggcagtctttcaactcactcatggcccaggatatggggatcctgtggagctggagaggacagggccattgatgggagacaaagtggtctgagaaaagcccaagggcttcttacctccagggacagcctcaaggaagcccagcttcagtcccttactgacaaaattgatggcacagttcctactcacagggcacttaactgggtaccaagctaggtgcagagcactttatcagtttatctcactgaatttctcactcagcaccatgaacaaggaccattgtgatctcgtttttacagagaaagaaactgagactctgtaagggtgggtatgtgcctatgcttccaagatgcaatttgaaccccgctagtcttgagtctgcaccctgatcaccatgctatactgctatgccttgcctcgcctttctgatgctctttccttcccttctatttctcttgggttctgctaagactttgagttccaagcaccccattcttaccatgttctctgggactcttggcctcttttcttaccctattccacctttctcccttctctagtcactaacagtggtttagaacgtgggctggtaagccagacagacctgggttcaagcccaggctttaccattctctacttatatgcccctgaacatgttatttgacctttttcagtctcagtttttccatctgtaaaatggggacaaaagaagtctcggtctgtttccccattaaaagtctgaatctgaaaaatggggataacaatagtacctacctccctgggatgttctgaggattaagagatgatgcccgtcaagagcccagttcagtgtctggcacagaagtgggactgtttaatggctggccccgcccgggggtcgcccaaatgtcccgccttcagagtcctcgttctctagggacaccctagtgcgacccccgccccctctacctcctcgctgcggcctcctacggccccaggggccgcgggagggggcggggagttccggtcgatgtgagcaaccgccccggaactggctatgggcgggccccttgcagttgacgcgggggcggggagtcagcgagggcgagcctactggagtttgccgggggtgggaagaaggtgggcctcgagcaaagccgctagaggtggggtgcgggtggtcggcctcaggcgagccccggggcacagcccggggcgggaggcggagcttggcggccgagatctccgcgctgcagttagccccgccgagcgccaggagctgcgggtaggaggggcgagagaaaggatgggggtacagaaccggaagaaacgaagggctcgtccgcttcggcttgtcctaatttggtgcccaatctgaagctgggctgtaccattgcatacctgggggaggctgtggcaaaggtgacaagaaggccgaaggcacaaagggaagctgcacccattcctggaggagcttaaatagtgactcgagtgcaagaatttaaaaataccgagacagccctaggtggaaaacttccggaaggcccaagcgttcgtaagggctctctaccccgctcggagcatagatggtaccgtccggaagtccgggcggagaccgtagctgcgcttctcgcgaaagggcaggcatcgcggggctggccacttccgtacttccgctttccggcccagccagcgcccgcgatggtgagagagccgggcccccggccagggacccccggctgttcggcctcagggcagtgggtcggtgggagatgtggctttgccgcaggggcgcggggccgagggatgtccgggggttgtggggacacgatgagggtgggaaaaagagacggggcgggggcccgaggtgaggaaggggcgagtgggggtactccctggtatgaagtgggccttgtggcttcacggtcagccttcgaagcaggtaggggcttttcctgagccctgtaggaacccggaagtggggtctcctaggctctttggagcatttcgagggtacgtagtcggcctcttagcctctgaggcatgaagcaagtccacctgcctatccacagtggaacttcacgacatacgccctttgtcctcttctgccttcctgaccctacagttgcttaaggca

SEQ ID NO: 2233 - DNA, 6000 bp, Homo sapiens
accctaaattagaaaacctgttttgagaaagattttttccctaatttgtgaaactatatatatgaatgtttttatatatttagggaattagaatccctcaggtttattttaaacaattatctggcactaacaggaatacaatttatgatgttcatatcattccagaaaatctaggtcacaccaaagtcggttctttggaaatttgatttccttatataattttcaaggtgcttgaaacaataaattctcatgtgctgctttggaaaagtagaaagtcatttagcctgaattcagaagaaagccgactttatttcttttacttacattgtactttcattgtaaatggtaagtaaactggtgaaataagtatgcgttaatatttaaaacagaaagcaatataaaaaaacccctctgtctttacaagggcaaggcttagccaaatatacttaggtctattcatattaataatagaagattgttactaaggataactaagaattaaaataaataaggttgggtagtgcagtggctcatggctgtaatcccaacactttgggaggcccaggcaggaagactgctgaggccaggagtgagagaccagtctgggcaacatattgagaccttgtttctaataaaaattggaaaaaaaaaaaaaagtagccgagtgtggtggcacatgtctgtagtcccagctacttgggaggctcaggtaggaggattacttgagcccaggaggtcgaggctgcagtgtgccttgatcataacacagcactccagcttgggtgacagagctagaccctgcctcaaaaagaaaaaaaaaaaggttgaataaaatagcactaatggcgctgggcatggtggctcacgcctgtaatctcaacactttaggaggccaaggcgggtgaatcacgaggtcaggggttcgagaccagcctggccaacatggtgaaatcctatctctaccaaaaatataaaaaatcagctgggcgtgatggtgggcgcctgtaattccagctactcgggaggctgaggcaggagaatcgcttgaacccaggagatggaggttgcagtgagccgagatagcgccactgcactccagcccaggcgacaaagcgaggctctgtctcaaaaaaaaaagaaagcactaatggtatttggggcatggttaagattcacactggaaatgatttaattcataaatgcttgaaaactagggaaggggattttatgtttcctcatcctaggattcatttattattttcaaaacttttttcctaggaggatttattttatttaatttaaaataaatgttcagtaattatagccacttccctcagaggaaggttggcccaaggagccccacttaggcattgacatgtctctttattttacactcatatccaactgctgtttctaaaagcaggtgtctgggaagaatgtcagtcatggtccatgtactgggccaaacctgcactttgaccacttgatctgtacccttacagtctgtgcctttactggggataatttcaatccatctgtgggattcagggttactggtacattacagaagctgtatagccttggtaggaaggaatatggcaagaaactctgctagatgatataacaatagatggccacaaaacttgccttttttaggaaggcatctctgagcaaggaataccagatgaatagggttagccatgctgtttggtggagggtatccacatagtacagcaaatgcaaaggccctgaggtaggaaagcatttcctgagtttggctgaagtatactgcagcaccagggagaatgggaaggggtggaccttatcaacttcttgttatataatctcgtgttctgaagttgaaattttattttattgctatgtacctttttaaatctttcccttacttttgaatttcccatgcatttattgaacatatacaaaattgtgcttatatgtcaatgtgagtttgtttttaacataaatggtattatgctgcactgagatttattcaacagtgtttcttagagatctatgttattatatttttataaaggtcattgtgtataacaggtataaaatattctgttgtgtgaatataccacaagtaacctccagtggtcagcctgcctctaccatgcccactctccaagcttttattttctgaatgtagcttctttacctcagtaagtggtaaatactttgtaaatgaaaacattgccttttattttcttggtagttatttcttaaaagtactgtgtgcacagaaagagcacactgaatgcttacaacaacctaattatggaaaagcaataagcctcctgaatcctttgcccttgaaatttccttgcctggtgctcataacacactttgaataggtcttgaaaccacgggccttcagcctaaggcagtatgtcatctgggtactctgagcagggaaataatgaaaaataatgttcagttaatggcacaagccattcgccactcagacagtgatggttttcagagtggattgaaaggagattggctacttctgcttcaaaacatcctggaaattgtctgcctcctgaattctgagggacgcttgggaggaggagttgataggtgacttaatgttaaatctgggttccctcccccaattgtcactgtgaaaattttcaaacatacagaaaagttgaaagaattgcgcactgtgcccattacctagactctattatatggacccctatttgctttatcatatctctgttcatccaccctttacccatgcatggaggcatccatacatcttatttttgatgtatctcaaagtacaaagagcaccattagagttcaatgcttgtgatttttctttttttaaaaatttttgaggcaacatttatatccagtgaaatgtacagatctcaagtggatcattccatcagtttgacaaatgcctgcaaggtggaacccaagctcttattagtatctgttaaatccatgttagaggttgatcagagaagcacagcctttaagactctcaccctgctttgcggagaatggcaaaaatctgcgaaacatctcagcagagccaggagagagtaacactggtaacgtgaagcacgtcaagctaagaaaggaagcactgaaattaattgtcctgaatggaacctgataagaatctgccatttcatcccctcaagactggactcaagttgggagagaatattgccttttgccctgtctaagctaatatcactgtttagatctacaaactcccccacctcccaatgtttatatattaacctgcattacaagtcaaaataacacagagaatctggaaaaagaagaaggggaatgtttcccacgaaaagcacaccccttaaagcgtctggcctgagagctatacagcatgcataaaatctgataataagcacattatgacccacattgcatataacaaaaagtagggcacttctgaagggtcctgagaaaaagccctgggcttttaaaacctgcttaagaaggcgatcaacggtacaccactttcaaacgcagcactgacttgtatgctccacagtcatcaacagtgaaaacaacagttttcaacaagagttggaaacactgagttgagggttttttttttctttttaaagtttgaggccaaaatcgatatttattcttttgaattatgcttatatctttttcctggttaatacgcacgcggtggcacaattttgaaaactacgtaacgttatagaaccaccacccagaaacgaatcctgttaacaaactttttgtattcaaactttttccactgcatagtttttgacaatgctttttagacaatctttcttttagcaaccagcactttcaaacaaaaattacagagaatagtaagtttttttcccctcctccggcagatttgacccagaaattgctatgggaagaaagtgttaattatattaaaaaatagtttgacagaaagtatttaaaaagagaaagggagaacatcacgtctttattttggtgaattagcaacaaagaaaaagattagcatggacgggtacttttcaaaaatatattttttttcctctggctcccgctagggtggaggaagttgtctctctgtcagagacagggtggaagagagtgaaaggacaaatgattgagaggctgccccctcccactggtgcaggcgtgcgggggtcggatggggggccgcggaggggggaggtggccagcaggtgcctgggctccaggcccctacccccaccctcgtccccaccctcacccacacccagggattggcctcgccccctggcgggcgagcggtaggtgtcgaagcactggggtggggggtgcaaaccccgcgggcagcggaaaagaggccgtggggggcctcccagcgctggcagacaccgtgaggctggcagccgccggcacgcacacctagtccgcagtcccgaggaacatgtccgcagccagggcgcggagcagagtcccgggcaggagaaccaagggagggcgtgtgctgtggcggcggcggcagcggcagcggagccgctagtcccctccctcctgggggagcagctgccgccgctgccgccgccgccaccaccatcagcgcgcggggcccggccagagcgagccgggcgagcggcgcgctagggggagggcgggggcggggaggggggtgggcgaagggggcgggagggcgtggggggagggtctcgctctcccgactaccagagcccgagagggagaccctggcggcggcggcggcgcctgacactcggcgcctcctgccgtgctccggggcggcatgtccgaggctggcggggccgggccgggcggctgcggggcaggagccggggcaggggccgggcccggggcgctgcccccgcagcctgcggcgcttccgcccgcgcccccgcagggctccccctgcgccgctgccgccgggggctcgggcgcctgcggtccggcgacggcagtggctgcagcgggcacggccgaaggaccgggaggcggtggctcggcccgaatcgccgtgaagaaagcgcaactacgctccgctccgcgggccaagaaactggagaaactcggagtgtactccgcctgcaaggtacgcgctcgccgctctcggaccgcggatgggtgctaggggcccagcccgcgggacccccctccccctcccgcttccacctccgcctcccgcctcctgcctctcgcctcccgcctggggccgctgcaccgcggaagtgctcttgtcgcccgcgcccaattagcttcttcttggataagagtcctgctgggtttgaagaagggggatcactaagacggagagcccttcattccttccgcttgaaaggagtagcttcggcatccgagctcccgggctaccttggggttttgttgctctgtaggagctcgctggagtcactttcccgggagtggagcggtgctctccatgtggcgggtgacccaggggcaaggaaaaatcttttgggggactgagtggtcccttctgcaatcgatcccttcctgtgtcccactgggaggaactgggtgcaaggagtgggggtggagaagactcccggactcctggcgctttgggaaagcgaaggggaggaaagcgcggggtgggaaggtgggcagagtccgaggcgagggtcttgtggtgcctggcgccctcggctgggggcggaggcactgccgcgcgcggtgacagccctgtcattattgtattattacttgtttagttaaaacgctgtcccagctgctcgaggtgtaaacaggatttggcaaagtgacagcccagcgcggcgggcgctactgctcagtttgaggacacccatttcttgctacccactctccatgccagtttaggcaccctgtcacctccagctgcagatccagatgtggaggctgtgttcccgaggtgggaggattgcccgaggccgcggggcaggctggccctgcgctgtcagcagcggctttgttttgacagggtgacag

SEQ ID NO: 2234 - DNA, 6000 bp, Homo sapiens
atctttccctctgctagtcttcacatcaccctctctgtgcctggcttgtggcctcatgactataatttctatcttcatcttcacattgccttctctccgtatgtgttaaatttctctctgccttattcttaccaggctgcttgagatggaactaaacactgattttgatcgtactcgactattcttattgtccttttaatgcttatatcccttttaatgatccataagtgtttactggttcatgatatcagcacatgacacaaaaccaaaattagcaacaaaataacatagcatcaataatttgtgtttctagcataaagccttaacaaaaatgacataactctggtatgtgtgtatgtatcccttttcctctgggacttacactcacattagccatcacaaagacttcctcacatctgtatgtggtaggcctttagacatttgaatgatttgacaaaggtcaaagcaacatcaataaatgtaaatgtatttaaagtatatagtatcatgattaaggacacaggccctggagtcagattgacagcaaagcttgtacctggcttcatgcttactagattcaccacattacgcctctatttcttcatctgaaaaaataggtttataagctttatcacaaggataaaatgagttaattcatataaagcactagtattttcctggcagaaagtatgccctcattcagtgttagctgttataattcaactaattgttcacatgtctcgctatgctaagagaaatgggaaccactaaaaaaaaaaaaaaaaaaaaagacatgaattccactatacaataaataatagccttatgaaagcaatacatatgcatatttctgaaaaacacaaatgaaacataaaaacagcataaagtgctatctattccttgtagtcttctgcccactttatgcatgtacaaactctccaaagcctgtcactattgagctgaagaaagtactaaactaataaaagcagacgtcaaaaaaatacagtcacaaaacattttgatgccttgctgtatttcagttttgaaaattttggtcaccaaattactaatttttgtattgctattcaagttaatccgcaccacattccatgataactattgtattaaactttctcaaaaaatttttttaaaatattaattccagagaggagacacattaatatatttttgattgtcaaataaacagagaggagtttaatttttttctttaaaaataaggagatcacaagagaacatgaaccagaaagaaataataaaatacaaaataataatattgataaaaattcaggagaagtccaagcatggtggttcatgcctgtaatcccagcactttgggacgccaaggcaggagagtggtttgagcccaagagttcgagacaagcccaggcaaaatagcaagaccctgtctctacagattttttttttttaattagctggacatagcaatgcatgcctatggtcccagctactcagaaggctgaggtggtaggatcacttgagcctgggaagttgaggctgcagcaagccatgatcgcaccactaccctccagcctgggcagcagagtgacaaaccctgtcagaaaacaaccaccaccaccaagaagaaatcagaagaagatatcaagtctgtgcaggacttcagctccgtaaataaaaatcataaaatctgcacatagtaataaatgttaggaacaaggcagttaaagattagtaacaagcagttttattgggattttaggaacttgcaggggagaatgtgagtgctcattatattttaaatacatcataaagttaaaaccaatgaaagtagaaataacatgcattcacattttgaaaaaccttgaaagtaatgcagctacaaatattcactatcatttgagagcaagctttttaagaagttaaaatgatttgaattataccataactattctaaacatctattaaattaaacaaagaattttcactaattggttaccctttcataggttcttctcagtttgtcagctagatgatgtgttcctacactgtactttgcgatataattaaaccatggattatctctgaattaggctgggtacaactgtgatataacaaaagggagaagtcgcagaacatagtccagctgttaatagcatggactttggagccaggcttcctgggttcaaactccagtccaccatttagtactctttgaaatatgcatatttttgttcaaaaaggaatatgtgcattcttcctgggaagagttgtagtttccacaaaattttaaaagagctattgattccaacagtaattcagttccctaaaatcagcggcagtagaacattttgatgtacaaaagttactcatgctaggactctggtggtattttccctcactgcccctaaattcagccatttctattctttagggctctataataaacacctgatttgaagtctgacccatttttaaattgggaacggggaagacacccctcaaaaagtcagaacctcaaagcctttggtcagggccagctatataatctgtgtgggtcaatgtgaaatgaaaatatgatgctccttgttcaaaatccaagacaaaaaccttcagcttaccgataagtagagaaagactgaaaagaaaaggaattgtggaatgtcttatctttccttttcctttcatgccatcacttttagtgtaagtggttagaaaatatagtaacgtggttgggcatgatggcttagcctgtaatcccagtttggaaggctgaggcagacagatcacttgagctcaggagtttgagaccagcctaggcaacatggcaaaactctgtctctacaaaaaaatacaaaaattagggggcgtagtggtgggtccctgtaatcccagctacctgggaggctgaggcaggagaactgcttgaacctgggaggcagaggttgcagtgagctaagatgatgtcactgcactccaacctgggagacacagcaaaactccgtctcaaagaaaataataataatttcaagagggcaagggtgagcccttctgagcactttgtacttaggtccctaactacaaaataagtggttcatggaggccatttagtgcgcatcctgaacattgtatgacatggggcaagaaacagtgacagacacacacattgcatgaatcacatctgctcacaagattgctccattgtctcatcagacatcacttacaaaacataagttcaaatataaactcctaagcatttcaagacggcaacagcagagcattaaaccaaatgtacagcccttctaagcaccggttgcctgctcatgaagctggccctattctctgctctcatgttccacttcataattttctgacctcaaacaacaaaaaacctctctgcccattccttcttgatgcttctacacatataagccacattgcccagtggcagtaaactgagggttaatggagttggtctggttaacttggaaaacgagggagttgttggctggagaagggtgtttcagcctcttccactcaagccaggatgggtacccagactagagcaagcatgtgttagctacctttaaaaaacaacaacacaccttcataaagaatgcctagattcaaaacatttgtttcgttttcatttatttgttcctttattgtcccagtgaatatttactacttacttcaaattgcaacgagatgctgacaatttagctatgaacaaagcagatgtagttcctgcccttattcaacttcaagaaacaggcaatgaacgacaagtcagtgtcacaaggaataccaaggggaaaatgcagggcactaagaaagtgtaaagcagacactcaggggctttaggggtagataagtctttctggaagaattcatctgtacagtgaaacttcagtatacataggagtaagttcggccaagggaaagagtgttcttgacagaacagcattggcaaaagtggcaagaattttaagaaaattaaagaaaatgtacaagtgatggaaccaggaatcatggggctctttaaggacaaaatatcttaaaggagtttgaaattcaccttaaatgcaatagggagccattgtaaagtttcctatttgatacttgttttgtaaaaatattaatctatgaagaatatagggagtggagtctgcggtcagagtgggtactagtgcaatttagggaatgagattaggctggaagctggattggggggaaaaagatgggcatgagagaaacttggaaagcagagttgagaagatcgtgtgaccgactggacgggcaaaggttaagagaggataaataatcattaaggacgatttctcaggcttctagtcggtaactggatggatgttggtgccatttctcgagaagagttaaagagccagagatagccggcaaagagaaacatggagctagaattttcaggtatctgcagtttccctaatacctttttaatccagaatttgctccttgttttggttttaattcctctaaaagctgcttccgtgttgcaagctggctgaccgctttaacaggcaaccaaagagattcttctcacaagagggaggctttgagcacaacccgggacatttgaagctgtcagactgaagaaacaggaagctttgaactacctatcacactcggccttaaaggtttcggagtaactccacccgtaaaatccccacgactctgattagaaagtcccggcgggtcgccgagacccgaccgcaggctccgccccagggccaggtggatgcccggatgtggacttgagcgaatgtgcgtcacgtgacgtcgcctggcggggcgggactctgcctgcgacggtggtgttgggtgcatcctgcgccacgtgaccgcctcccagccaaccaatggaggagcgaggcggaaaatttcgaatgtggcggcggtagttccaggcgacggcggacggtggtacggtcctggagggcccagtgcgcggggctagccgtggctggagagcttcgaagagccttgaaatgtgaggaggaggaagatagctgttgcagaagtagtggccaaggtatcgttctggacgcgcctgcggcaggagggtcgccgcgtccacttccgccagccccacctccccccggccttcctggagtccctgaaagaggaagaagtaggttttaaggtgcgaaacaagggcgtagtgatccctgtttgacttcccttcggttttcagtatcattctaaattcggtggccgaaagctcgggccgtggagtcccactcgccgcgcttttcgccgttcagccactcgatctgcgctttcagatgttccggcttccatggagaccctaatttcctactttgcaaaattgtgtagattaagtgatgtgcaaataaagcttttacaatagctaaaagcctggctcaacgtaaggacacaagaaaattgacagcagttctttgtgcagcgtgataccgttgacgtcctccttgtccaggccattctcttcctcacttaccctggagaggccggcactgactagtatcctacctggctgtcttcgcagcaggactaattggagaattatggacggagatcaaatatgctaggttctttaaatccagagcgcttacacgagtactgtacagattgagaccgtcatctcgcgctgtggtctgtctttgctttcatcccttctgtctaccacaccccctgctaataaccatcgccttatttagacaggatataaaacttttgatatggcaagtttcttttgtgatttttaacttgattaaaagtaataacgaaagctttttaggtaaggctttgcctttaaaataccttaactaaactagatccgttacttaatctgtatgactctcaaacatctccaattctaacttaattgtgtaaaacaacccctttaccgttcgtgcttttaaaaatagctaccctatctctgctaggaacctcccagtacatattgtatataccttggtagaaaga

SEQ ID NO: 2235 - DNA, 6000 bp, Homo sapiens
tgcgattccctaactgttctgggaagggacagtgcgtgtctttttggacactgaacattatttacctggcctgttcttgtcacataccaggcacttaaatatttaaacattgaatgccatactctttgcagtgttatttgtaataggaaaaatttagcaggaaggaggttattggggaggaagatgtaaacttacaatactctagaatggttaaattaggaagcatactaaatgaatgcctcatatcattattataaagaccatatagaaaaattaatttacattataattgcaattatattaaaatgatggaaaataaaattaacagtttgattgcatgacttaggaataatgtacttcttttagctagatatctattgatattttaatgtttctgcagttgttttagaaagataaaatgattaggattttagtggagatgagctctattttttccctggagtaaaatgtgcatattcattcagataattcattcaaaaatatttcatggataagattgctgtagagtattgaaatagagtaagtagtgtgatcaaaagcgtaagtgggagagatggacagagaaagggaagatgttggtcaaaaggtacaaagtttcagttaaagagtattaggttctagctacgtattacacagcacagtaactagttaataatgtatatttcaaagtagcaattataaaagaaaatgcattttaaatgttaccacaaagaaatgataagtatctgaggtgatggatatgttgattagcctgatttggtcattccacagtgtacatgtattgaaacatcacattataccccataaatatatacaattattatttgtcaattagaaacaagttaattttttaaataaaattaggttattaaaggcacagtaaaagcataggggaatagtttacatagactagatttattagagaaagtaattgcagggatggaacagatgtaaaacttaatcgggcctggattatgtgactaccttgagctaccaaaccaatgaatttaggttttatcggatagtgaggagtgctgactgccttaaaacctaatgctttaggaaagttagtctggagacttttttcagggtgaattggcaagtgagcagcctcagagtcagagaagtgcagctttccagactaagtaagaacctgatatagagggctaacagtgagggcgcagtaggggaagtgaagggagagaagggcattgtctatgcttgaaaaggttaaaaagttaactttgatctgcacttttctctccttagtatgctcgagatttcatctttcagctgcatcttctgaccctgttaaaaagggagtactaacagtggacttctctggagtactaacagtggacttctctccgtagggttatgataattcagagagcagtgttcggaaagcttgtgtcttctgcctggtggctgttcatgcggtaattggtgatgaactaaaaccacatctcagtcaacttactggcagtaaagtaagtagtgctgctgtgttttagagatggtggccatagtacatctttcaaaacttagttacatgtctgtaacagtaagctttttatttggcatttaataagtcaggctttgagcatccaacttgcccttattatttctgttttgtattttatctttttctactctaacatttgttagatgttcactcaggtgaagtcagcagtttgttggggtgatgggtaggtttctgtgagagaaaatgcctgcagcttctggttatttataatagttagctgactccttaccaaatcccagacccaaatctttacccctgaccactgttttattaagaataaatagactgttgtggttatatatattaatggattactgtatatctctccaaatatagaatacttgcacatttaaaaatttttccccttaagaactatgataatcaaatatttgttcttctctttctattatccaaattaatgtgcaactttaacttggtgtgttaaaataaaagttttctaattcattgttcagacttaaaaaaataagtaagtcttgcctttctcatttgattgctactaccagtactttaaaattcattctgctaaggtggccaggcaaagtggttcatacccgtaatcccatcactttgggaggccgaggtgggaggatcacttgagaccaggaatttgagaccagcctgggcaacatactgagaagaccgtgtctctaataataaaaatgataataattgttttgaattagaagtttgttctcaagggtgaagataacttctgattgttgaatcatggcttatgaaccatttagcagaaagcactcaccgtcacttaaagaatttctgaaaccctaaggattgtcttactgtggtcaaatttatcttttaatagcaaaaaagcagaatatacatataatggaaaatgagcctaggtaacacactttacattaagttatagatagatttaacaataattcttaactcgggttataaaccacctcgagacttaggtaaaatctcatcttaagaaaaatgcattcagataaaaccatgagagacaaagttttaaaaaaaatagaaaaatgcacaatggaaacaattacatgtcgtttcagagggttctgtgatcccgtgaatcccatggctagcaggttaaaaactcttggatcaaagagttaatgtttaaaaagcaaaccttccaaaacaattaaaattcagcactttatcagaacagtaggtagccagtaataatgttacatgtgaagacagtaggtaggtggaaaaaatattttggaataacgttagatgaaacaagtaggccagatgtggtagctcccacagcacttgggaggccaaggtgggaggatcacttgacctcaggagttcaagaccagcctggtcaacataggaacaccctgtctctacaaaaaaagaaaaaaaattagccaagcatggttgcatgtgcctgtggtcccagctacttgggaggctgaggtgaaaggattgcctgagcccaggagattcaggctgcagtgagccgtgatcacaccactgcattccagcccaggcaacagagcaagaccctgtatcaaaaaaaaaaagtagaacacagaattgtatatttattgattacaaacttcataaagtcatgatctcatacaaagactgcagaatgacacagagatatttaaaacattcttggtaggatgacagtggcttcatggtctaagatcttaggtcctgtaacccaaatacctgaattcctatttttgcccacttcttacccacccctgtgacctcaggcagtaacttaaccattctatattgttatttcctcatctataaaatataaagataaagatataatgtaaaacagcatatcgtgtaacacctagtactcaattgtttgttattattgctttaatggtgacttctgagtttactttaatgttatattagtctgttttcatgctgctataaagaactgccctaggccaggtacgatggctcacaactgtaatcccagcactttgggatgccgaggtgggtggatcacaaggtcaggagatcaagaccatcctggctaacacggtgaaatcccatctctactaaaaatataaaaaattagccaggcatggtgacaggcgcctgtagtcccagctacttgggaggctgagacaggagaatggtgtgaacctgggaggtggagcttgcagtgagctgagattgcgccactacactccagcctgggtgacagagtgagactccatctcaaaaaaaaaaaaaaagaactgccctagactgagtaattcataaagagatttaattgactcacagttccgcatggctggagaggcttcaggaaacttacaatcatggcagaagggtgagcaaacatgtccttcttcacatgatggcaggaaggagaagaatgggagagctgcagagcgaagcgggcaaaaacccctcacaaaaccatcagattttgtgagaactcactatcactagagcagcacaggggaactgcccccatgattcagtcacctcccacaaggaccctcccccaacacatggggattacaattcaagataagatttgagtgggaacacagagctagaccatatcaaaagttttatatgtgatccctacaatatattttgaaaagacatgataaaatactctgtcatgaacaactttcaagacttagaaacttttttgactttttatatttttttcagatgtgctaggcaaaaaaaaaataatttgttattcctaattatcaacaataacttgggcattataataacccccagcctaaaatctatctttcagagctcacatatatgtatataatattttaatgagtatcttataatttggagcagcttgctcaaatgacatttatttggcttgaatctgcagatgaagctactgaatctttacatcaaacgtgcacaaacaggttctggaggagctgatcccactactgatgtttctggacaaagttagtgaagctcatcacagcgaaccaggtctctcaaaagaaaggacagatagaccaccctcatcaatgaaaggaagttctcaaacacatcctttggaacttactattgtttcccagttttagttttttgtttcgtttcgttttgtattttctgtaacagaggactatcctcagtctgcatgtaacttttatgatagttattccaaattcaagaagaagcagtattaacatcaattgatcgacacaaagtaatttttaatttaattcatcatttcacatgtttgtactttgtcttcccattaacctttgccagtgttatgattgtataaatttttttaaatgctggttaaacaggaatgcttaaagctttaaaagtttaacagtctaaaacatttttgcttttattcaactgcagaataatatttttattgctactttgagttttgtttcgtatcatgtcctatgctagaaatatttaaatgatgtgaaacaaagcaggactaatttgaactacagctggactccgtttgtgtgatggtgatacatgtcattagttgcaacttctttggggtgatctatagtttgaaaactaaaacctcaaagacagatgttacagaatcagccagttctgtaaaactgatattgtctattggttattgatcttgccatctttatttaaaaccatgtcccttctatgatcccttaagaaagctgcaccaaatcatctgcctgttttttcttgatacttactgaaatagaaggttttattgcagggtttattttggtttgtttatatctttgttgtgaatgatgcttttttgtatttattaatatcaaattcacttatgaataaacttgataatggaaacggacaaaaaaaatcaagtgcgtgtgtgtccttgaccgtcttctgtttctcacgtaataaacaaattatcgagacatgggagtgaccagcaccttttctttaaatggtggaacctggtttccttttaccatgaaattgtcttacttgaaaatattgatcctgatgagagagaagatggtgccaaggctgtctttgtataatgggctcaaattctctacctcttcagggctaatacttttaactgagctgctgcctatagtgtcttttggaaaactacttaaagggtgattttctgttactttttagcaaatttttttaatcacctcttgctacacccattcttttcatgtgcagccgactcaaaaattaccagttttggtgaaaggctaaattagataatttggaaccaggatactaatgatttctcatctttacttttttttaatcctaatataaagtgaatttgattgaaaaggcaaatagctattagggaagcagtttgccattgttgcagagttatctgtactttgtttaactgaaaaaaatgtagaaatatatgtaaagaatttaagacaagagtactgaatggatgatttgtcataggc

SEQ ID NO: 2236 - DNA, 6000 bp, Homo sapiens
ctggtgtgagatgatatctcatagtggttttgatttgcatttctctgatggccagtgatgatgagcatttcttcatgtgttttttggctgcataaatgtcttcttttgagaagtgtctgttcatgtccttcgcccactttttgatggggttgtttgttttatttttacgtgttcttaagactatctttagagattacagactctggtaagaagatagacagccatttcttgtcttcatcacaaaaccagtgttttaccctccccaagctcaatacagaaggaagaaaatattaggaaaacaaggaggaatagtatgttaacttttgacaacacattaatcatattatttttatattttatttctcattaatgtgatacagagggctcaaggactcctagagatgagagtactaataatgagcagggcttcagcatggcttatgcaggggactccagtcacattgtagtctaagtaaatagagcctcctcacactaacacaactagaccacaatttgatttaaaaactactttaaggccgctcacggcagctcacatttgtaatcccagcactttgtgaggccgaggcaggaggattgctggagctctggagtttaacatcaccgtgggcaacatagcaagaccttatctctactaaaaataaaaataaaaaaaattagccgggcatgatggtgcatgcctgtagttccaactactcagaaggctgaggtgagagtatcacttgagcctgggagtttgaggctatagtgactgatgatcaagccactgcactccttcctgggtgacagagcaagaccctgtctcaaaaaaaaaaaaaaaaaaaatactttagccaacagcaaaaaagaacacaagaagggagaatagtgtaataaagcccatgtatccatcatctagcttcagctgttactgacattttgccaatcctttttatcagtaatctgtaccctcacttttcatgtttgtttactgtagcattttcaaagcaaattccatatattatattgaatacttcatgaagtttatacttccaggatgtagtgtaatattttaaaaattactttctggcttaatttcctattttttttaggtggtgagatctgctgaggaagcggcatcagtgttggccacttcaattagtccagagcagtgcatcaaagtgctttgtcctatcattcaaactgcagactacccaattaatctggctgcaatcaaaatgcaaacaaaagtgatagagagagtgtccaaggaaaccctaaacctgcttttgccagagattatgccaggtctaatacaggtaagcaacaaagcttggagaggaataagccatgatacatttgggatacagttattttaggtactttccaggcatcattactggcatgatcaagccttcctcccgtttgtctgcaatattcaggacaaagacttttcataactagccagggggttatagatgtgggtgtggtaaaatttacataacataaaattaacgatttttaattgtacaatttaggagcattaactacattcacagtgttatgcaaccatcactactatccacatacagaaatttttcatcatcccagactgaaactctgtacccattaagcaataaccccattccttcctcccttcatcccccccagcacctggtaacctctattctattttctgctagattccttataagtggaataatacaatatttgtccttttaagtctggcttatttcacttagcataatgttttcagagttcatccatgttgtagcttgtattagaatttcattcctttttatgaatgaataatatgccatttatgtatttgccacaaattgttaatctgttcatctgttgataaatatttggattatttcctttttattgacaaatattgtaataatttccttgtaatatcttcatgcacttatatatatacatctagaaacagaatttctgggtgttgccagatttcactccaaagtggttatactaatttatagtcatagatgtaatgtgtttctctttagctacataaaccccatcatagaaacattttaacaaaaatgagatgtgttttataacatgctttaaaacttaaccatacattgtgaactctttccatccaataaataatattttacaatatgattttaatggctgactaatattacatagtatgtatattaagaaccctcctaaagagaactaatcattatgcatctatagtattgtattttttattctagtctaagcttaatattactaaattgggaggtcctaacataagatctagatatctttgtctatgccttagtactaagaacagagtataataggctgggcacagtggctcacacctataataccagcactttgggaggccaaggtgggcagatcacctgaggtcgggagttcaagaccaggttgaccaacatggagagactctgtctctactaaatatacaaaattagccaggtgtgttggcacatgccgtaatcccagctactcgggaggctgaggcaggagaattgcttgaacccgagaggtggagttggcggtgagccaagatagttaggaaagatgctggtatggttattttttaatagtaataacatcaatacacatatcagatagataagatagattaggacaaagcaaataatgatgtcataaaatgaagtaaatcttaaaaccttaactttgaattgggtatgtcaaaatgaaaatattatttaatttcttatctcaaaaaatgtttcctactagcctctgaatcagtatcaactcagtaacactgagcatccctaccacccagattgtggtcttcaaataccattttccactcaaaagagtcaggtgtctttgggaaaatgactgagtccaggtttggagcaggtaatgtataaaatgagcctgagaattattgactgaaagcaaggaaactattcatgtttgagggtcaaaaagaataatgctacaatgaattaaaatacatcaaattttaaagtgaaattcatgagtttatattgatactttaaaaactggccaactttgaagattattggttattcccaaaattggttaataaagagaaagaatcaaagctcatagactacctatcctattttcaggataaccaaatatttgatgagataaagtacttttagaaggattccagctagtaaattcagaagaaattattgacttacaaaattatttttggccaggtgtggtggctcatgcctgtaatcccagcactttgggaagccaaggagggcaggtcacttgaggtcaggaggtcgagaccagcctggccaacatggtgaaaccccatatctactaaaaatacaaaagttagctggctggtggcagacgcctgtaattctagctactcaggaggctggggcgggagaatggcgtgaacccgggaggtagaggttgcagtgagccaagattgcagcactgcactccagcctgggagacagagtgagactccatctccaaacaaaaaatatgtatatatatttcttaggcagtgtgtggtagctcacacctgtaatcctagcactttgggaagccaaggtaagaggatcacttgagcctggaagttcgagaccagcctgggcaacatagtgatgcctcgtctctacaaaaaaattgtttttaattagccaggttttcttacctgggttggtggctcacagtggcatgcctatggtcccagctattcagcaggctgaggtaggagaatcacctgagcctgggaatttgaggctgcagtgtgctgtgatcatgccactgcattccagcctgggtgactaagcaagagcctgtctccaaaaaatatatatatatattatatatatacacacacacacatatatatatatatatttggcctcattgaaacaatggatatatgaagtgattttcagtagccaccaacatcgttaggtaaaaagatgttgcggcagggtatataatggaggagttagactaacaacatctgaacctactgaccaatcttaacatcactgaaggtgggacaactagacaaaagttttcttgcctggcttggtggctcacgcctgtaaacccaacactttgggaggctaaggcaggaggattgcttaagcccaggagttggagaccagcctaagcaacataataagaaactgttgctacaaaaaaattttaaaaattagccaggcgtgatggcatgtgcctgtagtcccagctacttggggggctgaagtgggaggatcacttgagctcaggaggtagagactgcagtgagccacaatcataccactgcacttcagcctaagtgacagagcaagatcctgtctccaaaaaataaaaattaaaagttttcttttctaaagcaattgaacctaaatctaatccagtcttcagtttaactgtcagtttaaaggaagttcagagaatagagaagcatgttaaattgtaccttaagggtatattctgtcaaattcagaatgtaggaaattctatgaggaaaactgccaaatttctttagtaaagaaatggcatgaagaaagaggaagaggaggttatcaactgttaaagagtctcaagaatctaatcaacttggctgggtgtggtggctcacgcctgtaatcccagcactctgggaagctgaggcaggcaaatcacctgaggtcaggagttcaagaccagcctggccatagtgaaaccccgtctctagtaaaaatacaaaaaatcagccgggtgtggtggtgcgcctctgtaatcgcagctactcgggaggctgaggcaagagaatcacttgaacctaggaggcagaggttgcagtgagctgagattgagccattgcactccagcctgggcaacaagagcgaaactccttctcaaaaaaaaaaaaaaagaatctaatcaacttgaaaaagaacaaaattggagtacttacactctcaattttaaaacgtattacaaagctatgatagtaaagacaacatggtactgtcataaaggtagacttaatagatcaatgaaatagaatccaaaaataaccctcacatttataggcaattgattatcacagttttttgtggggaagaagagtatttttaataaatgtgatgctaggacaactgggtttccacatgaaaaacaatgaagttgaacccctacctcacaccatatacagaaattaactcaaggagtgatgcacagaaaatggcagacagagtaggaagctccaagaattgatccatctacttaagcaaccattgagctggcaaaaaatgaatagaatcaacttttttggaactctaggatctaaccaaaaacttatagtaaccaagagagtacttaatgaaagaaaaaggcttactttcagtactttagaataatactacaatgaattaaaatacatcaaattttatttcaaagcaaattcttttttttttttttttttttttttttttcgagacagagtctcactctgtcacccaggctggagtgcagtggcacaatctcggctcactgaaacctctgcctcctgtgttcaagcaattctcctgtctcagcctcctgagtatctggctgggacgacaggtgcctgccaccgtgcccggctaatttttgtagtttttagtagagacaaggtttcaccatcttggccaggctggtcttgaactcctgacctcatgatccacctgcctcggcctcccaaagtgctgggattacaggcatgagccactgcacctggcctatttcaaagcaaattctaagtatcatgtcatattaaatacttcatgaagtttacactttcaggacataggataatgttttaaaaattactttctggcttaatacttccaggacatagtataatattttaaagattactttctggcttaatttcctgtttgttttaggtggtgagttgcctggataatttttttaattttttgtagagatagtgtctta

SEQ ID NO: 2237 - DNA, 6000 bp, Homo sapiens
ccattcaagccggcttttgttgttcttctaacatgtccccatccttgcattctggtactgttgtactatccctgtgcttcagtcctggaatcaatcatttcttcagggatccattgttcctattaagggaagatgattttaaaggctaagatctggactctagatgtactcactgttagtgatatgtcactgctccccagacctctcagtgggcagagctagggagtgtgtgtgtgtgtgtgtgtgtgtgtgtgtgtgtgtgtgtgtgtagagatttacatctctgtttccatatctatcaaaaaccatgtttttacactagtagttccattctggcaccaaggaaattctaatttccagattgataacccacttttctgacagaaacctagctttcgttatctttaatatgtttaccaatttgatcagtcctctgtatgctaccagtttttctgctatctctgctattacctccttacttgcacagatctactcctcatcctgctaggctttgccattccatcctcactcaaaaccatgaatgcccttcttattccactttggctccagcagcttacacctgattaccactctatgtggacagccttcctacctgtctgggctgaaagctgatacattcaccagtggataccctccttatagtttgtttgggaatctgtgtactaatgcctggtcatttgtaattttgataactttttaaaaattatcctttgcatttctttgattacttttaccagcttctcatgtcaagagacaatatatcagccagctgcagtgcctcacgcctgtaatcccaacactttgggaggccgaggcaggcagatcacccgaggtcaggagttcgagactagcctggccaatatgatgaaaccccatctctaacaaaaattagctgggcgtggtagcaggtgcctgtaattccagctacttgggaggctgaggcacgagaatggcttgaaccttggaggtggaggttgctgtgagccaagatcacgccagtgcactccagcctgggtgacagagcaagactctgtctcagaaaaaaagaaaagagagagataacatatcaaaaatatcataaagccaaaattatgacagtttatcaggatcactcccttgttctgtaattctcttctcctttactaaggatcacatattttatatttggtaaaggaagacgtttttggaaactataactgaaatctaaattgggtatagtatttttgagcttgggaacactacttcatcatagtctaatgtgtgatttacttctgaaacataggcagccattttatgttgagtaaacattctttgaagatggataagccctcagttaaactactgtagtacaaagaaaagaaaaaagaaaaaaaactaaagcagtagtagtcccatgctttgtatggcagttgttttcatttattatctattttcatttttaatgttgagatgaggaagaccctgtttgacattattttattatgaacattgttaacattattcttttttaaattgttctctatttctgttctgatttttcttttattctcctcccccatgcactttctcctccttttttgtttttaaaatctaaaatttagcaaaagataattattcaagtcagaatttctataacttttatagaaattatttcaatatctgatacctattgattatgtctctcacccagtgtttctgcccacattacaatcgggcacacacatttatcaaagttaacaagtccaaaaaaagccactgataacctttgtaaagtttactaggaactataatattctagaatattacctctagtgaggatagtgcagttattcaggaaagattcatataaaagtttgccaacctgaaagactattttgtacttcttgagcactgccacaaaaatattatcagaattgtaattgtgtcaatatttgtcagaaggacacaggaaaattaatattaatgatcttactgtattctaggcccaagtcctcaccatgaccctaggaggcagatgctattttcccattttactgataataaaactgcaccttggcaataattaggaaactgctccaatcacagagtataagaagcagagatttaatgagactacagagcctatgttcttttcacttgaccatggtgctgctctctgtcagaagaggaaaaattcagcaactttggattatctcattcatatagataattcagttttgtaacaatctgtgctttctctggaagaaattatttttctgccagtcatctgtccagatcattatatgtcaggtcatttctaattatctgctagagtaattacaaagcttactttcatggaaaagataactgactaccgtgaaaagcattttcttgtgaatcacattcatccagctgaaataaaagacactcttagaatgatcctttaacatctttgaaagtctgataagttataaatttccgggagtgattttttgtggggtttatagagacacattcatcctgctggcaatagttcttgttaaaaccagcaatagtgttatattggtctgcagcgtgctctgtggttgtttcattccagagagatgggaaggaaattagtctatggcccaagcccagggcactacctgctgaaatccctcaaggtctgaatttatagtgtatttgatcataaaaaaatttaagaggaactctggtattttgttacattcaaatgtggattcttagatttaactgttattcctacaaaaatgatttaaagcactgtctgataagttgtttaaaaataagcagtgagtgacttttcatggttataaaatccatgagtttgtaattatgcttttaaaaagaaggcaaaaacaaatcaaaactccttggtaaccactgggcccaattcttgatgctaaaatttaaagagaactatattaagaatctgttctgctttttctataaaactgtatttcaggataatcagaataggtctagttgataaagttattctctacagaagaattctaccccatggaaggagtggtatgattagataatcaccatttttaactcatattaaaataactgattcaacaacaatcagtgactgaaacctttggttaaaagattgatagtctgggcatggtggctcatgcctataatcccaacactttgggaggccagtagatcacttgagcccaggagttccagactggcctggacaacatggcgaaaccccgtctccacaaaaattagctgggtgtgtaggtacacacctgtagtcccacctactcaggaggcttaagttgggaggatcaattgagcctgggaggtggagactgcaatgagccatgatcacaccactacactccagccttggcgacaaagtgaaaccctgtctcagaaaaaaaagggggatgatttatggagaagtttacaatggtgggattagattgtcactacctaaatccagtggtcgtttttatcatccctaaaagccatttaagcctcctggcatgaaaccatagaaatacatactgaagtatataaagaggaaatgacatatatgggatttgctagaaatacttcagataaaagggaagaggggacaaagatgacgtaagaatggtaaaatcttaaaaactgttaaatctgggtgatgggaatataagggttcattatactggtctcacttttgtgtatttttattatacaaagttttaagatagcaccagtgttttgggaatgacaaaattgaaaagaagattacttaatgtcttttttctttgtcttttttacagcaaacatgatggttatatctgtgtttcatcatataaagttgttatccccatacttgtgagagtcaccctataaagttatagaactaataccatgtccttttgacagatctttccctagatcattctgacctagttgcagagttgttgaaggagctgtctaaccataatgagcgtgtagaagaaagaaaaattgccctctatgaacttatgaaactgacacaggaagaatcttttagtgtttgggatgaacacttcaaaacaatattgcttttattgcttgaaacgcttggagataaagaggtaaatggcaaaatatgtaaacagtagcctttccttcctgtctcttttacattgcctgttaatctaatgctacacggatttagcaattgggagaatgaatctcttctgctgctgctttctgcatgaacttttcactgtgaagtactttttcttctaaaccaagtagctcaacaattttgaacaattaacaggaaaaatgaaaggtcgcaggctgaattcttatagaaaagtacatgttacttgttttacatatttagattagttgttcaggagcaacttttatttatttatttatttatttatttattttgaggaataatctcactcattctcaagcccaggctggaatgcagtggtgtgatctcagctcactgcaacctccatctcccaggctccagtgattctcctgcctcagcctcctgagtagctgggattataagcacgtgccaccacccccggctaattttgtgtttttggtagagatggggtttcaccatgttggccaggctggtcttgaactcctgaactcaagtgatccacccacctcagccttccaaagagctgggattactggcatgagccaccgtgcccagctccaaaacttctttttatagtctgaatgtagttcttgatttcttgcaaataaaataagtataatataaattttcaattagagataagaaaacttaattacatagtataccgcatactttatgcagttatctacaactcctcccccaatattaagacccttaagttacaaaaattgaaaatgttaaagattatctacaacccaaaatattaaaaacatttaaatgtttcttcttagcctacaatcagggctttggcattaaaggttttaagagaaatcctaaggcatcaaccagcaagatttaaaaactatgcagaattgactgtcatgaaaacattggaagcacataaagatcctcataaggaggtaagttacctggccggtaaagtattattccattattttatttcatgaaacatgtaaccattgtgtaaaatgtagccttattaatgattttcttgaacatttgccttgacattcagggtaatacctgatcgagatgcaagcatatttttttctattaaatgaattaaacagtgatatcatgacctttcacctaaaacaggccagctctaggaaataatttattttattttgttttctccttcacttcacttttagttttctacttagagtttagcaatcttattttcacttttcatttagcaataagaatttgattttttaaaataactaatgaagataagaaatcattgttttgggggggttgtttgtttgttgaatcaggatctcactctgtcgcccaggctggagtgcagtggtgtgatcacagctcactgcagcctcagcctcccggttccagtgatcttcccacctcagcttcccgagtagctgggactgcaggcatgcaccagcacaactggctgatttttggtattttttgtagagatgaagtttcaccatgttgcccaagcaggtcattgttatttttaagtgataaattgcctagaggagctatatatctgttgcaagtttattcaccaaagtagtgaggatagctttcatggaagagttccgtgaacctgtttcatagtacttggtagccatgatatctctctccccttcttcaccagtgacatcgattaggtaactatgaggattgaaagaattagaaaaaaaatgttcaaatagggactattttttttatttcaataggtttttgaggaacagatggtgtttggttatatgaataagttctttagtggtgatttctgagattttggtgcatccgtcaccctagcggtgtacactgtacctaatgtgtagtcttttatccct

SEQ ID NO: 2238 - DNA, 6000 bp, Homo sapiens
ccttaaaaaaaaaaaaaaaaaaaaaatttggccagtcacagtggctcatgcgtgtaatcgcaacactttgggaggccaaggtgggcagatcacctgaggtcaggagttcgagaccagcctagtcaacatggtgaaaccccatctctactaaaaatacaaaaaattagcctgatgtggtggcaggagcctgtaatcccagctactcgggaggctgaggtgaggctgaggctggagaatcgcttgagcctgagaggtagaggttgcagtgagccaaggttgcgccattgcactccagcctgggcaacaagagtgaaactccatctcaaaaaaaaaaaaaaaattatattcagtattaaaaatcctctatcttcttacaaatttgtgttaaaatacatttatctctttgtcaagcagtaccattactgggagttgatcacagagattgataaactttctgtaaagggtcaggtagtaaatattttaggctgtttgagtcatggtcttagagtctcttctcaactctgctattgtatgaaaacagccatcaacaatagaaatagaaaacagccatagacaatacctaaataaataggcacgactatgtttaataaaattttatttatgggctgggcgcagtggctcacgcctgtaatcccagcactttgggaggccgaggtgggcggatcacctgaggtcaggagttcgagaccagcctgcacaacatggtgaaaccccatctttactaaaaatacaaaaattagccaggtgtggtggccggcgcctgtaatcccagctactcgggaggctgaggcaggagaatcagttgaactcgggaggcagaggttgcagtgagctgagatcacgccatcacattccagcctgggggagaagagtgagatttcgtctccaaaaaaaaagaaaaaatttatttatggacactgacatttaaattttatctaattttcatgattttttttgtttttttccaatcttttaaaaatgtgaaaaacgttcttagcttacaagccatccatagtttgttgacctctggttaatcagaacatttttcaaggtggaaagacaaactagttattaaggtctgtgcattctagagtaactgtaaggtgtccttggtggaaggacaaagagacatgtactttaatgatatatagctgctattttttattttgctaattatgctctgagaatatacattctctaatcctgtctttataaatatccttatataatctcctcagatgtgtttgtattttaaaactacacctaagtaaaaattagtgtcgtctttttcatagtgcatttgattatgacacagaaaatatgaactctgaagatatttatagctctcttagaggtgtcactgaagcaatccagaatttcagcttccgtagccaagaagatatgaatgagccattgaaaagggattctaaaaaagatgatggcgattcagtaagtattttaatatccttactttccagactattttattgttcattaataattttttaaattacattttgctttctgtcatttttgaatatacttttctagggatcagtcactctacaagtatttactgagtatctaccacataccaggcactgtttgaggcattagatttatacaacaaaatcactgccttcaaattccttttagattttcatatagagatgagtattatagagttttaggatagaatgtgctttagaggaaagtgaatcttagattgtgtggtctaagatgcattagatttatacgacaaaatcactgccttcaaatttccttttagatttttcatatagagatgagtactacagagttttaggatagaatgtgctttggaggaaagtgagtctattttagattgtgtggtccaagaaggcctcactccaaaggtagcatttgcattgaaacctaaataaagccacataaaatctagaggagaattccttgaaataattagcaaatccaaagacatttagatgggaacaagctttgtatagttgaggactaggaagaaaaccagtgtagttggaccattgtgagagaaaaggagtggaacatgggccagatcacattgagtctttttttttttttgagacggagtctcgctctgtcgcccaggctggagtgcagtggcgcaatctcggctcactgcaagctctgccttccgggttcacgccattctcctgcctcagcctcctgagtagctgggactacaggcgcccgccaccatgcccggctaatttgttgtatttttagcagagatgaggtttcaccgtgttagccaggatggtctcgatctcctgaccttgtgatctgcccacctcggcctcccaaagtgctgggattacaggtgtgagccactgcgcccgacccacattgagtcttgtaagaacacataaggagtttagagttttttttgcctgttaggtgtagtgatagtaatttgcattgtcagtttatgcggctacagttaagaatgtgttttgttttgttttgtttttttaataatgtggcaaatgttttatttctcttgtatgcaagtaactgactctcaagtatttttaaaaacacatcattacacttaagtaagaatgttataacctacaacattcttacatatttaatattattgacatatttgaatattgtttattgcttctgccattatacacagaatagttttttactttcctgcttcttagacttttctctgacagcttagacttttcacaaaatgagccatcccaccagttcctgtggaattcattgtttctcagtgtttgcaaagttacagaacattgtagtgcttcagcacatctccaaagggctccttcctctgccttcctgccatctttcctgctgttgtttttctcactgtgcctatctggcagagcaagattgtggtgagcctagtatactggctgccaaaaccagcttatcactgatatttgaggttccctacccttcaaagctgcatgtggtagcaataacagattagtaggaatcactgcttcattgagactcagttttttttttggttttttagacacagcatggtacagggtagggaactcaaattgtgaattttgggaaatgagttcaaatcccggttcctggcagttattagctaatcaggtgatcacctctaagcttcaatgtcttcattaagaaaatagggatatcactgcttaccttaaaagttgttgtaagtataataaatcctatgactctattcagctcagacctctttcctgagttccacattcacattcagctgcctgtttgaactcctggtcttctcccctaaagctgctctttcctatcttagttaatggcaaccctagttgcctagccaaaatccatggacaagagttgttgagacctctgtttttctcatcctccataccaaatctgtcaggaaatcttttgtctccactgcagaatgtatccagaattcagcctattctcaccactgcctttctggtttgagccatcatcttcatcatttctctcacctggattattaaaatttggcctccttgattatgcccttgacctcctatagtccactctcactctcactcaactctataggaggtctctgtctcagagtaaaaaccaaagtctatacaataggctttttttctgttacctctctggcctcatctcctgctagtttcctccttgttcactctgctcctgccacactggcctccttgctattccttgaacttactatgcacgttcctgcttcaggatctgtgtattggctgttttctctacctgaaacactctacctccagatagccccttggctgattcccttacttccttcaagtgtttattcaagtggcttctcagtgaaccctactcatcctatttaatctgtgaactccatcctcccacctcagcattcatgattccttcttctaacatgtcgtatactttattcgttcattaagttttttttttttttggtctgtccctccactaaaatataaactccactggggtaggcatcgttctctcttttgctcactgatgtattcccaatgctgtgaacaatgccaggcatataatatgtgcatagtaaatattttaagaatatttgtaaagtgcctagcaaatggcttggcacatagttgcccagtggatggtggtgatgctgatacccatggtagtaattattttgataccagtatttgtatcaatattcatattcatattttgataagtatgtacccaaattcttttggcatccttccaaaagttatgcaggccttttaagcctttcttttttttttttttctccttaaagcaagcctttttaaatttgattttattatgcttttttgacatactgttgtatgatataccattaccttaataatggaatctggcagcttgtagtactgtattgcttatgaaagttcttttgtatctttaactgacatggagaagttgctggtaatcacactgtacatattgtctggtcaagttgtttgcaagggaactgtaataatcattagaggcagcattcttttacagttcttatttgccttcacagctgtagtttatatttttaagctttgacgtctggaatataaattgtaactcataatgttgattgccattacttaaattttttagctggttattgttatctttttaaaattgtcttttaagcagtagagaaatatctttttagaatgttaaatagatacttgaaaaatgagttaatttgctgtggctttcacttcccattgatagatgtgtggtggtcctgggatgtctgacccaagagcaggaggtgatgctactgactcaagtcaaacagctcttgataataaagcttcattgctccattcaatgcctactcactcctctccacgctctcgagactataatccatataactattcagatagcatcagtcccttcaacaagtctgccctcaaggaagccatgtttgatgatgatgctgaccagtttcctgacggtatgttctgggtcacactgctactgtctgttttggagaacttggtaattgatgaagtaaaagaaatgcatatgcttttttattataactcccaaaaagtaacaatttttagaataagaatgttttctcccatcttctaggaactcatctctagtgctttggtcattttcttctcctgaatgagaaacagggtagtcatcttgagatcatgatcaaaatcaagaaaaccttagttaccacccagaaataactaaaaccaattgtagcttataaatttactttacctctagacacaatttatttggtcattaatttttataccacgatgacaaaacctttgaagaaatacccattctttatagtagccctttaagcatgaagtcataaacttttttattaataaaatacatttcaaggacgaaatataaggaaagttaccattaggatttgaatttgggtgaaatgggcttagttctaagctctaacacttactaagctgcatagcctggcaagatggttaactttcccgagtctcagttatcacctccaaaagaggatgatgatgattatactacctaatcccagtgtgcagtaagatgcaggtaagttgtataaaaactgatgatatagtacaaaacactacaaatgttttagtgttttgtttaagagactgggtgtcactctgttgcccagtctggaatgtagtcgctcaaacatagctcactgcagccttgtcctcgtaggctcaagcgatcctcccacctcagcctcctgagtagctgggactacggaccaccatactcagctaattttacctttttaaataaatgttctatagagatggggcctccctatgttccctaggctggtcttgaactcctggccataagtgatcctcccacctcaacctctcaaagtgctgggattgtaggtgtgagccactgtgcctgtcctagttattttttataataagg

SEQ ID NO: 2239 - DNA, 6000 bp, Homo sapiens
taatttaaaattacattcaatccttgagggaaatgatgttgataatatttgagagcaggaagcaggtgagaacagaaaaagactaaagagttacattcctaagtagggagaaattttccccctggaaaccagacgtaagtacatgaatatttaaaatattgacctgtaaatatggccctttaatatggttcaacctaatgtttgtgtggcttccttaagagtttttttaagtgaacttacctgtaatatgttaatatttctttgactcccttcatcagagttccatggggagtcctttgacaagaccaacaccacgatcaccagctaactggtccagtcctcttacttctcctaccaatacatcacagaatactttatctccaaggtaataaaaggatgatttttcatgatggtttgtatttgtaaattcccattctttctttttgagacagagtcttgctctgtcgcccaggctggagtgtggtggtgtgatctcaactcactgcaacctctacctcccaggttcaagcagttctcctgcctcagtctcccaagtagctgggcttacaggtgcatgccaccacaccccgctgatttttgtatttttgctagagacagggtttcaccatgttggccaggccggtcacaaactcctgaccttaggtgatctgcccgcctcggcctcccaaaatgctgggattacaggcgtgaggtaccacccttggctgtaaattccattcttaaaaaagcaagcactaatataattcaagtcagttcccacttgacttgaaaggtcttagaaaagtagaaacttagcaaatgaaaaaaattttatttgaaagccaactacttaaatgataatatataggatatggaattttttaataagtggaaagaaaacctgacagcctttttaaataaattactgcttattacattaaatggcatagttatatttctcagagatgctgtataaatccagtaaattgcaaactatgtctttcaattacattatactactcagtataagtggtgatgaggtcagttataatgatgagtttaaaaaattaagcttgcaaacaaaacatataaataacaaataggggagtgttaaatatataatgaatatatgacattatatatgtatcatatataatgaattacatatatgtcatatataatgaattacatatataacatgtcatatatcataaatatgacattaggtcatactatggttttcatattcagaatgatgtatttcatattcagaatgattataacagaatgatttatattcatatatatttattacatttttatataattaaccctgtttttatatttattatatatttaacccttccctatttgttatttttatgttttgtctgtaagcttaatttttttcattatatatgtaatgaatcatagttattataattcattacatatatatgtaattcattatatatataatgatatatgaattatatatataaacatatataataagtaaatagtgaatatatacctctgaggaaaaaatatgactgactgagagattggtccttaatgcaaaataaaagatgtgtacaattttcacacacttgtatgattcaagcatgagctagatttcaaatgacattcttgactgcttagtagactaaaattttatttccttttcctagccttttggaaaattatttgcatagaagttcagcatcactgatcatcagagaaatgcaaatcaagcccacagtgagataccatctcacaccagtcagaatggttattattaaaatgtcaaaaaataacagatgctggcaaggttgtggagaaaaaggaacacttttacactattggtgggagtgtaaattagttgaactattgtggaagatagtgtggcaattcctcaaagacctagagacagaaatataatttgagccagcaatcccactactgggtatatacccaaaggaatataaatcattctgttataaagatacatgcacatgtatgtgcactgcagcactgttcacaatagcaaagacatggaatcaacctaaatgcctatcagtgatagactggataaagaaaatgtggtatctatacaccatggaatactatgtggccataaaaacagaataagatcatgtcctttgcagagacatagatggagctggagactgttatccttagcagactaacacaagaacaacaacaaaaaaatactgcatgttctcacttacaagtaggagctaaatgatgaaaacacatgaacacatagaggggaacaaaacacactggggcctaccagagggcagagggtaggaggagggagaggatcaggaaaaataattaatggacactaggcttaatacctgggtgataaaataatctatacaaccaaacccccatgacacacgtttgcctatgtaacaagtctgcacatcctgaacacatacccctgaacttaaaagtttttttaagaaggagttggggctggctgtggtgtattccgtggtgtatagataccacattttctttatccagtctatcactgatgggcatttaggttgattccatgtctttgctattgtgaatagtgctacagtgcacatacatgtgcatgtgtctttataacagaaagatttgtattcctttgggtatatacccagtagtgggattgctggctcaaatgatatttctgtctctaggtctttgaggaattgccacactatcttccacaataattcattcacacctgtaatcccagcactttgggaggcagaggtgggcagatcacttgaggtcaggagttcgagaccagcctgaccaacatggcaaaaccccatctctactaatagtacaaaaattagccgagtgtggtggtgcatgccggtagttccagctactcaggaggatgaggcaggaaaatcacttgaacccaggaggcagaggttgcagtgagctgatgtcgtgctaccgcactccagcctaagtcacagagcaaggctccgtctcaaaaaaaaaaaaaaaagagttggtatttatagttaatagcttgatttttgtcattagccatatattatagtgtgcttcatcaagttattcattaacattattggataatacatcaacatctaagaaaaatatattgcaaacatttcctagcctattttttccatgttctacatatatgataaatttggtagctaaattccagcttcagttgaatttcagcatttgattttaaagttcatgtctataacatatagagcagaatggctcacacttgcaatcctagcactttgggaggccaaggcaggaggatcacttgaggccagcagtttgggacaaacctgggcaacatattgagaccccatctctacaaaaaaaaatttttttaaatcagcctagcatggtggtgtgtgtttgtagtcctagcaacttgataggctgatgcaggatgattatttaagcctaggagttcaaggctgcagtaagctatgtttgcaccactgcactccagtctgggcagcagcaagaccctgtcccttaaaaaaaaaaaaaaaaaaaaaatttggccagtcacagtggctcatgcgtgtaatcgcaacactttgggaggccaaggtgggcagatcacctgaggtcaggagttcgagaccagcctagtcaacatggtgaaaccccatctctactaaaaatacaaaaaattagcctgatgtggtggcaggagcctgtaatcccagctactcgggaggctgaggtgaggctgaggctggagaatcgcttgagcctgagaggtagaggttgcagtgagccaaggttgcgccattgcactccagcctgggcaacaagagtgaaactccatctcaaaaaaaaaaaaaaaattatattcagtattaaaaatcctctatcttcttacaaatttgtgttaaaatacatttatctctttgtcaagcagtaccattactgggagttgatcacagagattgataaactttctgtaaagggtcaggtagtaaatattttaggctgtttgagtcatggtcttagagtctcttctcaactctgctattgtatgaaaacagccatcaacaatagaaatagaaaacagccatagacaatacctaaataaataggcacgactatgtttaataaaattttatttatgggctgggcgcagtggctcacgcctgtaatcccagcactttgggaggccgaggtgggcggatcacctgaggtcaggagttcgagaccagcctgcacaacatggtgaaaccccatctttactaaaaatacaaaaattagccaggtgtggtggccggcgcctgtaatcccagctactcgggaggctgaggcaggagaatcagttgaactcgggaggcagaggttgcagtgagctgagatcacgccatcacattccagcctgggggagaagagtgagatttcgtctccaaaaaaaaagaaaaaatttatttatggacactgacatttaaattttatctaattttcatgattttttttgtttttttccaatcttttaaaaatgtgaaaaacgttcttagcttacaagccatccatagtttgttgacctctggttaatcagaacatttttcaaggtggaaagacaaactagttattaaggtctgtgcattctagagtaactgtaaggtgtccttggtggaaggacaaagagacatgtactttaatgatatatagctgctattttttattttgctaattatgctctgagaatatacattctctaatcctgtctttataaatatccttatataatctcctcagatgtgtttgtattttaaaactacacctaagtaaaaattagtgtcgtctttttcatagtgcatttgattatgacacagaaaatatgaactctgaagatatttatagctctcttagaggtgtcactgaagcaatccagaatttcagcttccgtagccaagaagatatgaatgagccattgaaaagggattctaaaaaagatgatggcgattcagtaagtattttaatatccttactttccagactattttattgttcattaataattttttaaattacattttgctttctgtcatttttgaatatacttttctagggatcagtcactctacaagtatttactgagtatctaccacataccaggcactgtttgaggcattagatttatacaacaaaatcactgccttcaaattccttttagattttcatatagagatgagtattatagagttttaggatagaatgtgctttagaggaaagtgaatcttagattgtgtggtctaagatgcattagatttatacgacaaaatcactgccttcaaatttccttttagatttttcatatagagatgagtactacagagttttaggatagaatgtgctttggaggaaagtgagtctattttagattgtgtggtccaagaaggcctcactccaaaggtagcatttgcattgaaacctaaataaagccacataaaatctagaggagaattccttgaaataattagcaaatccaaagacatttagatgggaacaagctttgtatagttgaggactaggaagaaaaccagtgtagttggaccattgtgagagaaaaggagtggaacatgggccagatcacattgagtctttttttttttttgagacggagtctcgctctgtcgcccaggctggagtgcagtggcgcaatctcggctcactgcaagctctgccttccgggttcacgccattctcctgcctcagcctcctgagtagctgggactacaggcgcccgccaccatgcccggctaatttgttgtatttttagcagagatgaggtttcaccgtgttagccaggatggtctcgatctcctgaccttgtgatctgcccacctcggcctcccaaagtgctgggattacaggtgtgagccactgcgcccgacccacattgagtcttgtaagaacacataaggagtttagagtttt

SEQ ID NO: 2240 - DNA, 6000 bp, Homo sapiens
aaaaaagtacacagaatatacattttttgtgatctttatttccagtgatgagcactgcacctaacaacagcagaatattcttctcaactacactaggaacattctgcacgctaggccatgaaacctcaatagattaaaatgatagaatgaatacacagtatgttctctgaccacaatagaatgaaattagagtcaataatagaaaggtatttagaaaacccacaaacagctcactcttaaatagtcagtgggccgaagaggaaatcaaaagagaaataagaaaatacactaagaaatacattgagatgaatgaaaatgaagacatggcataccaaaatgtatgggataaagctcaagcaatgcttctagggaaatttatagctgttaatgcctacaataaaaagaaagctctcaaatcagtaatcgattcaccaccataagacactggaaaaagaaaagcatactaaacctgaagacagcaaaaggaaggatgtaatcaagattaaagcaaaagttaatgaaatagagactgggaaaaccagtgaaaccaaaagctggttctttggaaagatcaacaaaattgacaaacctttagctaaacatatcagggtaaaaagagaaaacattcaaattactggaattacaaatgtgctgggtgtggtggcacacacctgtaatcccaacacctgggtgtggtggctcacacctgtaatcccaaggtgggaggatcacttgaggctgggagtctgagaccagactgggcaatatgacaagacctcatctatgcaaaaaaagaaaattcaaaattaggtgggtatggtggtgcatgcctgtagtcccagatactcaagagactgaagcaggaagatcactagagccaaggagttcaagggtgcagtgagctatgatcatgctgctctactccagcctggatgatagtgagactcccaactcaaaaaaaaaaaaaaaaaaaaaaagaaatgaaaccgtagtcgttacctattgtggcaggaaatcactagaaaatgtctcaagctgataatgaagagataattgtataagcctgtcaatcctatcagtaaaaacaagcattacaaaagggaactctggagagctgaaaaagggaattaagatttataaaatgatggctgggcacagtggctaacgcctgtaattccagcactttgggaaacaggcgggtggatcatgaggtcaggagatcaagaccatcctggctaacatggtgaaaccctgtctctactaaaaatatgaaaaattagctgagtgtggtggcacgcacctgcagtcccagctactcaggaggctgaggcaggagaatggcttgaacctgggaggcagaggttgtagtgagccgagattgcgccactgcactccagcccgggcaacagagggagactctgtctcaaaaaaataaaaataaaaataaaaaattataaaacattttctaaaactttttttaaaaatctgtaagtatttgatttaaagacttaaaaattattttaactactgagcttataaaaaaacttagatgaaatggacaaattcctagaaaaatacaaactaccaaaactgactgaagaagaaatagatagcatgaatagaactataacaggaaattgatctagtattcaaaaactatgcacaagccaggcacggtggctcacacctgtaatcccagcactttaggaggctgaggcaggtggattgcctgagcccagaagagaccagcctgggtaacatggtgaaaccctgtctatacaaaaattaattgagtgtggtggcatacacctgtagtcccagctactcaggaggctgaggtaggaggatcatttgagtctgggaggtcgatgctgcagtgaactgtgattacaccactgcactccagcccgagtgacagagcagcaccccatctcaaaaaaaaaaaaaaaatacataaaataaaactgcacaaagaaaagcccaggctcagatggcgtcactggtggtaaattccaccaaacaattaatatcaattcttcacacattcttccaaacaaacagaagaggaaggaacacttcccagtttattctatgagaccagttttattctgataccaaaactagacagagacatcgcacatcaaaaaagacactacagaccagcatctctttatgaatatgaatgccttaatcttcaacaaaatgctggcaagccaaatttagcaacatatgtaaaagaagtatataccatgactgtattagttcattttcatgctgctgataaagacatacttgagactgggcaatttacaaaataaaggtttaattgaacttacagtttcatgtggctcaggaagcctcacaatcatggcagaagtcaaggaagagcaaataatgtcttacatggatgtcagcaggcagagagggagaatgagccaagtgaaatgggtttccccttatcaaatcatcagatctcatgagacttattcactaccacaagaacagtgtggcagaaaccacccccatgattcagttatctcccaccagtccctccaacacgtgggaattatgggagtataattcaagatgagatttgtgtggggacacagagccaaaccatatcaatgaccaagagggatttatcccaggaatgtaaggttagattaacatccaaaaatctattaatgtagtagaccatatcaatagtaaaaatacaaaaaccacataatcatctcaatagatacaggaaaataaaacacttaaaacaggaataaatcttcatgaactccgatttggcagtggattcttggatatggtatcagaagcttaggcaacaaatggaaaaacagataagttggatttcatcaaaatttaaattttgcagtattccaagaacaagaatactgatgtgactgtagaaattattggcacatttttaactcacagagtaatatgatttatgtttttaaagattatgctgtctgatgtgacaaaaatgggctagtataagggagaagaaagaagaaaggtagagctgatgttgaaaggaacctaagtcctcatctattgtaagaaatcactagaaaatgtctcaagctgataaatgaagaaataattttataagcctatgaatcctatcagtaaaaacaagcattacaaaagggaactctggagacctgaacaatggaattgagatttataaaaccttttgtaaaactggttttttaaaatctgtatgtatgtattactttgatagacttcaaaaattattttaaaagaaatatgaaatctagtaaaacaaatatgacattaggaaatttaaaaccgcaagaaaggaaggatatgatcgaaatatactaacggtatagtattttaagtcatgtggtgttagtacagaaatagacaaatagatcaatggaacatgaaggaaggtccagagatacttaggtttatataggagattagttcattatacaggtgtcacttcaagtcatgaggaaaggatatactcattggtaaatggtttgggagcaattgggatgtctgtccctacaggggaaataaagctgaatctccaaaccaaagtaaactagatggaataaagtatatattaacaattactagttcatttgctcaagtttacttgtggtccattcaatgtggtggttccaaaaaaaagtatgagatcgtaacttttgttttcaaactgcaaatattaatagctttatttaagcactattaacatgttagatacccagagtatatacccacacaacttacacttctttgtttttaacaaaatgtgctcataacactcttttttttttttttccttttaagtctcactttgtctcccaggctggagtgcagtggcatgatctctgctcactgcaacttctgcctcccaggttcaagagatcctctggcctcagcctcccaggtagctgggattacaagcacacaccaccacacccggctagtttttgtatttttagtagagacggggattcatcatgttagccagactggtctcgaactcctgacctcaagtgatccacctgcctttgcctcccaaagtgcagtgtgagccactgcacttggcctgttacagcagtcttatagtttttcttcagcagtgtataatagacctttctcaatttctacattgagagctgtatcatcttccaagattgtgttgtatagtattccattgttccaaagtaacataatttaaccattccccctagtgttgtatattcaggtgtatttttcatagagtgggttcagaaaagtccaaaatgaagtgtgcagatttggatacaagtcatgtgatcataaatgatttgagtttctctctccttaattaagtctctatataatttgaatttcaaagtttgtcttttagtaatgcagttgattacttcagaagcggagaagaattgtataacttttcttgactgatctgagtaagctttattttgttcccatttccacagaacggacttactttagcttcaaattgtagagttgtttagttaactgcttgtgagaagattagatattatttctccttgtaatcgtttattaggaaaactaaaatactgtagtagtatgtaacagagtaaccctggaaaccgtcatggttaacttttccattgtctgttaggtcatatttgttatgcttttcatattcccttcttaccttaaaaaaaaaaaaggtaggtcaatattttttttttatccttccagcaaaacagtttgaaagcaaataagaatatcttccttttccctgggaaagatggtcaagcttcgtgctattgaacagaaatgtaggggaagaaaacggtcttgtttgagtaacaaaaatatattcatctactgtatgcctttgttttttaggcagcacagtcagtgctgatttcattatttgaactcaataccccagagtttacaatgttattaggagctttaccaaaaacttttcaggatggtgctaccaagcttcttcataatcaccttcgaaacactggcaatggaacccaggtaattgttacttattttcttggctatcatataatgtgatggttgatttaataataattgctttcttttatacgaagtaaacttgatccttaatatataatttttgcatctttatttggcagcatttcctgagcagaattaaatattgtcttggaaagaacagagtccctattcctgtcctgtttatattatattataatttgtgtgcattaggatagtggtaaacagtggccaggtatgaacaagaaaagcaaaacgtgagcaaaacatagatgagagcaccagctggaagccattagaatcaggacatgctctttagatgaatcaattcttatttgaggactaacaaggatgacttattccagggttaacaaataagattcaaaggaggtagtgctttaagaagtgtggtcacattaaatgatcacaggcttgtcagtccatttatacttggatgtgcaggaatttgttttgaagaagtaagttctgagtaaatgaaacattgaaatatgtatatttgtgtgtttgtgtatacatatatatattttttactggtatgaaataacttacattatatgcctaaagaattgaactgaagcattaaaaagaaagacatttaatggcaaataaaggagacacactgatggcaggcttaaggtaaagtctgaggagggttaaaagtaattctaaaacaatttcttgtgaaccagagtcagtcatctttttaaaaggagtagggattatttcatcatatcttaagaatagacatattaatagtatgacaagatttaactcccttggtgtaaagcaaagtcaaggagggataaaatttgagcattagtaatggttagaagaaggaaattagctcagaacaggaagctaatttaaaattacattcaatccttgagggaaatgatgttgataatatttgagagcaggaagcaggtgagaacagaa

SEQ ID NO: 2241 - DNA, 6000 bp, Homo sapiens
caagtgagtgacaggattaagtataaaaaatttaacagattatagaaaaccacatgtaacttgagtatcagatctagaaaatttttttattgatctttcagataaatgatggatgtttatataaaattttacatctctttcagagtgtcatgtgattacatgtcaagaggaagcaatgggggaaatggcaatacaaagtgattttatttgaattagtaatactttaaagataaatataatctttgctgacctctttttctgggtttcacaaacaattaaagaatttcacatcctttagcagctagattgtttttccttctctgaaaaagaatgcatgtttgctgtattaaaattataaactaggtataaccttgtaaaatatcctaataaatatacatgttcaaatgattatatatgtattgtggttatgttgcctattagtatagtaaacacatacattctgtgaaacccttgtaaaattttgcatgacgataaattgctaaggcactgcactagttgaatctcacatagtgtaaataaatatattcagttattgatggtggcaaattataaacaaaatacattgatgttcattttttgatttaacatagtcaccttccagctattcacactgagagaggatgacattgctttaggaattcagaatattggccagggaatggtggcttatgcctgtaatcccaccactttgggagaccaaggtgggcagatcaccagagcccagcagttcgagactagcctgggcaacatggcaaaaccccatctctacaaaaaattttttttaattagctggacgtggtggtgcacacctgtaatcttatctactcgggaagctgaggtgggagggtcacttgagttgggatgtcaaggctaccagtgagccgagatgacaccactgcactctaccctgggtgacagaatgagaccttatctcaaaaaaaaaaaaaaaaatcagaatattatgtgctgtcataatttaattgtgcccggtatgttaaaactaaccagaagtctcttttcctgtctactgcacatttctgatggctaataggtcaacttttgtttttttgcaataaatttatttaaagttataaatatgtcttttaattgacaagtaaaaattctatatatttatggcatataatgttttgatatatgtatgcattgtggaatggctaaatcaagttatttaacatttgtattacctcataggtgtatcttttttttaggtaagaatacataaaattcactcttttatcaattttcaaatatgcaatatattgttcttaactgtagtcaccatgatgtacaggtctctttttgttgttttaattgtttatttatcaagagaaactatttcttaccccacatattcataattcatagttcagaaacacaagtcagttacaaacttctaggtcattcaacctgaagaaattctttatattccataatccctttgcactctgaaatataccagcctttctcatctcctcaaaatctttcatggaatcataatttctgtagaaatcttcatgtgccttctttcctggtttagatacagcaaacttataaagagctgctacccccagggatacaatgaatgctcctacaatatgaaattgcagacacttggccagaaggccgtgcatctgaggttttatcatagcaccgggagtcatggtagttactgtccttgatagctatgtcggcctctacaccaacatcttcctggctgatggagaaatcaaatctcttaaacttattcctcctgtctaactgaaatgtgccctttgaccaacatctctccagtcccctgccctctggtaacctccattttactctctgtttctataaatttgactttttacgtgctgcatgtaaataagatcatacagtatttgtctttctatgtctggcttatttcacttacggtattgtcctccaggttcatcttcgttatcacaaatgacaggatttccttctttgtaaggctgaatagtattccattgtgtatatataccacattttctttatctttacaaccattgatagacacttaggttgattacatttttttttttttttttttgagacagtttcgctcctgttgcccaggctggagcgcagtggtgtgacctcggttcactggaactccacctcccatgttcaagcgattctcctgcttcagcctcccgagtagctgggattacaggcgcccaccaccacgcccggctaatttttgtatttttagtatagatggggtttaactacgttggccccggctggccttgacttcctgacatcaggtgatccgcccacctcagcctttcaaagtgctgggattacaggcgtgagccactgcgcctggccgattccatatcttggtattatgagtaatgctgcagtgaacatgggagtgcagatgtcacttccacgttctgatttcatatcctttgggtatatacccactagtggaatgctggatcatatggcagttctatttttaattttttgaggaacctccatattatttttcataatggcagtactaatttacatttccaccagcattgtggaagagtttcgttttctccacatcatcaccaacacatatctttcatctttttgataacagtcattctaacaggtgtgaggtgaatatctcaaatgtggttttagtttgcctttccctgatgaatactgatattgatcattcttccatatacctgttggccatttgtatgtctttctttgacaaatgtctattcagatcctttgcccattttctaaatagtttatttgttttcttgctattgagtcatgtgagtttcttatatattttgaatgttaaccacttatcagatgtatggtttacagtacaatattttctcccattttgtagttgtctcttcactctgttgattgtttcctttgctatgcagaagctttttagtttgatgtactctcatttgtctatttttgcttttgttgactgtgtaaaattataaatacttcttaaaattcattatgaaagaaaaatgtaattttatctcttcttttttttaactggaagtaggaagggaaaaatgtacaagtgtcagaaccttattttaatattttacttcctgtgaatttattcagtatggcacttcccggagaccttatttcacctgagtgacaaaaatgacattaaagtcgatagtaagggaagaaaaaacatagaaaaacatattaccttaaaatttgacaattttttctcaagtttcaatcatacatttaaaccttccttattctaagtcagcaaattcacattgaatatgtgtttagcatccttgctgtatccaaggactgtgtactatgtcatatgctgtttcttaagtgcacaggtacaacatggtgactatagttaataacaatgtattgtatacttgaaaattgctaatgaggggatgtggaatggggagatgtaggtcaaagtattcaaagttgcagatctataggatgaataagtctagagatctaacagacaacatgaagaccatagttcataatattgtgttatatttgggatttttgctaaaagagtagattttagatgctcttgctacacacagaaaaggggtgactgaaacgatggattcattgatttgcttgactatgagaaacgtttcactatgtatatgtgtatcaaaacttgtacacattaaatatataaaactttaaaattgaatttataaaaagagaattgccaagagaatagattttaagtgttctcaccacaaaaaaataagtatatgaggcatatcttaattagctcaattataaccattccacaaatatacatatttcaaacatctgccttccatgcacctacacatcaagaattactgggagaataggccgggcacggtggctcacgcctgtaatcccagcacttcgggagactgaggcaggcggatcatgaggtcaggagttcgagaccagcatggccaacatggtgaaacctcgtctctactaaaaacacaaaaattagctgggtgtagtggcgggcgcctgtaattccggctacttgggaggctgaggcaggagagccgtttgaacccaggagacggaggtttcagtgagccgagatcgcaccattacactccagcctgggcgacagggtgagattctgtctcaaaaaaaaaaaaaaaaaaaattataaacccacacataacatttttatccacgtaagtgttgtcttttcttcagtggtacttgtataactcatttttgtgacagttcttttgggaggcatttctaacaactggtggactcattaaggaacctcatctcattgtgtgagtctgtgttttaccaaaaaaaaaaaaaaaaactatattgcccaccttgattgctaccttgatttgccataccttatttccaaagcactttggttcattttcccaaaaacaaaattacagagttaataaagactagctccctgtgaggctagccaagagtcagccataagctctgagggctgatttaaggaaatgtttataatcttgtcaagatagtcttcagcagttgttcaaacttggggaatgaaacacctgggacctcgaagttctgattgtgtgtgaaaaacaaaaatcatcaacactgtcatatacttgtacctcaggtaggtaggtgattgtagtattaatcacctggctgggcatgatggctcatgcctgtaatcccagccctttgggaggccgaggtgggaggattgcttgaggccaggagcgcaagaccaaccttgccaacatagtaagaccctatctgtatataaaaaaaaaaatcatcatcatcacctgattatttttgaaatgttctctagtgtctcacaataaccatctttctgtcctttctctttgtgctttcctctgcaggtgaaggttgctatccttaaatacatagaaactctggccaaacagatggatccaggagattttataaattccagtgaaactcgcctagcagtgtctcgggtcatcacttggacaacagaacccaaaagttctgatgttcggaaggtatattttaatatgaggtttagaagataaattgggaaagcaagtcagttattatggattgccagtgaaggaagctaatattttcaggaccttagcaattagcagtgagttatgaagagctttttaaaaaatctttaaaattgtttcaaattttatccaattaatgtgagcataattttcaaacctagaatcaaaagtagctgcctttaccacaatcctccctctaattttatcaccattcggaatatttcaaatcattccccttgcatttacctatacatttcaaatgagagcttacactgttgtttgatttatcaatttttagacttgtttttaatctattgatgaatgtagacattaggtatatccgtctattttgttaagtgaggacctagctttctcatactttctgtatcctttctaaggtattcataaactacttatgaatcaattactagttatcagtagaaaagatttacatttgactgtgcaggtattcacttttataccaagtgatttgcgactgcttgctttcttatagaaacgttatttttcctggagttgataatttgccttgctttttcatttgcctactttttttttttaagtatcataatattttcaacatctctgctacatgtgtatggctattatttttcatatgctcaaaagcatagattattattttattttctagagagctccttcttagacattctgttgttttctccagttttgacatgtttctccccaggcctgctgcacacacgtctgtctggaatttctcttgagcatcttcctgagacttatcttcatccctgtttacttcttctatctttttttttttttttttttttttgaggcagtctcgctttttcacccaggctggagcacagtggcatgatactggctc

SEQ ID NO: 2242 - DNA, 6000 bp, Homo sapiens
ttcagtttctgcacccaatcataccagtctcttttcgaaactttggagcaagaacaaaagtgccaatgtcaacacagttgtaatttgtaatttgctttttgtgtttaattcttcttttgtttattcagtaaatattttagcacctactgtatgtatcctaaatggtatcttctgatttgtctttcaattcactaatgatcccttgagttgtgtctaagctactgttatgcatgcccactgaatttaaatttcagttactatatttttatttgtagaaattgcatttggttattttaaaaatctatgtcactttttataatttttcaattcccaaagtcaagtttgctcagttattgtatagtccgtgtctgataactctaggattttaagtgggtcttttcctattgtctgtttctttttatactgttcttggctcatggtttcttgtttcctgttgtacctggtgccttttgggaaattatttgtgggaataatttgaggccagacaccttcttccagggaaattttgcattttgtttggctgttggttgggagtactaccagtctgagcccacagagtttaaggtcttgagtgtctggaccacccaagcagttgaccttaatgaagcactctatttgattcacttctctgttattctctttcaagaagagcttgaaaggaattgactataggaaaataagatcttacttatgatttactttaacctcgagggtatagttgtttggtataccagcttttggtgggaagagtcctctgttagactgcatctaatgtgggttttgaattctgttccctttgccccacaaggccttcagaatagaagttccactgtactggttttatccttgtattttttactatattataaaatatttattgcttttattacgtataaaaatttgtacattatttagtgtgtatcattgtttgtgtttgtagtattactttaaataacttagtaatgctttcactggagactgaaagtctccatactgtgaaatgtgtgccgttctagatattgttccacatgttgaagatataacaggggcaaagttgacaaaagtttttaatcccacagctcatatatttcagtagcaggacacagataagcaaaataagtaaaatatatagatgataagtgctaggaaaaaataacacaggcagggatacatcagagtaccagggtgttgggaagtttgtgattttagtatccagagaaaacttctttgagaaggcagcagatgaataaagacatgaagatggtgagtgaacagtatggatgtggatgaaaaaagcattctaggcagaagaagcaaggcaaaggccctgccattgaatcatagaagggaggctaggctggtggggggattagagagaaagaagtaggagataaggttggagagacctgtgtgaccgttaagatcttagagttctggtagacctttttatgtagtcataggaggattttgaacagtgatgtgatatgactttgttcaacccaggatgccatgttgagaataaactttaggggatgaggtaagcagcaggaagagttagttggctgtgacagttattcctagactgttctaggtaatggggttgcagcatgaacaagacagtttcttctccttaagaagcttccaatccacatataaaaatcagtgtctattatttcagtaagtgatagctgctaggaagaaaataattgaggcttgttttgatatttcatagttatttagaaaaaaattcaagcccagaatatttataaccttttacaaatgtttaacaaaaattttaaattttagggctagtgataatgaattagttttatgaattcttttagctgatagtaataaaaaccataaccttattggaagtgggtaaaattttatttcttcctatgtttctagatttatttatttttcctttttagtttttcagtttttgttttatatatatgaagctgtgttactgggtacataaatattcagggttctgatttttttcccgtggaataaccgctttctcattattaaacatctctctttatctccagtaatgctttttcaagctgctttgtttgaaattagtgtagctacaccagctttcttttgatttgtgttttcctttagtctgtctttccctaacctttttgtgaccttataggtaaaaatatatctcatttaagcaacctatttttaaaaattcagcctgggtctttcacttttactagttcatttatatttaagagaattactgatatccttggttttatatttactattttattttctatcgtatccacttgttttatttttctttttgtatctcttcttttcagttaatcagatattttaaatttattttcattttcttctatgtgtatacttactctttttttttttgcagacggaatctcgctctgttgcccaggctggaatgcagtggtgcgatctcagctcactgcaacctccacctcccaggttcacgccattctcctgcctcagcctcctgagtagctggggctacaggcgcccaccaccacgcctggctaattttttgtatttttagtagagatgggtttcaccgtgttagccaggatggtctcaatctcctgacctcgtcacccacctgcctcggcctcccaaagtgctgggattacaggcgtgagccaccgcgcccggcctacttactcttcttttagtagttagcctagagcagagattggcaaactgttgcttgcggatcaaaaccatctgccctcctgtttttgtatataaaattttattgaagcacaactgcactcgtttgtttacatattgtgtgtatataactgctttggagctataatgtcataattgagtagttgcatggaaaggccgtatgtgtatggtttacaaagcctaaaatatttgctgtgtggtcctttatagaaaaagaatgccatcccctcccctaggggagtgattcttaaactcaatcatgcatcagaatgactgggagggcttgtatgttaatacatagattactctagagtttctgattcagtaggtttgggttggggcccaggaatttgcatttttaacaaattgcccggtgatgctcagctgctggtataggggccacattttgaggactggtgccatagatattactatgcatctttgacttataatctaaaataaattattaatctaaaatctaattatatatagttataatctaaaataatctaaaataaattattgtgtttactacttcctcagtaaggctcaaatctttagaaacctttgactttgtttgcttaccttttagtagtaccattttataataacctcatactggaacagcccatgtcttgtcggtagtagaatggatattaataaattgtggtactttcacacagtagaaaactatcagcaatgaaaatgaatcttccaaacattatccttccaacattgagtaaaaagaagctagataccagaatacatattgtatgattcattttatataatgttcaaaaatgaacaaaaccaagtgttagaattcgagactagttagctttggtagtaaatgtagacttttaggagtctcgagggtacttacacgatgctggtaatctgtggatctggatactggttatactggcatgatcattttgtgaaaattaattagctgtgtacttatgatttgtatactttgctgtattttgataaaaactttaaaaattaatttcccagtagtttgagaaaagagttaattttttttttaatggtagggacatatttactcttttcaattcttgtgtgtgtgtaggaacagaatactgtttccatgggaacttctggctgctctgtgttttagtgcttaactttctgtagatttgtatgtctactctttcttagctgcattttttttaacataacagtagcaaagaagtttatttggaattgtattagtgtttttaacaaagccgtctatgtactgcataggttttaagcttattaatttatccaaactgactccctaatagtgttatgctaaaaaaataattttttaagagtagaagataattttttcctgcaagttgtattacttaaaaacactttctgaaatagaatgtgactttagagtgtctatttgattcttttttcttttaataaataagtcttaaaactttcttggcatattttaagatatatttaatagttaaatagttatatattaaaaatagttatttttctttaaaatatttaataatatctctttataggaattatttaattctaggtgattgggtgtttgtttaagtaaagaaagttcattgaaaggaaaagattctggcatattcatctgaagcgtgtggtaaagctgcttctctgcctcgcccatgttgtttgtcatggttgatttgtgcagggtcctagagaaaaccatctcttctcaggagagtaaaatacattgtgtgtgtgtgtgtgtgtgtgtgtgtgtgtgtgtgtgtgtgtgtgtatgctgggagatgtttcatttgcatataagtagatgatactagtgtggtcattcatattccgaaaggagccttgtagaatcatttatgaaaacaaattgttttgtttggtttctatggcttaaataaagagcagattttaagattacagagttaattatgcacagtaatgagcactgtggcagtctatgctttactgatgcaataagcatcccagcagaatgaatattgcataaaaccttattttctatttatataaattttcatgtcaaataagaaaaacagatttctaagcctttagttttgaatgcctttgaaattttgatatagaataaggattatagctaatagagaattttttagatgcatggagaatttttacctttcatctggcagtagctgccataagatgatgtcaccttgtagctgattggctgttacagcacctagggcagggaagagaaagaaaaatgccggcacaaacctcagtggtggttctgtggttgtttctgtctttttttgatagaatctttgattagtatcgaatttactgtatttggccatgtgaactattgggagcctcctagggtgagggaaattaagagctttcagaggaatgaggcgactgatttgcaaacggatctgtgattgtaagttgcagaatctgggtataaggaataaggcagggcgtgctagaagatacactatgggaggagctggcagaaaatgcagagtagcaaaaacatgaaaaatacttttactacctttagagttaaaatgttttatgttttgacttaatatgtataagtaagaagtatgaaaatactgcattttgattttgaattacagaggattattttatatggtgttagccaatatataaatgcttattcaaaggacctttatttcgtattatatatcttaccaaagtaatgattttatatatggctttattttatttttgagctttagggaaaatggaacaaagcttagttctcttaaatacatttttctgatgctttgtgcagataaaagcttcgatgatgaagaatcagtggatggaaataggccatcatcagctgcatcagccttcaaggttcctgcacctaaaacatccggaaatcctgccaacagtgcaaggaagcctggttcagcaggtggccctaaggttggaggtaatgtaaatccatttcaaatctgttatgcatgctccatgcccttgatatggccacacatacttggaacttcagaggaatatgtttattcatgactgcagcacgattgcagatctggagtctgttgcaacattcagaagaatacgatgcccttttgaaatgtataaaatattgtatactgctatttcctctaagaatgtatgtgaattagtctcttcttgagggtatttatttttcagatgccattttgaaaaagatttatggaagttttttggggtttttttgttttttttaag

SEQ ID NO: 2243 - DNA, 6000 bp, Homo sapiens
ctgaatataaaattagaaggaccagtggaattggtgttgtatgaaaacagtcgtgtgaaacagggatagcatcagattatcagtgatattagccatctctttagtttttgatattttatattttattgtttgtatgtttgccttaagttactttggcatgatttttatatgcctttaaaagatgtcttggtgactgagtagacttattatgaggttgaaactaggatatttttgatggatttggaggaatgattttatgatgaaacatgagaaactgctttgtgtaaaaattgtcttttcacaaacatacctgcaaatatgtagagtcctacctatatgtgacttctttcaactgaagagagatgggttttgtgtcttctttcagtgcgttaattgtgaaagagagttgtatagaaaactagctgaatccctacaattgttttttctaagggaatggtgaaggaaattgtttctatttaatctatatgttttaaaaaatcaaacaaacccaatttattctttattcccagattagaaatgatatttgccaaatttgatgaagtgcaaagttcaggcggtatgattttgagtgtctgcaaaggtaagagtaattaagctctcaaacatttctaagactatttagcaaagttttaggcactaaaatgtattatatatcactgattcaaaagagttgattttgtggcttgaaaacttagttgagatataataacaaaatatttacatcctgctgataattatctatcctctgattcttttggagtgagtggaaatttaatagtgagtcagttgtgtaaaatgatactgttcttttttttttttttttttttggtgatactgccttgttttttgtgtcttctgggttgaggtatgatgaccttcttgccctccattttccatgcatacaatgtgtttttatacctagaataattgttttacttagttgtctttaatagaaattgtggggttgatgggttctattatatctgtgtacagactataatagatcaagagactataactgatcaagagactcatacacaggaacttcactagcataatcacctcaggcttaagtagaatgagaccaagttggaattcagggaggtctggagttaatatctggtattgatttgatttttgtggttcctctcctttttgtaaagttgataaattatgtttagctttgttgggtagcatttacctacacttgagactttaaatattaattagccatatatgtaaagaatatattctatttccaaagataatataggttgcttttccacctagtaaagtagtttcatattaaagagagtgtggttagtttagtaatataaatgatgttggagtaaaaatttggtgtgtgaatttacagtcaaataattggaaaactagttactaatataatttagttactgttctttgggttaaaccaagactgaggatgtgttgcgggaagtcagatggagtaagtgagtgttagaaagattgtgtttacccacatctaaacttagttccagaagcataaattgacttcagtgctaccagtcctcaccttgaatgccagaagattctcacttcacttctctgaatagaaagtgttttaagtatcttctccttatttttctagcagttacctctgtcaatttctgtagaaaccagaaacagtaggaagagatttgacaagatgcttgaacttgtgtgttttcataacatgatcgtttgtgtatttcagactaagttagttacaactctaaggaaaaaagtagaatacctataaaatctaaggtattcattgcttgggtatggtttatttcgaaagcactgttattcttgtattttgtgacattatttctgttaccttcaaaatagagcttttttgtttctttagttcccattactttttctcttgtttatcactccataaacagggaggttcggagttagtctctggcatttattttttttgaagaagacttcaaagattgtttgcattgatgattacagtctgaatattgcaagtatggtcaaatgtgaaagttaaagtcatattggtcataatgtttttgatgataatatgctgtcactgaaaaattccttaatgaattaattaacaagaggatgctagaagaaggaaacctatttatcacgttggaaaatcccagggcccaggcctcctcttccctgtttttattctctctttcttagtgatccaaccccactcaaaggctttaaatgataactctttgctaatgattcccagtatgtaggtctagccatcattcatctctcctttgggttaggtctagacttgttagcctgtggccttgatgacgttcccatttggctgcctaataggcatttcaagcttcctatgtccaaaaatgaaaccctgttatcttttcttgcctctcagatctgttccttctccagtcttagccattttagtcagtggcaccatcatcagctcaagctagaaacctgacttgatttcctattctaactgatcaaacatttctacttctgaaatactaacatatcccaaatttgcttattttttccatctccactgctaatatcctctctaaatctcctttagcttttgcctggactacttctgtagacttctgttccatgtttgcccccaggaatccatttgctactcagaaatcatagggatcttcttaaaatgtaaattagatcatgtcacaacaggaagaagataatgaaatttctccccttaaggagcctataatctagtgatggagatagatcataaacaagtaaataaatggatatacaatgtggttacagttggtaatggaggaaatataactactccttgtttaatgagtttaaattattcctaaataccctgctgccaagtgaaagaccattagatgaaaaaattattttcaccagtgttaatgagaaaaattacggtgtgtttcatcccagcccatgatacttgagtagttttcccaggtagaaaaatatatcaattgaatactgaaaacaaatttttataagtaacaatttgaagggaaattgtacatgaagtaatatcatggagtttaattcaacttcttctttatttctgcacaatttttccccacaaaattttcaggcctttgttgattcatttttattgcacactaaaactaaaactaaaactgtaaataaagtgatagaaacaggaaaacattttaggacagagtaaaggctcggcatgaaatcttgtggaaatagttcatgcacacaaagagctgttgaagatactaccttttctctccctcacttggtgcatttatgcaaaataaattgttttgggtctgtccaaaaatggcacgcaattcaaatttgttccacctgatattctgtgaccagaaactattatggtaaacaaaattttttggtgtgtctttgcctgaaaccataataatgacacatcatacatcttacagcatattgatttagagtgtttcgtgatgaaaaaaatcattttactaaatacaagaaaccaaaggatttgttgtaaaggtgatataacttttttatagctaaaagttgtcatctgaacagtcattaagtgagttatagagtatttgatggttttttgaactcaacttgttatattgtaaaagtaagttaggcagagtccctaaatgcagtagaattagctctgctgttagaagaaaactggatttaaaatctgtcagatcgtgactagaaggagggaacaccagccctgtaggaaagaaaagactgaaagttggagaccccctgcgattatggcaggcgctggtgtcgttatggagctttctagacagtctcctgcacaaaccaaggatgtaaacactaacagtgttggtggctgtaattgcaaatccttttctctttcactgtgaaaaaaactatgcataattcttatttgtcgagtgtgtgtttaggacctaatgcagtcttggccatgcaatcattagtaaagtattttctggcttctctgtttgaaacagttgctaggaaaagaattgttcttggaggctggcaataaaataaaacctggaaatgaggctttgaaattaccttaatatttggcttctatgagtcaataagataacttccagtctagttttgtatatttttataacataccctttggtgaaaagcaaagcagctcttttctttggttgatttttaaaatgtatctgtttgtgatcatgagctccagggcctgccttcagagcttgacaatgtgctgatggttgtcagcttggatagagggtgctctgcgcccctgcagctgcgcattggctaggttctgtctccaccagaagtaagctttgttccgtgtggccctgctgtccgcgcacagagcagcctttgatgggctgcctttgacgtgatttgtttacggcagccagaaatgcttcctgcataatgagagcagttaatcatggaaactgggctattcctgtttatgcacttctagcaatcttctgttgtaaatattaaaaggtaacgacaaaaggatgaaaacctttttaaaaaggcgcaaatcagttaatccatcagatcatgtgattgctactgattacatggatatctttagggaagcagaaaatgattgctgaacacatgccttgtgttttgatgattgcattaaaagtcccccagcgggatggcatttattggctctcagagcttttcttagattaaatttcaggcagccagtacaaggagaaacatcataacctgtatccaacagcatatgtgcagctaaagagtaatcttaatcaagtccttctaggctgtgctaaataaacgagggttttcagcaagaccccagacttttattttgaagtggagtagcagctgttggctattgcggtgcagagctgcagcgaggcctgggtcacacagtgctccgggtgtctgcaggctgcaggccgagcccagtggcgcaggcactgagctgtacttatttgctgtgctatttgacctcttggtttcagagagctccctggaccatctaatggctatgggagatggtgagtaagatttatttttcttcttttgcttgtgttatacacttccttttaaggtgacgatcatttgctgtgtaagaaatatatttctccctaaagaatgaaggacacttgtgtgtttatgcatgtgtgtacacttgtgtgtacatttatgcatgtgtgtgcatgtcatttgacatcttttttcacttgatgtgtctgtgtgggatctggcaagcatgaggtgacaatttaccttgcaacccaagcaagcttcagtcttggtggtagatatgaagggatattggaagaaacgtggaatatgtgcagaagcttagaggaagaacattgcctttggaggaatgacagattttagcaggaagatttgactagctagcttgatatccttcctgttgtatttgacacaagtagaattctgtggaaataaaatatttaaagaagcaaaatggcttgccatgggcattattttaattcatatgattgttaattgtcagtgtcccaacatttttctagaaaatatttagccttttaagattatgcacagggtataatttgattaaaaattgattttgccagtgttttagtttggtaaggataattttaaaaacacattatttctataatgccttattaggcattatagttctccaaagcacttttgtatacttaatatatattaactcctcaggtgtgaacaactctgtgaagtgttcagagtgttttggtatttccatcttacagattgggaaactgagacctgctgagacaatatgtcccagatccaggcacagaaagcaaaccagtaccaaatctagggtcccaaatgtgtgtttggtattttccattataacacttaatacttgagctttttttcttttttcattacacctttttttgttacgaggcctagagatatactttataatcacat

SEQ ID NO: 2244 - DNA, 6000 bp, Homo sapiens
atggatatatgggttgtttccagtttgggttataatgaataaagctactatgaacattcatatatatgtatatcccttttaacctttaaagaaagattgtgataaatctttggcaagacactcccatctattcccccacccccaccccagtacctaacacaatgcccttcttgaaggatatttgctgaagcatgatttcaaaccagctgtgtgatgatttatttgtctcctagccttcgtatggaaaataaaatccagtggcagaacaaagtctactcaaagtttccactattatcacaaataatgaacaaataagtcaggaagtcagtctgctgtatttaaatgatctatttcagtcttgttgccagttaaaaatagacttctgttcccagataaattttagtgactgatcataaaagaatgcagatatttcctacaccattttcttttttaaaattcctccccattttctccacctcctttcttttttctttttagcagaaattcagagaaaggcgggtcctaaatgaaaatataaataaatattcaaagaaatacaatatgttttgcaaggagtgttattattgtggtagttaattcaaaactttcttcttccaattttcttttctttaagtctatctatttgaaagaccacagaagccagacatcctgggtttgaatcatggatctgaaatcatgagtgagtctgggaacttaatctctgagcctcagctttctgcttgctaagttggggatataatatcttccatacagggttgcttagaggattaaaagccctaacacatgattaggcatgagtctttgtgaagcccagtccttattgaatccataccttcttcctgcatgattaccatttgtttcctgttctctttgtctctctgaaaacttgggcatcatcaggcatctgtctgcgtcaaagttcccaaattgtgtggccagcaccctggggtgccgaagcacacacaccaagagcactccaggatattttaaattttgaagggcaatggtgatcatgggcatttgtgagacatgtaatggctccaagtagtgcatggtttcaatatgagattgtggtacattttttttcattgatgtcgtgtctttgtattgtagcacattttttttgttgatgtcatatctttgcaaggctgtgttttttgtggttgtgttgatttaaaaaaaatcaatcaaatctttgagcccaggagttcaagaccagcctgggcaacaaaatgagaccctgtctctacaaaaaatagaaaaattagccaagctgagtattgatgtgctcaactgcctgagtattgatgtgcaacaggatgagaatgatgatattcagtctcattccaaggttagagaaattgggcagtaaccagtaggcaccgatatctcatttgtaagtgtggttgttcaagaatgaaatttaaaatacaatttttgatttgcatatttttttcatatgcctagtaagttgctaggatataaatactaagttgtttggatctcacctatttagtggacttcttaggtgtttcttttggtctagggatgctgtgaaaaaatgactgaggtgctagcaattttgtgaactttcagctctaacaatgttgaacctaggacagataacagtgatataaataaagatgtagattttgtagtgggtatatactgataataacaaatggttaatcaaaatagttgagactacatcttgtagacaaacatgcaactccccaggaaaccaattctttaattagttaattcctagttatcctcaaagttcaatttaaatataacctcttccaagaagccttctttaatttataacttttctactcccatactaagtactatctagataaggagcctctcatctaggtttcaaaaaccctctgtttaccctatcacagcatctcagaaatgttgattttcttgtccctactagagcttgtgggcagagaccaggtctaaatgaattttgggtctttggaactttggcacagtatctagcacaatataggtgctcagaggatatttgttaatgaattaatgaaacacagaaagaatatataagtaatagtgaccaatgtttactattaactttataggccaggtgcagtggcttatgcttgtaataccaccactttgggaggccaaagtgtgaggattgcttgaggccaggagttcgagaataatctgggcaacacaatgaaacttcatctctactaaaaataaaacacaataaatgataattaataataattttacaggttcttccagagttactcctaaagatgatttagttaacttataacttaaaaatgacctagtgtgattttcaatttacattaagttcagaaagggaatagagacaaccaagggtgaagagcagcagtcacctttggtcacaggaacaggtagagctgaacctagaatccagggctcctgcatttttttttttctataccacatactgcacctggtcaccagcaattacagtgtaaagttcttctggataggatcctctttttatatctttctgcaaccctttaagaacagaacctttggacactcaaacccaaggaatagttaccataatgtattagtcagggttctccagagaaacagaaccggtagatagatatgtggagaatcattttttttaattttttaattttttttttgagacagggtcttgctctgtcacccaggctggagtgaagtggcacaaacacagctcactgcagcctcgacctcctgggctcaagtgatcctcttgcctcagcctcccatgtagctgggaccacaggtgtgcaccaccatgcttggctaatttattgattttatttttggagagacaaggtctcactttgttgcccaggctggtcttgaactcctgggcttaagcgatccttccacctcagtctcccaaagtgccgggattacaagtgtgaaccactgcacttggcctaatgagaggataattattataggaattggctcacacggttaagggaggcaagaagtctcatgtctgctgtttgcaagctggagaaccaggaaacctggtggtgtaatacagtcctagtctggaggcctgagaattggaggactgatgatataagtttctgtctgaatactaaagtttgagaaccaggagcacccatctttgagagcaggaaaagatggatgtttccgatcgagcagagagagtgaatttggcctttctccacacttgtgttctgttcaggcctcaacgaattggatgatgtccactgacattgggaagggccatctgctttactcagctcaccaattcaaatgataatctcttccataaactctctcacagacacactcagaaataatgttttgccagctatttgggcatctcttgccccagtcaagttgacacataaaattaaccatcacacatagtttacttgattgaggcatagtctgagggaaattacaaccaattaaagatggaagaaactttacaaactcaatacaatgtgaaacacagaaatactgaaaaaagaacacagaaaacagtcaatttctttgaattttgagtttgtttattcttagttattgtgaatatttcaaatatcaatttttgttgaattcattcactcatttaacttaaattggccacccattatttgctaggcaccaccctaggaaaacacaaaggttcctggagctttctgtgtattagaagagaaagatattacataaataatcattttgttgtgattgggaataattgtcaagaagataaacacagtgtgcttttggaatgtattagacaactttacccccaccagaatggctaaaactaataaccctgaccatatcaaatattgtggagcaactggaactctcaagcattgctggtggggatttaatatgatccagtcactttggtaaacaatttggcaggttcttctaaagttaaacatacaacttacaagacctagtaatgccagtccttggtatttatttacccatgagagaagaaaatatatccacacaaaaacttgtgcactaaccgttgtagcagctttattcataattataaaaaataggaaacaacccaaatatctaccaacaagtgaatggatcgacaaatggtagtgattccacagaatggaaagcaataaaaaggaatggacttctgagacaccaacagcgctggatggaccccaaacgttatgctaaaagaaaccagactccaaagaagcacagactgtatgaagttcaggaacagggaaaactatgttaccatgctagaaatcaaattagaattgcctagggaagagcagataattgggaagtgtcctgggacttcctggggtgttggaaacgtgctgtaccctcactggggtggcggttccacgggtgaatacatttgccgaaactcatgaagtgtacgctgaaaatctgtgcgttttactttaggcaaacctaagttttgttttgttttgtttttttaagtattacacagtgactgtggtggtggctggaagcagaagtcaggagtgtattcttttttttttttttttttaaaccggcagtgggggcgggaaagggggatgccaagtactttcctaagtgttgaatacaagtggaggcaaacttggaaacgttccacatttcacagggcgagggcagggtgccctgacagcggctagcaaagaacggcccgcctcccagggggctcggcccaactcggaccccaagtctccctagaggtcctatcgctcccagcggtttccgcagccacctccaccacctccgcagcaaaacgctagccggactggagggccctcgccggcgtcgtgctgacgtcacgcgcgtgctgacgtcgcccgcggccgcggcctctgaagcgggctggggatcggggggcgccgagtttgactagtttgggggcggctgggcgcttggcgttcctcccgccgcccgctgcgccccgcaagccgcgcccctggcgggctaagtgagtcccgcccgctcccgcggggacccgcactggaggctgggcggctctcggcgaaagttggccgctcacagactggcaggcgggcgggcggccgcagccatggagccccgcagcatggagtacttctgcgcccaggtgcagcagaaggacgtcggcggccggctgcaggtcggccaggagctcctgctctaccttggcgcccccggcgccatctcggacctggaggaggacctgggccgcctaggcaagacagtcgacgcgctcaccggctgggtgggttcgagcaactaccgggtaagcgacggcggcgaggctgggctggtcacgccctccgcggcagccctttaatcccggacgcgagcgccgggccgggaaagctcccgtccgaaccactgcttaagaggggaaacacactttgggaagcacaggcgggcggatcacgaggtcaggagttcgagaccagcctgaccaacatggtgcaaccccgtctctactaaaaatacaaaaattagccgggcgtggtggcgggcgcctgtaatcccagctacccaggaggctgaggcaggagaatcgcttgaatctagcaggcagaggttgcagtgagccgagatcgagccactgcactccagcctgggcgacagagtgagactctgtctcaaaaaaagtaaaaaataaataaaaataggggaaacaggggggtcccgcgtccccactgggcagaccgcctcttcgtacgcgagccgaggactgacttgtgaccacatttttctacacttgtggacaatgacaaattcagcgattccgtgacacgttgcggagttactaggacacaatgttgatcacttattttgaaaaaaaaatcagtgaaagacttcgacatttgtgttcacctgtgtaaacactacccagaccaacagataggacattaggatacgattttaggttgatgtgtcttagtagataggctaatg

SEQ ID NO: 2245 - DNA, 6000 bp, Homo sapiens
tcaagaccagcctgactaacatggtgaaaccccgtctctactaaaaatacaaaattagccggccgtggtggcacatgcctgtaatcccagctacgtgggaggctgaggcaggggaatcgcttgaacccaggagacggaggttgcggtgagccgagattgcgccattgtactccagcctgggcaacaaaagcaaaactctgtctcaaaaaaaaaaaaaaattcaacttttactctgggcgaaattgggagcacttgcaaggcttcaagccagggaggggcatgatctgactaatgtaaaagaatcctctgagtgctggaagtcaccacggagggacaagggctgaagcaagagcccagtgaggagactcttgtaatacccaattccggtgggagtggatggtggttcagaccttggaggtaggagttgagtgtggaaattgataggattccagatatattttgaaggcagagtcaacaggaattacaggtgggggctgtgagagaaagagaggagtcaaggatgactccaaattttgggcctggacaactaaagaatggagctcccattaactgaaatggggaaggctgaggaggagcaggcactctatttcggacatattaagtttgaggtgccatccagatgtcaagaacatgatggatgtacaagtctggagtttgggagggagatgtgagctagggataaaaactgggatatggttcaaaacatgtttaaaatgtccatgaactctcacattttgcaaatgggattatattctggtataatctttttggagggcattttggcagtatctcagctattaaaatgtgcacacctttggccaagcacttctatgatattatcccacagaaacattgtacggctatgcaaagtatgcacaaacatgaacaaggttgctcattacagcattatttataggagcaaaaaagaaaaaagtagttctccatgagttgccataggacataataagtgaaaaatacaaatggcaggacaatatccatgtataacattatttcacttgtgttattaatttttttttttttttgagacagagtcaaactctgtcacctaggctgtagtgcagtggcgctatctcagctcactacaacctctgcctcccgggttcaagcaattcttgtgtctcagcttcccaagtagctgggattataggcatgtgacaccatgcgtggctaatttttgtatttttagtagtgacagtgttcatcatgttggccaggctggtcttggactcctggcctcaagcaatccacctgctcatccttctaaagtgctgggattacaggcataagccaccatgcacggcctgtttttaaataattttttaaatgtcttgacagataacagtgttcgtgcaggcagaaaaaacagctgaaagtaagcagaaatattctaataatttgggggaaaggactgagaagaagacacttcctttttattatttatgtactatttgaatttgtttttatacacaggtgtccaaacttttggcttccctggaccacactagaagaagaattgtcttgggccacacatcaaatacgctaacactaacagcgataagcttaaaaaaaaaaaggtccatgcataatgttcattatatacatcaccacagataagcaaaaatttctttgcaatcaaaaagttggacatctgactgggcgcagtggctcacgcctgtaatcccaacactttgggaggctgaggcgggcagatcatgaggtcaggagttcaagaccagcctggccaacatggtgaaaccctgtctctactaaaaatacaaaaattagccgggcgtggtggcacatggctgtaatcccagctactcaggaggctgaggcaggagaatcgcttgaacctgagagggggaggttgcggtgagccaagattgcaatactgcactccagcctgggggacagggcaagactccaactcaaaaaaaaaaaaaaaaagttggacatccatgaaactatgaaatgtatttaaaagttaaaaaaaaaaaaaaaaggccaaacgccaggtgcagtggctcatgcctgtaatcccaacattttaggaggtgaaggcaggaggattgcttgaatccaggtgtttgagaccagcctcggcaacttaggaagaccttgtctctacaaataattttaaatattagctgggcatggtggtgcacgactgtggtcgcagctactcgggaggctgaggcagggggattgcctgagcccaggaggttgaggctgcaatgagctgtgatcatactcctgcaccccagcctgggtgatagagtgagagcctgtttcaaaaagaaaaaagcagtgaaaaaaaaaatttaaaggccaaaaatttgtgtgggaacccagagatatacaaacaaacaagaatgtagtcaatagaacgggttataaaatgaagacagcaactcacaaggaattccctttgtgccgatgaagtccccaggggaggggagctgaagagtggttccaaaagtgacctgagccctgttaccagtgcagggtcgcagccattcatttctccagttagccagggagcaaacagaaattgaatgctgggcatggtagaatcagggatgaatccagtttatcaagcagagagatactggtagaacagggacccgagggtggagataggtgatgcacagaagaaatagggaggcagggaagagagtgtgtcagtcggagggaatgggcagcagcaccagaggctgctgagatgaggactgaggggggactgttgccactggagagacaggagggttgctggtaaccttagcctggagccagaggggggaggggtcatgcaaagggagacctctcccaggctagtcagactctgtgactgtctctgaggctgtctagaggcagggtggagaagccaaaagtaatggcaagagtccattgtcctgtccttccctataacagggaagggggccagagagcctccacaagcggaactgctcctaaatgacaagaccacccaactggggctccatttgccacattagagcaatggaggcccccagactgttgcacccctcttcctacccacagctccttcctgcaccactgggggccttgcatgcttgtggaaaattggagaaatgcctgtttgccaaagctccctccacttccctcctcctccccccaccatagctacccttttaagtcagccctgggaggataaacttaaagaagaggcctgcataggccctggaatgaactcaggacatgtgggcacatacttttggggtcccatgtgcctggaggcgaggcacggggcacatcatcttggccctgtgatctcttactctgtgggaaagagtgcgggggacagccagagatgggcctctcaagcacacagtccagggcaggcggccctggcttctcagctctcaggacagaaaaggtcctggaaaggacaaaagagagagccaggcccaaccaagagaagtagaagtggaagtagcccaggtgtgtgggcaagcatgctagcactcatctctggaagtgggtttcaggatgtaaggcaagcaaactcagtgtggagtagaaagtggttggttgtatcacctgtgagcaaaagccatggtgtgcaaatgacaacagtcaatgtgatgttatgctgctgccctggacaaatgcagtcctcttttccatctcagtgatgctgtcatcacccccctgattgcacacacaggatacctgggagtcattcttggtgcctgtttcttacctcccattatccaccagcaagtcttatcaattctactttttggatctatctccaatccagttccctctctctcatccaatctcccttcatctctttcctaacttctgtgctagtttcctaactgaacttcctgatgcctcttgcctctcctgtctattctcatagcaatcagaatgatcttagtaaaacagagctgaccatgacatgccccagcttaagacccttgatgaacctcctactgccctcaaaataaagtccaaattccctattgtggcctaccaacccacttatgatctggccctaacctatcagtgtcattcctccaccctcacactctttaagttccactcctcctgaatttcattccgtccttcccacatttttaaatattttgtaaagatggggtctccctatgttgcccaggctggtctcaaactcctggcttcaagtgatcctcgtgcctcagcctcccaaagtgttgggattacaggtgtgagccaccacacacacgctcttatttaggtacttttttgttttttgtcattctactaactgtagtactgcattgtggttttaatttccacttctttgatgactaatgatgttcagtctactccttctttgaaatctctgcttggttttcatttgttccaagaagtaatcgctccttctacagactaagttcctgtcctcctttgtagttccatgacaaccaatatttatctccaccttggccttaacccactaaagtacagttgttttacttttacctccacacccaccgccatcatcacaaacacacacatacacgactgtgcacttcctgaaggcagaagcagcatcatacttctttggtatcttcagcaatcagcacagacctgaaacacaatctttacacaataaatatgatgagtgaatgaacagttgcttaacaaattaaagaatggatgaaggtaggtagttaggtacaaggttttgcagataggcctggctgtgtcaattaaacctttcttcatgggtcctcacacttagtaagctcacttttaaaaggacaatgctgaagacacaaatgtttacaatgaccacagcgatgacgggatccgagagaaaggcaaggcggaaggggtgaggccggaagccgaagtgccgcagggagttagcggcgtctcggttgccatggagaccaggagctccaaaacgcggaggtctttagcgtcccggaccaacgagtgccaggggacaatgtgggcgccaacttcgccaccagccgggtccagcagccccagccagcccacctggaagtcctccttgtattcctccctcgcctactctgaggccttccactacagcttcgcagcccggccccgccgcctcacgcagcttgcgctggcgcagcgtcccgagcctcagctgcttcgtctgcgcccctcctcgctgcgcacccaagatatctcgcacttgctcaccggcgtcttccgcaacttgtactcagccgaggtcatcggcgacgaagtgagcgcaagcttgatcaaggcccgcggcagcgagaatgagcgccacgaggagttcgtggaccagctgcagcaggtaacgtggcggtggcgtcgcgtctgcggacggtgccggggtctcagcgctcggcacgcgtcagcacctgccaggtgccaggcgctgttccaggatctggggctgcagttgagaaacagcccatcatgccgaagtgggcccgacattctagtggaaggacgctctatccatacacacacatgcgcaaataccacacataccacacaacgtgcggcatatatctgtagcacctgtctatatttctctagacacatacgttatatattgcatatatcaatgaacgactgcggcagaccgctgaatagttgttccatggagaggataaagccaaaagtcacccggctttggggtgcctttgtatcacaaaccacaatcttgactgggccattcatgcgcagattttaggaagcgtgtctagcctctagaacagcaactctgcttcctcatctgtacaaggagaaaaccagctgactcgcggcctctgtgctgagtcggcctctgctggccacactactgaagactcccttaaacttgtgggcactcctcccatacccgatcctttaccccggtgtgcttcctgcctctcagatcttcttcttctcctttctgttctgtcctctacctgcccc

SEQ ID NO: 2246 - DNA, 6000 bp, Homo sapiens
agtagtgccatctccactcacttcaaccaccgcttcccaggttcaagcaattctcttgcctcagcctcccaagtagctgggattacaggtgcccaccaccacgcaccactaattttttgtatttttagtagagatggggtttcactatgttagccaggctggtcttgaactcctgacctcatgatccacccatctcggtttcccaaagtgctgggattacaggcgtgagccaccatgcccggccaagatggtgtttcaccgtgttggccaggctggttttgaactcctgacctcggcctcccaaagtgccgggattacaggtgtgagtcactgtgcccggccaggagttttactgtgaagggaaggaatgaatatagttggaggggaaagtggcatcaaggaaaggctttttatcactaataataaacatttcattgaaatacaccattcatacagaacagctaacaaatcttgagtgtgtagctcaatgaatttccacaaggtgaacacactcaggtaaccagcacccagatcaagaaatggaaagtggccaggtgcagtggctcatgcatataatgctaacactttgggagtccaagacgggaggatcgcttgagctcgagagtttgagaccagcctgggcatcatagttagactcccgtctctaaaattatacatatatttttttctgagacagagtcttgctctgttgcccaggctggagtgcaatggcatgatctcagttcactgtaacctccgcctcctgggttcaagtgattctactgcctcagtctcccaagtagctgggattacaggcgtgtgccaccacacccggctaattttttgtatttttagtagagacggagttttgccatgttggccacactggtctcgaactcctgacctcatgatccacccacctcggtttcccaaggtgctgggattacaggcgtgagccaccatgcccagccaaaataaaaaataaaatttttaattagctaggtttatgggtgcatgcctgtagttcaggctactcaggaagctgaggtgggaggatcacttgaacccagaagttcgaggctatagtgagccatgatcatgtcactgcactccaacctgggccacagagcaagactctgtctcaaaaagtgaaaaataaataagaaacagaatatgaccagttgccaatatccccttcatggccccttgcagtcaccaccatctttctgaaaggtaactagtaccataactaactttttttttttttgagacggagtctcgccctgtcacccaggctggagtgcagtggctcaatctcggttcactgcaacctccacctcctgggttcaagcaattctcatgcctcagcctccatagtagctgggattacagttgtgcaccaccatacatggctaatttttgtgtatgtatatatgtgtgtatatatatgtttgtgtatattacatgtgtgtatatatgtatattacatatgtgtgtatatatgtatatatacatatatatgtatatgtatatatacatatatatgtatatgtatatatacatatatatgtatatgtatgtacacatatatatgtatattatgtatatatacacatgtatgtatattatgtatatatacacacatatatgtgtgtgtgtgtatatatatatatatttttttttagtagagatgaggtttcactatgttggccaggctggtctcgaactcctggcctcaagtgattcgcctgcctcagcctcccaaagtgctgggattacaggtgtgagccagacctaaacagcatgttctcttttgtgtcttccttcttatgtttgacattgatgtgagattcactcctactgtgggtagcgcttctgtccttttcatcactgtataaaataactttgttctatttacccattttattgttgatgggcattagggttgctttctgtttggagctaaaatgattaacatggccatgaatatttgtgtacatgcattttggcacacttgaactgtattgtagcttctgtgccaacttttcccttcccatggccttctgtggccacctcctcgccttcctacatgatttccatagttgcctgtgacctcattctggccaccttcagtgactctcctgggtgcacctctgaactatggactcggctactcccttgtggtttctatctcagccccagctttgcggtcctgtctcactacatcaagtcctcaatgctggtgctccccagatccagggtcctaaaaaccctttgtacatcctcaatgggcattaccatcttcatgctaatcaacaccaaatctgcctcctgactacaccccccagccagtccaccagcacaaaactgagctcatcaaattcctccaagaagtatgcctccaattgttgaaatgttacatccacccaggtacttgaatcattacctaagaatcattctagcctcctcccttccctctagccccctacaatcttaactctcaattatcaaaatctgatgagatctacctccttcagggctcacagaatcattcccttcctttgtctccaaggcccccaccttgcttcagaatctcccagacttttgagacagccacctcctttttcctcaggcctccccactctcctccactgatccaccctaaagcaaatctgatccggttatcacacaccctccactgtccacaggataaggccaaactcttcagcaaactccaatcctttcaagaactgtccctcacagccagtcccatgtgcccattctagaaccgactggatcaactcaggagtagctcccggcaagtacggcgttcctcctcacctcctggctgccgagggccgtttccttagaaagcacttcccaccagccccaagctccccttctccagcaaccttgacctttagttttaatctcctttaggacgtgccccccaccgtactgccttccccagtccccgcccctcctctaggtgcccaccatccctccacaaaccacagctattgtcatggtaataattccattattagaaggagctttatgctcagcggaccagagctccctgagagcagggattgtggtattatttcaagcactgaatttgttctagtaatccttaaataaacatatgttgaatgaatgaatgcagtaacaggaatgttgagccaagttttgtttttgttttttgagacggagtctcgctctgttgcccaggctggagtgcagtggctcggtcttggctcactgcaagctccgcctcccgagttcagccattcttctgcctcagcctcccgagtagctgggactacaggcgcccgccaccacgcccggtaattttttgtatttttagtagagccggggtttcaccatgttagccaggatggtctcgatctcctgaccccgtgatccgcccgcctcggtctcccaaagtgctgggattacaggcgtgagccaccgctcccggcctgttgagccaagtattaaaccacataaaacacaggaggagaggaaagtattcagagatacgacagggagaactatttgaaacagtgggaccacagaccatgtgaactgtgcagagaggcctaaatagcctggggtttctggagggaagggaggttcctgggtggtggagcactggtgcacagaaaaggagatgaatcctgagagagaggttcctcactgtgaagggtctggtgttggggccaaaggtttggggtttccacctgtccagcatggcttttcaaactgtagggttttttttttttgagtggggggcagggggtgtctcactttgttgcccaggctggtctcaaattcgtgggctcaggcaatcctcccacctcgccctcccaaagtgctgggatgataggcgtgagccactaagcccagcagtaggttgcaattaaatcatgcacttatggccctcaaaatccgtctaggagctgccacaggttcggcgctgtaaaagtaaatatgcccacttagaaaatggggataattcctatgtcacagagttgtaaagattaaatgaattaatacagattaacacactgggaacagtgtcaagtgcataagcattatgtaaactttagctattatttgctattattgtgtttgctgttatttctctctaggagctcccagggggctaagaagtggtgggaaagaaagaaatgattctaagagcatccaataagggctagaatggaagtgagcaaaaaatgctgaggcccacagcacaggttgtactgcggggttcaaatcccatgaggccagcagcacccagggtctgtgagccctccagagttgggccctggtggtcgagtccagtcctgggggtcattgcattccctccctcattataaaatggggcctggaggcccggggcggaagaaaggggtccacaatactgcacggttagaggccgagccaaggctggatccggccagacctccacaggtcttccttagcctccacattgcctcagagtgtggggcgcccggctgggggcgaggtagcggaggcccaaagggggccgaagctaactggacggcagctcgcgatgggaactacgcttcccagcatgcgacggggcaaaggggcctttcagccgcgagcagcgcctcgcaggttctgctgggagttttcattgacctctgctccccctctcattttgatccccgctcttctgctctgggctccgcccccttctgagagccgatgacctggcagagtcccgcgagccgctttcttcttcccctctcattggcccagcctagctgccattcggttgagaggaggagaagttgcttactgattggtggattccgtttggcgccaactaggaaaggggggcggggcagcagctggccccactgagccgctattaccgcgaaaggccggcctggctgcgacagcctgggtaagaggtgtaggtcggcttggttttctgctacccggagctgggcaagcgggtgggagaacagcgaagacagcgtgagcctgggccgttgcctcgaggctctcgcccggcttctcttgccgacccgccacgtttgtttggatttaatcttcaggttgccggcgcccgcccgcccgctggcctcgcggtgtgagagggaagcacccgtgcctgtggctggtggctggcgcctggagggtccgcacacccgcccggccgcgccgcttgcccgcggcagccgcgtccctgaaccgcggagtcgtgtttgtgtttgacccgcgggcgccggtggcgcgcggccgaggccggtgtcggcggggcggggcggtcgcggcggaggcagaggaagagggagcgggagctctgcgaggccgggcgccgccatggaactgggcccggagcccccgcaccgccgccgcctgctcttcgcctgcagcccccctcccgcgtcgcagcccgtcgtgaaggcgctatttggcgcttcagccgccgggggactgtcgcctgtcaccaacctgaccgtcactatggaccagctgcagggtctgggcaggtaaggagagaccggcgggcggtgctccgggcccctggcctcggtgtcggcctcggagagatcaggccaggaaacggaccgggagaagggcgagacccgtccgtccgggttcgccgctcggggacagccgggctagggcctgccatgtgcacccccgcccgggcggaatgttgggcgggagaggccgtcgggaccttccaggggaagaggtggagatccttgggcctaagcccgagccaggcccaccttcacccctttcggattgctccgtactctccttctatctctatccctggaagctctttggaatctacccccgcggggaaaatcaggctcttctaggcactcactttcaccctttgctaaaccatcctcaggatcttcgtttgctgtgatctttgttccttctcaacaaaggaccatggcattttctttcctggcgtttatgtaaaatcatctcagtccc

SEQ ID NO: 2247 - DNA, 6000 bp, Homo sapiens
tcaccgatcaacaggatcccaaggcagaagaatttttcttagtacagaacaaaatgaaaagtctcccatgtctacctctttctacacagacacggcaaccatccgatttctcaatcttttccccacctttcccccctttctattctacaaaaccgccattgtcatcatggcccggtctcaatgagctgttgggtacacctcccagacagggtggtggccgggcagaggggctcctcacttcccagtaggcgcggccgggcagaggcgcccctcacctcccggacggggcggctggccggacggggggctgaccccccccacctccctcccggacggggcggctggccgggcagaggggctcctcacttcccagtaggggcggccgggcagaggcgcccctcacttcccggaaggggcggctggccaggcggggggctgactcccccacctccctccctcccggacggggcggctggccgggcggggggctgacccctccacctccctcccggacaggggcggctggccgggcagaggagctcctcacttcccagtaggggcggccgggcagaggcgcccctcacctcccggaccgggcggctggccgggcggggggctgaccccccccacctccctcccggacggggcggctggccgggcagaggggctcctcacttcccagtaggggcggccgggcagaggcgcccctcacctcccggacggggcggctggccgggcggggggctgacccccccacctccctcccggacggggcggctggccgggcggggggctgacccccccacctccctcccggacggggcggctggccgggcggggggctgacccccccacctccctcccggagggagcggctggccgggcagagaggctcctcacttcccagtaggggcggccgggcagaggcgcccctcatctgccggacggggcggctggccgggcggggggctgacccccccacctccctcccggacggggcggctggccgggcggggggctgaaccccccacctccctcccggacgaggtggctgccgggaggagacgctcctcacttcccagacggggtggctgctgggcggaggggctcctcacttctcagacggggcggctgcctggcggaggggctcctcacttctcagacggggcggttgccaggcagagggtctcctcacttctcagacggggcggccgggcagagacgctcctcacatcccggacgggcggcagggcagaggtgctccccacatctcagacgatgggcggccgggcagagacgctcctcacttcccagatgtgatggcggccgggaagaggcgctcctcacttcctagatgggatggcggccgggcagagacgctcctcactttccagactgggcagccaggcagaggggctcctcacatcccagacgatgggcggccaggcggagacgctcctcacttcccagacggggtggcggccgggcagaggctgcaatctcggcactttgggaggccaaggcaggctgctgggaggtggaggttgtagcgagccgagatcatgccactgcactccagcctgggcaccattgagcactgagtgaacgagactccgtctgcaatcccggcacctcgggaggccgaggctggcggatcactcacggttaggagctggagaccagcccggccaacacagcgaatccccgtctccaccaaaaaaatacgaaaaccagtcaggcgtggcggtgcgcacctgcaatcgcaggcactcggcaagctgaggcaggagaatcaggcagggaggttgcagtgagccgagatggcagcagtactgtccagcttcggctcggcatcagagggagaccgtggaaagagagagagagggagaccgtggggagagggagagggagagggctagaaaagacaatcttaaaggactatcccttattgaacatatgtggctttatttaaaacaaagagcaactcactctgatgtctttctttttcttacatcagctaccagacaggcctttggcagcagagctctggagctcaacaggccaatgtctaaaagaagatcagctaccagagataatttggaggatggcacttacctatggatgaaatccatctttttttgccagggacctcttcaagtttaagaattattttgcaggctgggcatggtggctcacgcttgtaatcccagcactttgggaggttgaggcaggaggatcgcttgaactcaggagttcgagaccagccagggcaacatggtgaaactccatctctaccccaaaaatacaaaaaattagttgggcatggtggtgcacacctgtggtctcagctactcaggaggctgaggtgggaggatctcttgacctggataggtcgaggttgcaatgaaccgagatcatgacattgcactccaacctgggtgacagagtaagaccccgtctcaaaaaaaaaaaagattattttgaggtttgtgaatagctatatagcttttatgactggtggtaagcccagctcagcaagcacctcaggaatatccaaaggtgcttgttgaactgctttggggacaaggcaggcaacggctagtggctatgaagtctagtgagttctagattcttggcatctgcatcatccattgtagggtttgcagtgatgtcatcaatgttaacttttaaatttcattaatgcatgtactcttttctgatattttgcatatatgcttccccataaattgtatatatttcctctctaaatacacacacaccacatatattatatttctaccttttcgtctatatatgtattgtgtatatacctatatatagatatatacactgacatccctccacttattcttgaaagatttgttttccagagagagaagaaaatggtataggcacagttttctgtaactgatgtataactttctgtaactaatggtataggcacagttttcaatttgtatgacctgaaaaatcagttctggctgggtgcggtggctcatgcctgtaatcctagcactttgggaggctgaggcaggtggatcacctgaggtcaggagttcgaaaccagcctggtcaacatggtgaaaccccatctctactaaaaatacaaaaattagctgggtgtggtggcgggtgcctgtaatcccagctgtttgggaggctgaggcaggagaatcacttgaacctgggaggcagagtttgcagtgagttgaaactgtgccattgcactccagcctgggcaacaggagcaaaactccatctcaaacaaacaaacaaacaaaaatgtttgcaaagcatctagggcaataatatagcatctagtaaagcgatcaactaatgttcctcattttaatttattttttatttttatttttttttgagatagagtcttgctgtgttgcacaagctggagtgcggtagagcaatctcggctcactgcaacctccgcctcttgggttcaagcgattctcctacctcagcctcccaagtagctgggattataggtgtgcgccaccacacccagctaatttttgtatttttagtagagacggggtttagccatgttggccaggctggtctcgaactcctgagctcagctgatccacctgcctcggcctcccacagtgcttggattacaggcatgagccatcatgcctggcccctcctttttatttatttatttattattattattattattattattattattattattattattattttgagactgagtcttgctctgtcacccaggctggagtgcagtggcacgatctcagctcactgcaacctctgcctccctggttcaagtgattctcctgcctcagcctccctagtagctggaactacaggtgcatgccaccatgcccggctaatttttgtatttttagtagagacgcggtttcaccatattggtcaggctggtcttgagctcctgacctcgtgatccacttgcctcggcctcccaaagtgctgggattacaggcgtgagccactgcgtccagccttttttttttttttttttgaaacagagtctcactctgttgcccaggctggagtgcagtggcgcaatctcggctcactgcaagctccgcctcccgggttcacaccattctcctgcctcagccgcccaagtagctgggactacaggcgcccgccaccatgcccagctaatttttttgtatttttagtagagacgggatttcaccgtgttagccaggatggtctcgatctcctgaccttgtgatccgcccgccttggcctcccaaagtgctgggattacaggagtgagccaccgcgcccagcaccggcctcctttttattttttagcgacagtttctcgcattgtccccaggctggagtgctgtgacgagatcacagctcactgcagcctcgacctcttgggcccaagcgaacctctcacctcagctcctgagtagctgggacaagaggtgcacgccaccatgctcagttaattttattttttgtagagataggatctcactgtgtttcccaggctggtctcgaactcctggcctcaagcgatcctcctgcctcggcctcccaaaatgctggcttgtgagtgagccaccacttcacgcacggtctccttttgaagtagaattagacaatgttttacaccgtgccagtgaaagcaaactgtactctctacggcgctagtagcaaaagcaaagaattattaacatgcctaataggagccctaaaaactaatccaggtctgcaaaagccgatcgacaactctgtagtgatttagaagagaattgcaagacattaacacagagcgtcctaagtgacaggatggtctggcgaccacatttcccggcagccctcgcacagccaggccgcttcgaggattggacttctccgcaggaggcgggtgacagggggaggggataagcgtgaggtactgtgggtaggagacggccgtcggcggaggcgccattttgtgtagccgccgaaccttgttggaggttctggggcgcagaaccgctactgctgcttcggtctctccttggggtaagtgcggcggctgtctgtaacgacggtaggttcttgccatttgggctggcccccaagcctcccttgtcagctgccggaggcgactgatcagctccagccggttctgtagaggggctaaattaccccaggcgttggagggccgcgcccttccttgttgccagctctgtcagtttccagagggtgtccagccagctcagccttgggcctgcttctttctggctgtgactttgccccttgtggatacacgtcccctaatcttcagcccaacggagcagtggagccgtcgcctgtccctcgggcactccttgggagctccctggcagtctctggccgccatcccccgctcaactgcaactgaatcgccctctccgaaaagctgttcggtgatcgcccatctgcgggtttggaacctcttgggaggcgggaggggcatgtgcggggagggcaggccggacgctggagtcggtcgagcaggccgtgacgccgccatctcggccgcgagaccccacggaggtgggtgccggcaccgcccgggagacaaggggcggcaccagtgaatatgccccgggacttgtttccccccagtggttctttttcatttattaatttcaacaaatcgttgagcattcgctctagactaggcttccagagactactggaactgatttttcggacctcgcgctcatcgaacgcggtccagcagtgtgatgtcttattaccaacggggggcggggggccgggctgttcactactcagtggtttgtagtcataagaactggctcaagacgtggtggttattgttacctaggaattaggtcgtttctagctttgctcttgtcttatgcgatacgttattaatgtagtagatttcagtcagctcagtatcccagcttctacgaggttttacatttttcatcagaagtgtttgaatttcat

SEQ ID NO: 2248 - DNA, 6000 bp, Homo sapiens
gtcccagttactcaggaggctgaggcaggagaatggcatgaatctgagaggcggagcttgcagtgagccgagatcgtgccattgcactccagcctgggcgacagagcaagactgtctcaaaaaaaaaaaaaaagaaactgctacaagtattgatttgagtgttagaaattttaatgagtggttgaattcacaggtgtgatacctgaggataatgaggattggctgtgtgtagtcttgcagccgttgcacctagttatggaaagtagaggccagtgagaatcttgtttccacaaatttcaccctgttttttttttcatggtagtattcatgcctgatattattgatgaagagactagtatatttttgtggccttttggaaaaaggagttggtctgacattggaacaagcctaccagccagaatactttattctagccccaattaatgtttgatttattaggagcctaagaatgtgatgaactttgaaaatttttaccaataatttaactgtaagaaaagtatgatccattaaaaatgtttacctggcctggtgcggtggctcacgcctgtaatcccagcactttgggaggccaaggtgggtggattacctgagcccaagagatggagaccagcctgggcaacatggtgaaacccctctctactaaaatataaaatattagctgggtgtggcgacatgcgcctgtagtcccagctactcttgaggctgaggcagaattgcttgaacccaggaggcggaggttgcagtgagccgagatcatgccattgctctccagcctgggcaacagagtgagactccatctcaaaaaaatttaaaaaaaagtttatcatcaggctcttcattttttggctgttgatttttttccttattttgagagtaggcctcaaagagcaggaaggctattcttgattaggcgtacttcagggcacagtgacgcatccactgcctcttttaaatctcatctgagtccttatttttatttttttatttttttaaagatagggttgcactttgtcacccaggctggagtgcagtggtgcaatagcccattgtaacctcgaactcctgggcttaaacagtcctcccacctcagcctcccaggtaactaggactacaggtgtataccatcatgcttgggtaatttttattttattttattatttttttttgagacggagtctcactcttgcccaggctggagtgcagtggcgcgatctcggctcactgcaacctccgcctcccggggtcaagcgattctcttgcctcagcctcccaagtagctaggactacaggcacgtgccaccacgtctggctgattttttgtatttttagtagagacgggatttcactgtgttagccaggatggtctccatctcttgacctcgtgatccacctgccttggccccccaaagtgctggaattacaggcgtgagccactatgcgaggcctaatttttaaaatttttgtatacagatggggtcttactgtgttccccaggctggtctcacactcctgtgctcaagcgctcatcttgcctcatcttcccaaagcgctaggattataggcttgagccactgtactatcctgcagaacaaaggacagggagattagactaaaggatggaggcttgagacatcataccacaagcaaggatgtgtatcataacagaaattaattgcggccaggcattgtggctcactcctgtaatcctagcactttgggaggccaaggtggccggatcgcttgagcccaggagttccagaccagcctgggcaacgtggcaaaactctgtctctacaaaaaatacaaaaattaaccaggtgtggtggtgtgcatttgtagtcccagctacttaggaggctgaggtgggaggatcacttgagtccaggaaggcagaggttgcagtgagctgagatcacaccagtgcacttcagcctgggtgtcagagctaggccctgtctcaaaaaaaaaaaaggaaaaattaattacacctgagggaaattcccatgcaacatttaatgaatgccttcagtgctgttataatgcattaatttctatgagaaatgttctctcttttttgtgccttttaggaaaattgcattttggtgatagaagataaaaacttggctaattaggccaggcatggtgggtcatgcatgtaatgatatgggaggctggcatatcacttgaggccaggagttcgagactagcctgtccaacacagtgaaaccccgtctctactaaaaatacaaaaattagctggatgtggtggtggatgcctgtaatcccagctacctgggaggctgaggcagaagaatcgcttgaatccaggaggtggaggttgaagtgagccgagatcacgtcactgtactccagcctgggtgacagagcgagactccgtctcaaaaaaaaaaaaaaatcagtcacgcatggtggtgcacacctataatcccagctactcgggaggctgaggcaggagaattgcttgaacccaggaggtggtggttgcagtgagctgagatcatgccactgcactccagcctgggcaatcaagtgagtgagagacagagactcccatcttaaaaaaaaaaaaaacttggctaattaaacagttgatgtaattcctattccatggggaatagtgtgtggcaaaagctttaactgtaaataatgtaaaaccctgtgcagattcgagaaatgatggagtccttcgaaggccctcagcctgcggatgtgaggctgatgaagaggaaaacaggtgagagcttgcttagttcctgatattattgttctcttccccattcccacctcagtccctaaagaacatcctgattcccccagtcttcaagcacatgaattcagaatgaaaggtttgccatggctaaggaatgtgactctttgaaaaccatgttagcatctgaggaacttttttaaactttgttttagggacttttttttccttaggtaagtaatgatttataaactcctttttttttttgactatagtcggttgcatggttactttaagcgtggaatcaaatggagtggcatttagttcaggcggcttgttccttgccatggcaaagtatcaagaagatccccaagtcaagtcacatttgtaaagctgcttcccaattggctttgtcacgcagtgttgaagcagtgggagagagattcacctgttataaaggaactgactaacacaagtatcccgtctatatctgaatgctgtctctaggtgtaagccgtggtttcgccttcgtggagttttatcacttgcaagatgctaccagctggatggaagccaatcaggttgcttcactcaccaagtctagatattcatgaaaatggaacaagtctgtacaattttaaaaaaaggttgaaggagtggtttgttccaaaggagtgacttttttttaaaaaaaaagctttgtatatattaaaattgatgttactagaataagtacagtaccaaggacttcattatagaatttgttctgcctttaaacatggctacctacctggcagggctttgttaactactgaatacctgtctggtaatcactaaaacatcttaatgtttcccttttttctagtttgttatattcctattatgtccattgagagtaagcttagtatatcaaactctccatttgacagtgaagagaacatagtgaaagtctgtggcggcatttttataagtaattccttatttctgcctgaagaccacaaagcctcctggaggcgtaactgctcagaccggtcttcagggaatatttaaggacttagtggaatttatgaacaataagtctgatgagattagcctgggagtggtgtcctgcagctgtctaatctagttagagtggcattaacattctaatctccttgagaatgccttttatagtctgttcaaagcaagtcattgatggttcttcgaggtagtgttaactgaagtgttcttcagtttgtcaagataatgttcagtgcttggcacttaaataacattttttgcaagaactccaaggcacattattgaatgcctttaaccaagtgcattctgggaagtttgcttgactcattatcttgcttttctgcagcattctgtgatttgagtcatccatgaatccatgaataaaagttacattctttgattggtaatattgccatttataacaagactcactaatgagggtatcactttgactgactgatttgttaaagtttttaagcctctcattttcctaacccagaaatcacagcctgattttattaaaagtagagcttcattcatttcataccatagataccatcctagtaaatccagaacatatacaaggttcatgtgagtctgctttcttgacatgatagcattgtttgatgcagtggatatgtcagaatgactaacctaggagtttaaaactcctaagaaactaaaacctgtaagacatttaaaagtctccacaattttaatgtatacaaagctatgttactgtgtaacacattacagttcaaattcactccagaaataaaaggccagtaggattagggactcactggtagtttggagtctcccagcacacatccctcctagtgggatgatctattcacatatctcccagcttttttatttttgcttctgtatatcacagtgagtggatggcccttcagctttttctctcctggccagacatgcagtcttgcctttagatatcgcagagacaaaattcacagcatgtcttaaatcttccaggatttgcaagaaccaaattgctcaacagtatgtatgtttagaggggttagactcctttttaaaatctggatatctaaccacctacttaaatctgtttgatagtgtcaaaccacccccacccttgatcctcccacccccaagaaaaagaaaagatgctcctgttaaatgaaggctctttaggggtaggtgctaggtatactcttggctagattgattcagctcagaattttgactttttaaagctaagtccttgtagtcacatggttgacttgaaggatgaggtggtgtgtgcatttatgagcttttcctacccccctgaagaaacttcattggcctcctggttactcaccttgaagagagtaccatccattttagtgaaaaacacatctgtcacctaggacatgacatggttgcagttgacaggaaaaaaaaaatctcatttagttgttttagagttggtggcattcagaatagtccctcttgagaaagaattgtaaccagattccctttaaaaatgagttcccctccctttccccccaaaggactcatcctgaagcagaaggtgtggggggaaggagaaatgtaaaggcttttactttgcataaggatgggggactggggaaaaaggtgaagcgaagcccaaggacaccatgctaagggcaaaagtaagagacagtctcagaactgagagaattgtgtcttctgctttttgaagtagactgtcacactcaggcagcctgtcaatgctgaatgttaggacttctgtctccgctggagacacggcctggtgcaagtcagcgtttagtgtttgacagctttctcagcactccctgactccgtttacctttactccgcatcccattctcttactgcctatctgaaggattggatgggcagagtataggtggcggtggttggtcctccccgtatgttgtccatttaattccagagcactgatttttccgaagtgtgctctgccctgggaaaatggacacatgttcctcacaatgggaataactaattacttcttttcttacagaaaaagttggtgattcaaggaaagcacattgcaatgcattatagcaatcccagacctaagtttgaagattggctttgtaacaaggtaagcatatgttcttcccaaatagacaaaactcctttaggatattgctgtttttttctgtttgtttatttgactgtccaaacaaggaaattgttactcaatcatcagt

SEQ ID NO: 2249 - DNA, 6000 bp, Homo sapiens
ttggctgttgatttttttccttattttgagagtaggcctcaaagagcaggaaggctattcttgattaggcgtacttcagggcacagtgacgcatccactgcctcttttaaatctcatctgagtccttatttttatttttttatttttttaaagatagggttgcactttgtcacccaggctggagtgcagtggtgcaatagcccattgtaacctcgaactcctgggcttaaacagtcctcccacctcagcctcccaggtaactaggactacaggtgtataccatcatgcttgggtaatttttattttattttattatttttttttgagacggagtctcactcttgcccaggctggagtgcagtggcgcgatctcggctcactgcaacctccgcctcccggggtcaagcgattctcttgcctcagcctcccaagtagctaggactacaggcacgtgccaccacgtctggctgattttttgtatttttagtagagacgggatttcactgtgttagccaggatggtctccatctcttgacctcgtgatccacctgccttggccccccaaagtgctggaattacaggcgtgagccactatgcgaggcctaatttttaaaatttttgtatacagatggggtcttactgtgttccccaggctggtctcacactcctgtgctcaagcgctcatcttgcctcatcttcccaaagcgctaggattataggcttgagccactgtactatcctgcagaacaaaggacagggagattagactaaaggatggaggcttgagacatcataccacaagcaaggatgtgtatcataacagaaattaattgcggccaggcattgtggctcactcctgtaatcctagcactttgggaggccaaggtggccggatcgcttgagcccaggagttccagaccagcctgggcaacgtggcaaaactctgtctctacaaaaaatacaaaaattaaccaggtgtggtggtgtgcatttgtagtcccagctacttaggaggctgaggtgggaggatcacttgagtccaggaaggcagaggttgcagtgagctgagatcacaccagtgcacttcagcctgggtgtcagagctaggccctgtctcaaaaaaaaaaaaggaaaaattaattacacctgagggaaattcccatgcaacatttaatgaatgccttcagtgctgttataatgcattaatttctatgagaaatgttctctcttttttgtgccttttaggaaaattgcattttggtgatagaagataaaaacttggctaattaggccaggcatggtgggtcatgcatgtaatgatatgggaggctggcatatcacttgaggccaggagttcgagactagcctgtccaacacagtgaaaccccgtctctactaaaaatacaaaaattagctggatgtggtggtggatgcctgtaatcccagctacctgggaggctgaggcagaagaatcgcttgaatccaggaggtggaggttgaagtgagccgagatcacgtcactgtactccagcctgggtgacagagcgagactccgtctcaaaaaaaaaaaaaaatcagtcacgcatggtggtgcacacctataatcccagctactcgggaggctgaggcaggagaattgcttgaacccaggaggtggtggttgcagtgagctgagatcatgccactgcactccagcctgggcaatcaagtgagtgagagacagagactcccatcttaaaaaaaaaaaaaacttggctaattaaacagttgatgtaattcctattccatggggaatagtgtgtggcaaaagctttaactgtaaataatgtaaaaccctgtgcagattcgagaaatgatggagtccttcgaaggccctcagcctgcggatgtgaggctgatgaagaggaaaacaggtgagagcttgcttagttcctgatattattgttctcttccccattcccacctcagtccctaaagaacatcctgattcccccagtcttcaagcacatgaattcagaatgaaaggtttgccatggctaaggaatgtgactctttgaaaaccatgttagcatctgaggaacttttttaaactttgttttagggacttttttttccttaggtaagtaatgatttataaactcctttttttttttgactatagtcggttgcatggttactttaagcgtggaatcaaatggagtggcatttagttcaggcggcttgttccttgccatggcaaagtatcaagaagatccccaagtcaagtcacatttgtaaagctgcttcccaattggctttgtcacgcagtgttgaagcagtgggagagagattcacctgttataaaggaactgactaacacaagtatcccgtctatatctgaatgctgtctctaggtgtaagccgtggtttcgccttcgtggagttttatcacttgcaagatgctaccagctggatggaagccaatcaggttgcttcactcaccaagtctagatattcatgaaaatggaacaagtctgtacaattttaaaaaaaggttgaaggagtggtttgttccaaaggagtgacttttttttaaaaaaaaagctttgtatatattaaaattgatgttactagaataagtacagtaccaaggacttcattatagaatttgttctgcctttaaacatggctacctacctggcagggctttgttaactactgaatacctgtctggtaatcactaaaacatcttaatgtttcccttttttctagtttgttatattcctattatgtccattgagagtaagcttagtatatcaaactctccatttgacagtgaagagaacatagtgaaagtctgtggcggcatttttataagtaattccttatttctgcctgaagaccacaaagcctcctggaggcgtaactgctcagaccggtcttcagggaatatttaaggacttagtggaatttatgaacaataagtctgatgagattagcctgggagtggtgtcctgcagctgtctaatctagttagagtggcattaacattctaatctccttgagaatgccttttatagtctgttcaaagcaagtcattgatggttcttcgaggtagtgttaactgaagtgttcttcagtttgtcaagataatgttcagtgcttggcacttaaataacattttttgcaagaactccaaggcacattattgaatgcctttaaccaagtgcattctgggaagtttgcttgactcattatcttgcttttctgcagcattctgtgatttgagtcatccatgaatccatgaataaaagttacattctttgattggtaatattgccatttataacaagactcactaatgagggtatcactttgactgactgatttgttaaagtttttaagcctctcattttcctaacccagaaatcacagcctgattttattaaaagtagagcttcattcatttcataccatagataccatcctagtaaatccagaacatatacaaggttcatgtgagtctgctttcttgacatgatagcattgtttgatgcagtggatatgtcagaatgactaacctaggagtttaaaactcctaagaaactaaaacctgtaagacatttaaaagtctccacaattttaatgtatacaaagctatgttactgtgtaacacattacagttcaaattcactccagaaataaaaggccagtaggattagggactcactggtagtttggagtctcccagcacacatccctcctagtgggatgatctattcacatatctcccagcttttttatttttgcttctgtatatcacagtgagtggatggcccttcagctttttctctcctggccagacatgcagtcttgcctttagatatcgcagagacaaaattcacagcatgtcttaaatcttccaggatttgcaagaaccaaattgctcaacagtatgtatgtttagaggggttagactcctttttaaaatctggatatctaaccacctacttaaatctgtttgatagtgtcaaaccacccccacccttgatcctcccacccccaagaaaaagaaaagatgctcctgttaaatgaaggctctttaggggtaggtgctaggtatactcttggctagattgattcagctcagaattttgactttttaaagctaagtccttgtagtcacatggttgacttgaaggatgaggtggtgtgtgcatttatgagcttttcctacccccctgaagaaacttcattggcctcctggttactcaccttgaagagagtaccatccattttagtgaaaaacacatctgtcacctaggacatgacatggttgcagttgacaggaaaaaaaaaatctcatttagttgttttagagttggtggcattcagaatagtccctcttgagaaagaattgtaaccagattccctttaaaaatgagttcccctccctttccccccaaaggactcatcctgaagcagaaggtgtggggggaaggagaaatgtaaaggcttttactttgcataaggatgggggactggggaaaaaggtgaagcgaagcccaaggacaccatgctaagggcaaaagtaagagacagtctcagaactgagagaattgtgtcttctgctttttgaagtagactgtcacactcaggcagcctgtcaatgctgaatgttaggacttctgtctccgctggagacacggcctggtgcaagtcagcgtttagtgtttgacagctttctcagcactccctgactccgtttacctttactccgcatcccattctcttactgcctatctgaaggattggatgggcagagtataggtggcggtggttggtcctccccgtatgttgtccatttaattccagagcactgatttttccgaagtgtgctctgccctgggaaaatggacacatgttcctcacaatgggaataactaattacttcttttcttacagaaaaagttggtgattcaaggaaagcacattgcaatgcattatagcaatcccagacctaagtttgaagattggctttgtaacaaggtaagcatatgttcttcccaaatagacaaaactcctttaggatattgctgtttttttctgtttgtttatttgactgtccaaacaaggaaattgttactcaatcatcagtaatattcatggtttgttactttccttgggtcctcctacactggtattagatgatagaactagaggtttcgtttattaagatgcacgttctgctgggcatggtggctcacgcctgtaatcccagcactttgggaggccaaggcgggtagatagcttgaggccaggggttagagaccagcctggccaacatggcaaaaccccgtctctactaaaaatacaaaaattagctgggcatcacggtgcgcgcctgtaatcccagctactcggaggttgaggcaggaaaatctcttgaacacgggaggcagaggttgcaatgagccaagatcgcgccactgcactctagcctgggtgacagagtgagactctgtctcaaaaaacaaaaaaggacaacaaaaaggatgcaggttctaagcccagtgattaagattttaggtgtgtttcatgttactgtttattgaattctagagctctcagtttttggcgtagtctcttaactgtattaaccaaaatagttgagaaccctgctaaagttatataaggtttaccattttgaacttgaatgttgacattgatattttgagagtgctcaaactgtgtcccctgtccagtaggggactagacagtggttagtttaccttgtgtttgtgtatgtaggatgggatgtatagtgctctgttgatacaaggaagagcttcaccagtggcttgctgtagagttttcaaattaactgaaccctttcctcggcttgataataatgggattcttcttcaacatacaacaaactttgtttttcttgggagattttaacagtgttacattctgaattttttaggttatgtccccatgtctcagctacgtgagact

SEQ ID NO: 2250 - DNA, 6000 bp, Homo sapiens
tcactggtagtttggagtctcccagcacacatccctcctagtgggatgatctattcacatatctcccagcttttttatttttgcttctgtatatcacagtgagtggatggcccttcagctttttctctcctggccagacatgcagtcttgcctttagatatcgcagagacaaaattcacagcatgtcttaaatcttccaggatttgcaagaaccaaattgctcaacagtatgtatgtttagaggggttagactcctttttaaaatctggatatctaaccacctacttaaatctgtttgatagtgtcaaaccacccccacccttgatcctcccacccccaagaaaaagaaaagatgctcctgttaaatgaaggctctttaggggtaggtgctaggtatactcttggctagattgattcagctcagaattttgactttttaaagctaagtccttgtagtcacatggttgacttgaaggatgaggtggtgtgtgcatttatgagcttttcctacccccctgaagaaacttcattggcctcctggttactcaccttgaagagagtaccatccattttagtgaaaaacacatctgtcacctaggacatgacatggttgcagttgacaggaaaaaaaaaatctcatttagttgttttagagttggtggcattcagaatagtccctcttgagaaagaattgtaaccagattccctttaaaaatgagttcccctccctttccccccaaaggactcatcctgaagcagaaggtgtggggggaaggagaaatgtaaaggcttttactttgcataaggatgggggactggggaaaaaggtgaagcgaagcccaaggacaccatgctaagggcaaaagtaagagacagtctcagaactgagagaattgtgtcttctgctttttgaagtagactgtcacactcaggcagcctgtcaatgctgaatgttaggacttctgtctccgctggagacacggcctggtgcaagtcagcgtttagtgtttgacagctttctcagcactccctgactccgtttacctttactccgcatcccattctcttactgcctatctgaaggattggatgggcagagtataggtggcggtggttggtcctccccgtatgttgtccatttaattccagagcactgatttttccgaagtgtgctctgccctgggaaaatggacacatgttcctcacaatgggaataactaattacttcttttcttacagaaaaagttggtgattcaaggaaagcacattgcaatgcattatagcaatcccagacctaagtttgaagattggctttgtaacaaggtaagcatatgttcttcccaaatagacaaaactcctttaggatattgctgtttttttctgtttgtttatttgactgtccaaacaaggaaattgttactcaatcatcagtaatattcatggtttgttactttccttgggtcctcctacactggtattagatgatagaactagaggtttcgtttattaagatgcacgttctgctgggcatggtggctcacgcctgtaatcccagcactttgggaggccaaggcgggtagatagcttgaggccaggggttagagaccagcctggccaacatggcaaaaccccgtctctactaaaaatacaaaaattagctgggcatcacggtgcgcgcctgtaatcccagctactcggaggttgaggcaggaaaatctcttgaacacgggaggcagaggttgcaatgagccaagatcgcgccactgcactctagcctgggtgacagagtgagactctgtctcaaaaaacaaaaaaggacaacaaaaaggatgcaggttctaagcccagtgattaagattttaggtgtgtttcatgttactgtttattgaattctagagctctcagtttttggcgtagtctcttaactgtattaaccaaaatagttgagaaccctgctaaagttatataaggtttaccattttgaacttgaatgttgacattgatattttgagagtgctcaaactgtgtcccctgtccagtaggggactagacagtggttagtttaccttgtgtttgtgtatgtaggatgggatgtatagtgctctgttgatacaaggaagagcttcaccagtggcttgctgtagagttttcaaattaactgaaccctttcctcggcttgataataatgggattcttcttcaacatacaacaaactttgtttttcttgggagattttaacagtgttacattctgaattttttaggttatgtccccatgtctcagctacgtgagactttctgcttttctgttagttactgggacctacccgtggccccactgttattgttactagaaagcctggcctaatgtgagaaataattacagataaaactttttttttcagtgctgccttaacaatttcaggaaaagactaaaatgcttccgatgtggagcagacaagtttggtaagactggattcagctgtttgcaatatgcattaaaacctactaactggggcagggagcagtggctcactgtaatcccaccactttgcaaggccaaggtgggaagatcacttgaggacaggagttcaataccagcctggcaagagatagcaagaccctgcctgtacaaaaaaagaaattttaaattatctgggtgtggtggcacacacctgtagtcctagctactcaggaggtttaggtgagaggattgcttgagtccaggagttgaaggctgcagtgagctatggtcataccactgcactccagcctgggcaacaaacaagaccctgcctctcaaaaaaaacaaaacaaaaatctgacaaatagggttgttaactgtgagcctgaggaaaagtatagattttagtgtacttaaacaacttgtctgttttctttaaatcttttcccttaggttagataatgctgctcatgattgtgagagcacagaaagttcttttgttttctagaattaagtctgctcacctggtttgcattctgcatctgcctttctttagtgcagggtagtgtcagtcccactgtggcccaaagtttgcattctgcgttaaccaagtcacaattaatgaggttttactataggcacaaatgcttaaaaaagaaaaaaacgattgttttgtgtggttaaaataaaaacttgtggggattttaatgtatttctttggtgaaaatacattagttgtttgtctctaattggatcactttcccttctagactctgaacaggaagtgcctcctggaaccacagagtcggttcagtctgtggattactactgtgatagtaagttcatacacgatcttttggtcttcatgttaaaaattgacctcagttgtcaggagatggagaccatcctggctaacacggtgaaaccctgtctctactaaaaatacaaaaaattagctgggtgtggtggcacacacctgtaatcccagctactccgtctcaaaaaaaaaaaaaaattgacctcagttggaaatttctgttctcctacccttttgtaaggagcagcagcagcttcgggttgtcccttaaaagacaggatttttagaatcttctccatgtcagggtagaaaatacactaggaatgtcacaaatggatttgtatgtacttgaccctatcttggaaaactttggtacattggtggtgggaatgcatgtgtatgtcatttgtctcatttacccctagcgatcattcttcggaacatagctccgcacactgtggtggattccatcatgacagcactgtctccttacgcgtctttagctgtcaataacatccgcctcataaaagacaaacagacccagcagaacagaggcttcgcatttgtgcagctgtcctctgcaatggtgaggttctcatcgattctttcctttttaaaagaaacagctttaagaggcaaatgtggttcatccagttttgaaactgtctgaggctcctaaagcccaagatgcaaggctccctaatgacagtttttgcactgctaaattacaggactgatgacttcagtaagtagtaaaaataatgtgtatacctataggcaactggcagaattttttgagccacagtttagtccttggtactttgttttttgttgttgttgttcttttttgggatggagtctcactgtcgcccaggctggagtgcggtggcaccatctcggatcactgcaacctctgcctccagggttcaagcgattctcctgcctcagcctcctgagtagctgggattacaggtgcccgccaccacgcccagctattttttttttttttttttttttttttttttttttgagagggagtctcgttctgtcgcccaggctggatggagtgcagtggtgtgatctcggctcactgcaagctccatctccccagggttcacgccattctcccgcctcagcctcctgagtatctgggattacaggcgctcaccaccatgctcagctaattttttgtatttttagtagagatggggtttcactgtgttagccaggatggtcttgatcaccacctctgcctcccaaagtgctgggattacaggcgtgagccaccgcgcccagccacgcccagctaatttttgtatttttagtagagacaggtttttgccatgttggccaggctggtctcgaactcttgacttcaagtgatccgctcatctcagcctcccaagtgctagatgtactttgttttagattggtttagcatttgctcttttggtaatactggaaaccttcacatcttagaggaaagagagatattcctttcttgaggtttcatatctgcaaacacaataaggaattaattgccttttattttttaatagaaaactacttctttgaatggggtggatggtagggagagatttttaattgcattacacgtttttttccttcacattctccttcaggatgcttctcagctgcttcagatattacagagtctccatcctcctttgaaaattgatggcaaaactattggggttgattttgcaaaaagtgccagaaagtgagtggcttcattgtccttatttcaaactactgcatatgcacatttgtacagtgtgctaactgaacgccaagcctgtgccccaagtatgttgagacactgtgatcctccctgattgccaaggccaggagggacacgtttgtcttcttttagtgattattccctactgtcctgtgtaaccagttgatgaagttgcctgaaatggtttcagatcaggagaaaggcaagtatggcagatgggttgagaacacatgctttgcaaactgcagcagtatagtgctaacccatccagaaataacccattccttccagaacagcgtgctaataatttcatgtatatagtgcttaactctaacacggtaaatttccctttttttagtatcattgcacattcaaaaaactcttcgttagatggcaggttacaaggtagaacaatgatactacagggccacttgcttactgaggaatttccccatgaagagccctccccctgtgaaatgtggccttgctggcatttgagaactgacaaagggtggagtgaatcagttggtggtataggggcactaattgtgggaatactgtgatagaatcacatgattggatctttgtggtttcagagacttggtcctctcagatggtaaccgcgtcagcgctttctctgtagctagtacggctattgctgctgctcagtggtcatccacccaggtaagatcgaggatctttttgctcaaggtagtgtggtggtggtgcccagattcacagacgtgacctctcctgtggtactcgcagtatgagctcttttcttttctttttttttttttttttttttttttttttttgagacagagtatcactctcgtcacccgggctggagtgcaatggtgcaatcttggctcactgcaagctccaccttccaggttcaagtggttcttctgtctcagcctcttgagtagctgggattacaggtacctgccaccac

SEQ ID NO: 2251 - DNA, 6000 bp, Homo sapiens
ccgcgtcagcgctttctctgtagctagtacggctattgctgctgctcagtggtcatccacccaggtaagatcgaggatctttttgctcaaggtagtgtggtggtggtgcccagattcacagacgtgacctctcctgtggtactcgcagtatgagctcttttcttttctttttttttttttttttttttttttttttttgagacagagtatcactctcgtcacccgggctggagtgcaatggtgcaatcttggctcactgcaagctccaccttccaggttcaagtggttcttctgtctcagcctcttgagtagctgggattacaggtacctgccaccacgcctggctaatttttgtattttagtagagatgggatttcaccacgttggccaggctggtcttgaactcctgacctcaggtgatccacccacgtcagcctcccaaagtgctgggattacagccgtgagccacagcgcccagcatcatgagctcatttttagggacttctgaatttttttccttaatgcctactaagtttgtctttgtctcattttgatgttttgtagtctcaaagtggtgaaggaggcagtgttgactacagttatctgcaaccaggtcaagatggctatgcccaatatgctcaggtaggtagattttagcagcatccaccttatagtcttgcagagtgtgtctgagaatagcagctttaatggtggacttttcttcagtattcacaggattatcagcagttttatcaacaacaagctggaggattggaatctgatgcatcatctgcatcaggtagtaaacttcatctcccttttaccttttgtttaagcacttacagttgaagaaatatgattaaatgtcctaactggaccaaaagctacaagtccatttctctgtaagattgtagggggcatggccgggcacggtggctcacgcctgtaatcccagcactttgggaggccaaggcaggtggatcacgaggtcaggagttcaagaccagcctggccaacatggtgaaaccccatctcagctaaaactacagaaattagccaggtgcggtggcaggcgcctgtaatcccagctactcaggaggctgaggcaggagaattgcttgaacccgagcggcagagattgcagtgagctgagattgcgccactgcactccagcctgggcgacagagtgagattctgtctcagaaagaaaaaaaaaagaatgtagggggcatattcagggctgtcatcatgtacccaaggttctggggaagaatacggttatttgtgtacaccaggagttaatacaaggtcttagagaccatgttgtgatgagtttaattcttggaattcaactctgtatttcccctctctgtgtttggagtcgtgagtgcccacgtaagttcaggtgagcagagaggatgtggccctggagactggtgctcagacatcaatcagaagagctactctaagaagccttggctttaatttttgtttcaggctttaaaaagccttgtgagttaaatctttctcaaccccagagcaaatatagatcctttcttctcttccttttctcttcttttttttttgagacggagtctcgctctgttgcccaggctggagtgcggtggcgttatctcggttcactgtgagctctgcctcccaggttcacgccattctcctgccttagcctcacaagtagctggaactacaggtgcctgccaccactcccggctaattttttgtatttttagtagagacggggtttcaccgtgttagccaggatggtctcaatctcctgacctcgtgatcggctcgccttttccttccaaagtgctgggattacaggcctgagccactgcacccggcctcttctctttttcttagccatgatacagaatccttaactttgtatatcacatctagtagaattataagaaaatgaaaatgtcacagattccagggtacttagtggaagttagcttatgaagaactgacatatacaatgacagaagaaggctagattgggcattacaaataaagatgtttgggttggcgttcagtgccttggctttccctaacacttgtgtttatcatcaggcacagcagtgaccaccacctcagcggctgtagtgtcccagagtcctcagctgtataatcaaacctccaatccacctggctctccggtaatcctgttgtcctatatacaaaactcgtggctgatggggaaattttgttttgctatacaagtattaccctttcctgttgtatgagccaggattgagtaatacacacttcaaccttatttctttctgttgttttaaaatattaattttatgatatatatgtgcatgtatattttaaatataaaatttcaactgtgtatttacactttatgcatgcttgacctttagaaagttgtcgccggggccgggtgtggtggctcgcgcctgtaatcccagcactttgggaggccgaggcgggtggatcacgaggttaggagatcaagaccatcctggctaacacggtgaaaccccgtctctactaaaaatacaaaaattagccgggcgtggtggcacatgcctgtaatcccagctactcgggaggctgaggcaggagaattgcttgaaccccggagacggaggttgcagtgagccaagattgcgccactgcagtccagtttgggcaacagagcaagactcctcttgaaaaagaaagcaaaaaagttgtcaacatgtgttttgctgagggattgccttagattattgctacagtgtgtctgtcaggggagcccttcctcctggatgattgcagtgatttagctctcttaaaaggctttacagttgaaattatattgaagctgctgttctttccagactgaggaagcacagcctagcactagcacaagtacacaggccccagccgcttcccctactggtgtagttcctggtaccaaatatggtaagccaaacctcatggggctgttgacagttggaaggtcttagttgttgtctttgtttaatgagagttcttctccctttgcgggtgtcagagggacacttggggatgtgagacagagaagaaacattaggcctgctgcatctcactggcttagaatttgaaataaagccaatttcttacctggaatgactgtatgctggattttgtttttgcagcagtacctgacacgtccacttaccagtatgatgaatcttcaggatattactatgatccgacaacagggctctattatgaccccaactcgcaagtaaatgtgctgctttcctcctcaatttcactagaagtagtttcgcttagtgcatttatgaggcataaaatgaaatatttcctgcaaaagaatatatgactcagattagttttaacttcttcaaagccaccaaaatgtaatttttatatggagattgtaagttttaattgtagggttaaaaaatgttttgaggtataatatacacacaaaaaaatacacaaaacagaaatgtgcaattctttgaatgtttatacatgtctatacatttgtatattacatgtgtatatacaccaccacttattcccagcccacctaatcctcatgcccattgctggtcagtaacctatgtcttcaataaccactattttgatttctgttgccatagattattttgtcaagttacaatttatggaaagacctagctagaaattttaaattgtacttttctccctattgtttaaccttttagagtgtacaaatcagtggcttttaatatattcacagtgttgtgtaactgtcaccactgtctaatctcagaacattttcatcactcgaagaagaaaccctgtacctgttaaacagtcactccccattctgtactctcctccagtaactactaatctactctctgtctctatggatttgctttttttattttttttgtggcacgatcttggctcactgcagcctccacctcctgggttcaagcaatgctcctgcctcagcctgctgagtagctggtagctgggattacaggcgcccaccacacccagctaatttttgtagtcgagacagggtttcaccttgtttgccaggctggtctcgaactcctgaccttaagtgatccacccgcctcagcctccaaagtgccaggattacaggcatgagccactgtgcccagccctctgttcttgacatttcatataagtggagtcagacaatagattaccttttgtgtccagcatcctttactttgcctccctgtgtattcttgagggtagaatttagcagatgtatggagtgatgttttatttttggtggcatatataacttttaaaagggaaaaacaactttaacaccccataaataactctatttatgaccgggagctgtatatatagaacagtaataagtatttttaacaggaacttggcattgataggttgtggtttctgagagattgaagtgtgaagctgtgtgtgacgtgcctaagcaggccaagcctctgcatacctcttccatccacttctctcatttgtgaagcctggccatttatttccctgtcagttctttttttttttttttttttttcccgtcagttctctttggtggccttagaagttgtgtctgtaggctgggcgcagtggctcacgcctgtaatcccagcactttgggaggccaagatgggaggatcactaggtcaggagattgagaccatcctggctaacacagtgaaaccccgtctctactaaaaaaaaaaaaaaaatacaaaaaaattagccaagcgtggtgtcgaatgcctgtagtcccagctactcgggaggctgaggcaggagaatggcgtgaacccgggaggtggagctggcagtaagcgaatgtcgcgccactgcactccagcctgggtgacggagcgagactctgtctaaaaaaaaaaaaaaaaaaaaaaaaaaaaaagttgtgtctgttagccacgccaccttacccagaagagacagacactgtctcctgggtccctgttgagcagatagagtgagcgactggaaaatagaggagaggatatgtgacacctctcctctgttgcaattcctgctgagcttgggtcccttcaccaacacctccttccagctctgtgctagtgtttacaccctgtgtgtggttgcctggtatccaatggattctatgtggatgggcccaatgatgagctgttgtcatggcagatgtctgaactccatgacacgcccacctgttctggctgcctggtttatgtaaatagtctgtggaacagagtgagacaaattgctctttgggtgccctctaggtaggcccagggattaaattaatgggaactagactttttaaatttttattatcattttttttgagatggagtcttactctgttgcccagactggagtgcagtggcatgatcttggctcactgccacctcctccatctcccaggttcaagcagttctcttgcctcagcctcctgagtagctgggattacaggtgtgccatcatgcccagctaatttttgtatttttagtagagatgagttatcaccatgttggccaggctggtcttgaactcctgaccttgggtgatctgcccaccaccacctcccaaagtgctaggattacgggcatgagccactgctcccggctgggaactaaactttttaaagaaatcatattctatttttactctagcagtgtcacacctctttgctaggtggttcatcacctttacttataccaaggtgtgcccagggtcttttctgggcaggaaatatcactagtccacaacatactttatcttttttttgacaaaatatgtaatcgactgacatagcagaaagtctgcattaattgttttttgtttgttgttttctagtactactataattccttgacccagcagtacctttactgggatggggaaaaagagacctacgtgccagctgcagagtctagctcccaccagcagtcgggcctgcctcctgcaaaagaggggaaa

SEQ ID NO: 2252 - DNA, 6000 bp, Homo sapiens
ccctgccctagtgctgacagcgtgggaggggccactgttggcccagccccacccccaaccaagatccctttgccagggattcagaggtagccctgatgcctggctggcctggcctcctaatccaaggcccgccccttggcccgcccctggcctgggtggggtgaccccctacaaaagctcagaatttccagcagcggctccttcctccaggagtctctggtgcagctggggtggaatctggccaggccctgcttaggcccccatcctggggtcaggaaatttggaggataaggcccttcagccccaaggtcagcagggacgagcgggcagactggcgggtgtacaggagggctgggttgacctgtccttggtcactgaggccattggatcttcctccagtggctgccaggatttctggtggaagagacaggaaggcctcccccccttggtcgggtcagcctgggggctgagggcctggctgtcagccactcttcccagaacatatgtcatggcctcagtggctcatggggaagcaggggtgggcgagcttaggctagagcaagtcctgtgggagatggcagaggcctggtctgagaggcaactcggatgtgccctccagtggccatgctcccctccatgcgtctcccctgccctcctggagccctgcaggtcaatgtttaacagaaaccagagcagcggtggattaatgcgcaagggctcagccccccagccctgagcagtgggggaatcggagactttgcaacctgttctcagctctgcctcccctggccaggttgtcctcgaccagtcccgtgccatggcagcccacctgcttcccatctgcgccctcttcctgaccttactcgatatggcccaaggctttaggggccccttgctacccaaccggcccttcaccaccgtctggaatgcaaacacccagtggtgcctggagaggcacggtgtggacgtggatgtcagtgtcttcgatgtggtagccaacccagggcagaccttccgcggccctgacatgacaattttctatagctcccagctgggcacctacccctactacacgcccactggggagcctgtgtttggtggtctgccccagaatgccagcctgattgcccacctggcccgcacattccaggacatcctggctgccatacctgctcctgacttctcagggctggcagtcatcgactgggaggcatggcgcccacgctgggccttcaactgggacaccaaggacatttaccggcagcgctcacgggcactggtacaggcacagcaccctgattggccagctcctcaggtggaggcagtagcccaggaccagttccagggagctgcacgggcctggatggcaggcaccctccagctggggcgggcactgcgtcctcgcggcctctggggcttctatggcttccctgactgctacaactatgactttctaagccccaactacaccggccagtgcccatcaggcatccgtgcccaaaatgaccagctagggtggctgtggggccagagccgtgccctctatcccagcatctacatgcccgcagtgctggagggcacagggaagtcacagatgtatgtgcaacaccgtgtggccgaggcattccgtgtggctgtggctgctggtgaccccaatctgccggtgctgccctatgtccagatcttctatgacacgacaaaccactttctgcccctggtgagtcttctgtaacctgcccaccttgtcaacctgccttgtcagatattaggtccagccttggggtactttagctttgggacattttcttcgtttttttttttttgagacagagtctcactctgtcacccaggctggagtgcagtggcacgatcttggctcactgcaagctctgcctcccgggttcatgccattctcctgcctcagcctccgagtagctgggatacaggcgcccgccaccacacccagctaattttttgtattttttagtagagtcagggtttcactgtgttagccaggatggtctcaatctcctgacctcgtgatccatccgcctcggcctcccaaagtgctgggattacaggcgtgagccaccgcgcccggcccccaaccttgggacattttcatccattcattcatcctttttttttttttttttttgagacggagtcttgctctgtcacccaggctggagtgcaggggcaagatctcagctcctgcaccctccaccttccggattcaagtgattctcctgcctcagcctcccaagtagttgggattacaggcatgccatcaacatgtctggctaatttttgtatttttagtagaaatggggtttcaccatgttggccaggctggtctcgaactcctgacttcaggtgatcctcccacctcagcctcccaaagtgctgggattacaggtatgagccaccgcgcctggcgcatgggcacatccattgagtgtgcacttggtgccaagttctgtgccaggcacaggcaattcaacatttattggaatgatgtagtccctgtctgcatggaattcataggctagaggaggaagcagtttgcctctggtcccatggccagagcagccccaggtgaaggttatgaattatttgtcccatctaatggtgttccagcagtctgccacatggtgggaaggaggccccacagagctgtgctgtctccttcccaggatgagctggagcacagcctgggggagagtgcggcccagggggcagctggagtggtgctctgggtgagctgggaaaatacaagaaccaaggtgagcttaggcctggcatgagggtgggggtgggggaggggtggggccattaagctgacggggtagaccctgacttaccctttctacctgcaaagtcctggctgaccagcaggtgagtgcctcagtgccctgggtgggtccatacatggccatggtgtccctgacgctatcctcccttcccacctaggaatcatgtcaggccatcaaggagtatatggacactacactggggcccttcatcctgaacgtgaccagtggggcccttctctgcagtcaagccctgtgctccggccatggccgctgtgtccgccgcaccagccaccccaaagccctcctcctccttaaccctgccagtttctccatccagctcacgcctggtggtgggcccctgagcctgcggggtgccctctcacttgaagatcaggcacagatggctgtggagttcaaatgtcgatgctaccctggctggcaggcaccgtggtgtgagcggaagagcatgtggtgattggccacacactgagttgcacatattgagaacctaatgcactctgggtctggccagggcttcctcaaatacatgcacagtcatacaagtcatggtcacagtaaagagtacactcagccactgtcacaggcatattccctgcacacacatgcatacttacagactggaatagtggcataaggagttagaaccacagcagacaccattcattccatgtccatatgcatctacttggcaaggtcatagacaattcctccagagacactgagccagtctttgaactgcagcaatcacaaaggctgacattcactgagtgcctactctttgccaatccccgtgctaagcgttttatgtggacttattcattcctcacaatgaggctatgaggaaactgagtcactcacattgagagtaagcacgttgcccaaggttgcacagcaagaaaagggagaagttgagattcaaacccaggctgtctagctccgggggtacagcccttgcactcctactgagtttgtggtaaccagccctgcacgacccctgaatctgctgagaggcaccagtccagcaaataaagcagtcatgatttacttagctgtttactgagcgcctaaaatgtccaggccccggtatccaaagggcacaggaaaggcttgtcactctcaccagatctgacgtcagtctaagggcggctgcttcccagggtggggcccaaatttcaagaggaagccccacctgatcggaccgtttccaagctgtcctggggcaggaggccggcgggaaccgaagctagacttgtcagagcctggggcggggctggcggaggcagagccagctggaggcggggcctgcgcctggctgaagtgacgtgctgggctggggcagggcctggaagaagccaaatcgaggcgggacctaagctgtgacgcaaggagaaggaggaggggcctgtatggggccgggtggggaggaggcggactcaaatggagatggggtggggctcagcaggggcggagccagggtagagactgagtcggcgcctggcgggtgttgtgacgcgcaaaccaggggcgggttctaagcggcgacgcgcgggtgctgggaggccttagaacgccgtggcgtgccgcaggacgcgacggctgcagaacatccgccgcaccgctgggggccaacgttgtcggaccgaggagtccgaggtggcgactgagtgagatacccagctgtgcggagctaggacgcggaacatcccagaggccagcatcaacatgtcagtaccgcacccttcccatttgctgcctgtaggtccaccccgcgcgtgcggtccccaagtggccatgccaccctgcacgccctccccgcgtcagtcgttcgtttccagaccatgccgagccacacctgcccacagagtcgagctctcgaagtcctcattcccaaaagctccacagcctgtgacccactaggagggagggggaaaccgaggcccgggagagacggagaagccactctctgaggaccccggagccccgcccacagtgggtggggtcggcactgaaggggttaaggccgcggggaagccccgggctcagccctaggggcggatcctggggcttcctccctctagaccaaagggtgcggctgctgcagaggtggctgatgcaggtgaggggcttacagccctgtgaatggtgtgggaggtgaggggaggggggtgcctgttactgaccagtgtttaattggcctcaagctcaggagaggtaaggggagccaggaggccccctctggagcaggtgagtagaaggagggggctcagctgcccgcccacgactagaaaacccccagcatagacctgccggacggcaggaccttggttaagatgggaaaacagtagggtttgggcacaggaggtctgggcccccaacctggtgaccgttggacaccctgtggatataggaaggaagctgtggtccttatctagggtgcctgcgaaactcaagccagtggggaaccaagcctgcagaggcaatactgctgtgtgactgtgggccaggcccagtgctggtgctgctggggccccatctgaggagacagttgggtctatatccaaagtgtcctgagatgggcagagttgggaagggggccatgggctccaggtggggaaggcagtcaagacaggccaaagctcagcctgatgggtgcatgagtggggccccaggatccactaaggcagtgggcatagcccaggtagttgaaaaggctgggagctggaggagactcggaacatagggagaagaaagggacaggaagactcccgggcagtttttcctatggagggaaccttgggtaggtttgagcagggggtatagtgtctgctttgcatcttctatcccatgccctagtggtggactaggaggactactggaagacagaaggccagcaagtagattgggtcggctgttttatagacctggtggttacagaccccctgtgaggggaggtcctgaggaggacaaatttgtagccagagcaggctggggccaggactcctaggttctgccccagccttaagcagctcatccatcactcccagcctccctccaatgtggggtagacacctggatctatctgccctgctctataggggatgggtctcttccaggtcacctgtgctatcaggtgagtgtgggacaaagtgcagcccaccactcc

SEQ ID NO: 2253 - DNA, 6000 bp, Homo sapiens
ctctctgtcacccaggctggagtatagtagcacagtggagcagtcttggctcactgcaacctctgcctcccgggttcaagggattgtcctgcctcagcctcccgagtagctgggattacaggcgcctgccaccacgcccggctaattttttgtatttttagtagagaaggggtttcaccatgttagccgggatggtctcgatctcctgacctcgtgatctgccacctcggcttcccaaagtgctaggattataggcgtgagcctccgcacctggcatgcctggccatattttaaaatattttttttaaggaggaaaagatccacgaaagtaaagtgcctagggcccatcaatgtcagatgcagccacgtggacaaagaacactccctgagcacaagacacgaaagaacccggtctccagtgtcacaaacaggcctgcccagcagggtctgcccctgcccacctcctccagcctaggtaaggccacaaagccctgccctagtgctgacagcgtgggaggggccactgttggcccagccccacccccaaccaagatccctttgccagggattcagaggtagccctgatgcctggctggcctggcctcctaatccaaggcccgccccttggcccgcccctggcctgggtggggtgaccccctacaaaagctcagaatttccagcagcggctccttcctccaggagtctctggtgcagctggggtggaatctggccaggccctgcttaggcccccatcctggggtcaggaaatttggaggataaggcccttcagccccaaggtcagcagggacgagcgggcagactggcgggtgtacaggagggctgggttgacctgtccttggtcactgaggccattggatcttcctccagtggctgccaggatttctggtggaagagacaggaaggcctcccccccttggtcgggtcagcctgggggctgagggcctggctgtcagccactcttcccagaacatatgtcatggcctcagtggctcatggggaagcaggggtgggcgagcttaggctagagcaagtcctgtgggagatggcagaggcctggtctgagaggcaactcggatgtgccctccagtggccatgctcccctccatgcgtctcccctgccctcctggagccctgcaggtcaatgtttaacagaaaccagagcagcggtggattaatgcgcaagggctcagccccccagccctgagcagtgggggaatcggagactttgcaacctgttctcagctctgcctcccctggccaggttgtcctcgaccagtcccgtgccatggcagcccacctgcttcccatctgcgccctcttcctgaccttactcgatatggcccaaggctttaggggccccttgctacccaaccggcccttcaccaccgtctggaatgcaaacacccagtggtgcctggagaggcacggtgtggacgtggatgtcagtgtcttcgatgtggtagccaacccagggcagaccttccgcggccctgacatgacaattttctatagctcccagctgggcacctacccctactacacgcccactggggagcctgtgtttggtggtctgccccagaatgccagcctgattgcccacctggcccgcacattccaggacatcctggctgccatacctgctcctgacttctcagggctggcagtcatcgactgggaggcatggcgcccacgctgggccttcaactgggacaccaaggacatttaccggcagcgctcacgggcactggtacaggcacagcaccctgattggccagctcctcaggtggaggcagtagcccaggaccagttccagggagctgcacgggcctggatggcaggcaccctccagctggggcgggcactgcgtcctcgcggcctctggggcttctatggcttccctgactgctacaactatgactttctaagccccaactacaccggccagtgcccatcaggcatccgtgcccaaaatgaccagctagggtggctgtggggccagagccgtgccctctatcccagcatctacatgcccgcagtgctggagggcacagggaagtcacagatgtatgtgcaacaccgtgtggccgaggcattccgtgtggctgtggctgctggtgaccccaatctgccggtgctgccctatgtccagatcttctatgacacgacaaaccactttctgcccctggtgagtcttctgtaacctgcccaccttgtcaacctgccttgtcagatattaggtccagccttggggtactttagctttgggacattttcttcgtttttttttttttgagacagagtctcactctgtcacccaggctggagtgcagtggcacgatcttggctcactgcaagctctgcctcccgggttcatgccattctcctgcctcagcctccgagtagctgggatacaggcgcccgccaccacacccagctaattttttgtattttttagtagagtcagggtttcactgtgttagccaggatggtctcaatctcctgacctcgtgatccatccgcctcggcctcccaaagtgctgggattacaggcgtgagccaccgcgcccggcccccaaccttgggacattttcatccattcattcatcctttttttttttttttttttgagacggagtcttgctctgtcacccaggctggagtgcaggggcaagatctcagctcctgcaccctccaccttccggattcaagtgattctcctgcctcagcctcccaagtagttgggattacaggcatgccatcaacatgtctggctaatttttgtatttttagtagaaatggggtttcaccatgttggccaggctggtctcgaactcctgacttcaggtgatcctcccacctcagcctcccaaagtgctgggattacaggtatgagccaccgcgcctggcgcatgggcacatccattgagtgtgcacttggtgccaagttctgtgccaggcacaggcaattcaacatttattggaatgatgtagtccctgtctgcatggaattcataggctagaggaggaagcagtttgcctctggtcccatggccagagcagccccaggtgaaggttatgaattatttgtcccatctaatggtgttccagcagtctgccacatggtgggaaggaggccccacagagctgtgctgtctccttcccaggatgagctggagcacagcctgggggagagtgcggcccagggggcagctggagtggtgctctgggtgagctgggaaaatacaagaaccaaggtgagcttaggcctggcatgagggtgggggtgggggaggggtggggccattaagctgacggggtagaccctgacttaccctttctacctgcaaagtcctggctgaccagcaggtgagtgcctcagtgccctgggtgggtccatacatggccatggtgtccctgacgctatcctcccttcccacctaggaatcatgtcaggccatcaaggagtatatggacactacactggggcccttcatcctgaacgtgaccagtggggcccttctctgcagtcaagccctgtgctccggccatggccgctgtgtccgccgcaccagccaccccaaagccctcctcctccttaaccctgccagtttctccatccagctcacgcctggtggtgggcccctgagcctgcggggtgccctctcacttgaagatcaggcacagatggctgtggagttcaaatgtcgatgctaccctggctggcaggcaccgtggtgtgagcggaagagcatgtggtgattggccacacactgagttgcacatattgagaacctaatgcactctgggtctggccagggcttcctcaaatacatgcacagtcatacaagtcatggtcacagtaaagagtacactcagccactgtcacaggcatattccctgcacacacatgcatacttacagactggaatagtggcataaggagttagaaccacagcagacaccattcattccatgtccatatgcatctacttggcaaggtcatagacaattcctccagagacactgagccagtctttgaactgcagcaatcacaaaggctgacattcactgagtgcctactctttgccaatccccgtgctaagcgttttatgtggacttattcattcctcacaatgaggctatgaggaaactgagtcactcacattgagagtaagcacgttgcccaaggttgcacagcaagaaaagggagaagttgagattcaaacccaggctgtctagctccgggggtacagcccttgcactcctactgagtttgtggtaaccagccctgcacgacccctgaatctgctgagaggcaccagtccagcaaataaagcagtcatgatttacttagctgtttactgagcgcctaaaatgtccaggccccggtatccaaagggcacaggaaaggcttgtcactctcaccagatctgacgtcagtctaagggcggctgcttcccagggtggggcccaaatttcaagaggaagccccacctgatcggaccgtttccaagctgtcctggggcaggaggccggcgggaaccgaagctagacttgtcagagcctggggcggggctggcggaggcagagccagctggaggcggggcctgcgcctggctgaagtgacgtgctgggctggggcagggcctggaagaagccaaatcgaggcgggacctaagctgtgacgcaaggagaaggaggaggggcctgtatggggccgggtggggaggaggcggactcaaatggagatggggtggggctcagcaggggcggagccagggtagagactgagtcggcgcctggcgggtgttgtgacgcgcaaaccaggggcgggttctaagcggcgacgcgcgggtgctgggaggccttagaacgccgtggcgtgccgcaggacgcgacggctgcagaacatccgccgcaccgctgggggccaacgttgtcggaccgaggagtccgaggtggcgactgagtgagatacccagctgtgcggagctaggacgcggaacatcccagaggccagcatcaacatgtcagtaccgcacccttcccatttgctgcctgtaggtccaccccgcgcgtgcggtccccaagtggccatgccaccctgcacgccctccccgcgtcagtcgttcgtttccagaccatgccgagccacacctgcccacagagtcgagctctcgaagtcctcattcccaaaagctccacagcctgtgacccactaggagggagggggaaaccgaggcccgggagagacggagaagccactctctgaggaccccggagccccgcccacagtgggtggggtcggcactgaaggggttaaggccgcggggaagccccgggctcagccctaggggcggatcctggggcttcctccctctagaccaaagggtgcggctgctgcagaggtggctgatgcaggtgaggggcttacagccctgtgaatggtgtgggaggtgaggggaggggggtgcctgttactgaccagtgtttaattggcctcaagctcaggagaggtaaggggagccaggaggccccctctggagcaggtgagtagaaggagggggctcagctgcccgcccacgactagaaaacccccagcatagacctgccggacggcaggaccttggttaagatgggaaaacagtagggtttgggcacaggaggtctgggcccccaacctggtgaccgttggacaccctgtggatataggaaggaagctgtggtccttatctagggtgcctgcgaaactcaagccagtggggaaccaagcctgcagaggcaatactgctgtgtgactgtgggccaggcccagtgctggtgctgctggggccccatctgaggagacagttgggtctatatccaaagtgtcctgagatgggcagagttgggaagggggccatgggctccaggtggggaaggcagtcaagacaggccaaagctcagcctgatgggtgcatgagtggggccccaggatcc

SEQ ID NO: 2254 - DNA, 6000 bp, Homo sapiens
gggcctcaggtgacacaccagctagtgggacatgggcccccacaggcattctcagcccaacccagccccttccttttccttggccccctggccagcacctgcatcacactggcctccactggacacccttgcagcttcgggccttcctcacagacacactgctggaccagctgcccaacctggcccacttgcagagtttcctggcccatctgaccctaactgaaacccagcctcctaagaaggacctggtgttggaacaggtaggcactggaaagttagctgctcaggaccactgtcccactttaccagcaccttcctgccactctccacttctctctcctagatcccagaaatctgggagcggctggagcgagaaaacagaggcaagtggcaggcaattgccaagcaccagctccagcatgtgttcagcccctcagagcaggacctgcggctgcaggcgcgaaggtaaggcctgtggaaatggcagggagggtggaggggatgcaggaggcatggatgtgggtggggtgcccccaccttccagggccagtcagaccttcctgactttcccccaggtgggctgagacctacaggctggatgtgctagaggcagtggctccagagcggccccgctgtgcttactgcagtgcagaggcttctaagcgctgctcacgatgccagaatgagtggtattgctgcaggtgagggtatcctagaaccttggacctctaagccctactcccacatcccccacatgcattgccatcctcaatacccacctgcctgcagggagtgccaagtcaagcactgggaaaagcatggaaagacttgtgtcctggcagcccagggtgacagagccaaatgagggctgcagttgctgagggccgaccacccatgccaagggaatccacccagaatgcacccctgaacctcaagatcacggtccagcctctgccggagccccagtctccgcagtggagagcagagcgggcggtaaagctgctgaccgatctccctcctcctcaccccaagtgaaggctcgagacttcctgccccacccagtgggtaggccaagtgtgttgcttcagcaaaccggaccaggagggccagggccggatgtggggaccctcttcctctagcacagtaaagctggcctccagaaacacgggtatctccgcgtggtgctttgcggtcgccgtcgttgtggccgtccggggtggggtgtgaggaggggacgaaggagggaaggaagggcaaggcggggggggctctgcgagagcgcgcccagccccgccttcgggccccacagtccctgcacccaggtttccattgcgcggctctcctcagctccttcccgccgcccagtctggatcctgggggaggcgctgaagtcggggcccgccctgtggccccgcccggcccgcgcttgctagcgcccaaagccagcgaagcacgggcccaaccgggccatgtcgggggagcctgagctcattgagctgcgggagctggcacccgctgggcgcgctgggaagggccgcacccggctggagcgtgccaacgcgctgcgcatcgcgcggggcaccgcgtgcaaccccacacggcagctggtccctggccgtggccaccgcttccagcccgcggggcccgccacgcacacgtggtgcgacctctgtggcgacttcatctggggcgtcgtgcgcaaaggcctgcagtgcgcgcgtgagtagtggccccgcgcgcctacgagagcggaaggggcagccaaggggcagcgcagtcgccgcgggtcaagtcgcggcagagggggtcggcggggacagctcccgaggactaggtccgttactttcgccccatcgctgaagagtgcgcgaaaatggtttatcccttgtcgcactccactcgtatctgggccacagatgagcagaggtggctgcttatatgtaaaaatacgctgattttaagtttcttatctttaaaatgccttggcccttcttgagaaagggtttgtgcctactgtcctcggagtccatcttcccaggcttgcctcttctcaaacactcatgaccccctccagaacctttagggtgaagggaaattaccacctatgggagggagcctggaaaaatttagaacctttggtgggccccctgcaagcaggagttttgttgagtctttatttagcaaacacccttttctgacccagtgaatcagatgctaaaatatgcacgcagccacacacccagcagtccttctgcacccctgggaatcgccagcaagcaaaggttgctctcccctgggtagacaccagctggaatcaccaggggtgcttttacagtcctccccgctagcctggatcccaccgcagacctgttgaatcaactgctgggagtggaccctaggcatcagtaaattttaaaaactccccaaattattgtaacatggagtctgggttgagcatcactgctctggcctatttaggaacttgtggatggatagtgtcccaggtctgtgtgtgcatggagaccctctcatccggtacaagaggacatcacaaattcagctggggggagcacaaagttgtgacagaatgcaaagaatgaacaaggggccgagcgcggtggctcatgcctgtaatcccagcacttcggaaggcggaggcgggtggatcacctgaggtcaggagttcaagaccagcctggccaacatggtgaaacctcatgtctactaaaaaataaaaaaaaatgagccaggcgtagtggcgggtgcctgtaatcccagctactcgggaggctgaggtgggagaattgcttgaacacaggaggcggaggttgcagtgagccgagatcgtgccactgccctccagccttggcgacagagtgagactctgtctcaaaaaaaaaaaaaaaaaaaaaaagaacaaggctgggacattgcagcgttctcaaagagaaataaagtagccatggagataagaagcaggatgatttgggcatgtttatcagaggtagagacaagggagaaatcaaagataagtttgggcttttgtctccagtaactgggagcctagtggccatttttgctgcaaagaggaagctgggcaagtgtagcagtgaggctgaagaaaagggaattaaattttggccatgttcacttgaaacgtcttttagacatcctagtgaaggtactggcacggaggatctagtctgagggtttaggtcagtgtttcagccgtggatctggggcagatgaatgtagacagaccaggccagtgatcaggactgagcccagacttcatcgtgagatatggaagttgagtcagaatctgcaaaggagctgagcaggagctgcagggggtaggaggaaaactgggagagtgtagcccctgggagtcaaagggagcaagcttcaaatgatgctgagggggtgagaatggagaatggaacactggattccatttggtagtacacagatcgctgaggaccctgtcccgggcagtttcctggaggaagaggcaagcctggctggagtgggtagaggggagagtgaaggcgaaggattagagtgtatagagaccagtgtcttggtctgaggggagtagagacaggtgacaaccacagggcagacgtaggttaaaggtgtttagtttttccttcaagtaaatgggcagatgtattccatatacgttcccagtgaagggccgggtgcggtggctcaagcctgtagtcccagcactttggaaggccgaggcgggtggatcacctgagatcaggagtttgagaccagcctggctaacatggtgaaaccccgtctctactaaaaatacaaaaattagctgggcatggtggcgggcgcctgtaatcctaggtactcaggaggctgaggcagaagaatcgcttgaacccaggaggcggaggttgcggtgagccgaaatcgcgccattgcactccagcctgggtgacaaaagcaagacgcagttttttgttgttgtttttttaattgccaatgaggaaaggggaagttctgtgctaggcgatagagatccaactgttgagcaggcctctctgcctgtggccttccggccggtttccagacgcccaggtggccaacattagagtccgcgtagcagtgtgaggtaacccactgagataggtcgggcctgcggagcctggcgagcagcggccctctccctggggcttcccttcaatctccgggacatttccccgacctggagctcctccgcctcaccgccaggcctctctgcagattgcaagttcacctgccactaccgctgccgcgcgctcgtctgcctggactgttgcgggccccgggacctgggctgggaacccgcggtggagcgggacacgaacgtggtgagcgcggggccgagggcgtatgggaagggcgaggatgggcaggccacagtgcaggcattctcgagggctgcctgggtgccgcgcgcaaggagcgttctaattgccgatttcccggcggcacagagaggctaattctgcgcgggggctgggaggggagcctggattgccggctccgcaagtactccacccgctgcaagcggacccgggcccaggctgacccaggctccgcgcacgcgcacttcccgcaccttcccgccctcgcctccggccagaggccactcttgtgcgcttgcccggacgctggcacccgcccccgttccctgtggtaggtggggtctgtgagtggagctccggagcgatgaggtcattcctgggggcgaagcgtgcgtgtccccgccccggcgttcctgccccaatgagacaagagctagatcccggcgatctacgtttcagtcttaacggttgcggcgcggctctggcccgggcgcacgcgcacactgacacgcgtacacgcacgcacgcgaccggggcggtggttggcggctacggacgcgcaggactgggggacgggcgggtacggctatgggcgaggcggaggcgccttctttcgaaatgacctggagcagcacgacgagcagtggctactgcagccaagaggactcggactcggagctcgagcagtacttcaccgcgcgaacctcgctagctcgcaggccgcgccgggaccaggtgggagccagggggtgccggcgggcgggaggggaagcggtcgctggagctccgccctccccggtccgttgccgcgtcctgggtcggtgggcagccccaccctcctggctacgtggctccccgcgggtcctggccggggacctgcccgcggaaccgtgcgtaagaccccgattccaccgcctagatgctgggtgccggggcccccttggtttctgtcacagacaggttgaacacggaaaaagcagctgtatggcttgtggtagacctgagccgggcattatccagctatgactaaagccgaccgagcagtttggactagcacctcgatttccgcgttcgaatgctcctgctccctccttggggagactaggggaggatgtggagagggaagagtcctcgccaggaattgagaagtatgtttaggaaaacttgagaggcagagagagatcctgctcctccatctgcactcctgtatggagccagctgagccctcacctcttccctgttctggcctgtcaccagctgctggaatgtggaagattctgttcccttcctctagggtggatctggagaaagatttgggaatagataggaaagaagtcttgttttggaccataagcattcaggagcactttacccacaggaagggggaaagctagattataaaatgcctaaagaggtggaaaaagagatccaggttactaacccaggactgtaaggtgtctcggaacctcctaggtatccccattatcggagaactgtgtgccagatgccattggtgtgaccaccaggctcagagaaccaggcctaggcaccaggaaaaagaaacagggactgtgaagctcagtatgcctggcagaaatggggcggaaatccttatttaagtaaagaaagtgga

SEQ ID NO: 2255 - DNA, 6000 bp, Homo sapiens
tgcagaagcaggcagagctgatggaatttgagattgcactgaaggccctctcagtactacgctacatcacagactgtgtggacaggtgagcagtccgactgggcctgggcctactgtggagggctggaagaccgggcctgtagcctgcctctactcacctccttcacaacgtccctgcccctagcctctctctcagcaccttgagccgtatgcttagcacacacaacctgccctgcctcctggtggaactgctggagcatagtccctggagccggcgggaaggaggtagggtcctcccccaccagcctaagccccaggctactgcttcagggtatctttttgatagaggggggcagcttgcacacacgaagacaaaccctgtccccaagcccactgaggataccaggatgcctcagccaaggttggcctagacctgagctctgcagcaggccaggcccatgtgtccactactgaggctcaccctgctctggggtcagcagccctatagcctgggcaagtcctgcagcccaggttctcccattcccaggcagtggtcagtctcccagcccccacagctggctcacttgaagagaattcaacgtctgcacccagtgtgctggttcctctccccaggcaagctgcagcagttcgagggcagccgttggcatactgtggccccctcagagcagcaaaagctgagcaagttggacgggcaagtgtggatcgccctgtacaacctgctgctaagccctgaggctcaggcgcgctactgcctcacaagttttgccaagggacggctactcaaggtcagactccctccgcaccagcccccacagccccagtaccgccctccccatcctaccccgactgcgtccctgctgtttatctttgcccacccacctcaaccccagtgctcttttcagtccttgggcctcaggtgacacaccagctagtgggacatgggcccccacaggcattctcagcccaacccagccccttccttttccttggccccctggccagcacctgcatcacactggcctccactggacacccttgcagcttcgggccttcctcacagacacactgctggaccagctgcccaacctggcccacttgcagagtttcctggcccatctgaccctaactgaaacccagcctcctaagaaggacctggtgttggaacaggtaggcactggaaagttagctgctcaggaccactgtcccactttaccagcaccttcctgccactctccacttctctctcctagatcccagaaatctgggagcggctggagcgagaaaacagaggcaagtggcaggcaattgccaagcaccagctccagcatgtgttcagcccctcagagcaggacctgcggctgcaggcgcgaaggtaaggcctgtggaaatggcagggagggtggaggggatgcaggaggcatggatgtgggtggggtgcccccaccttccagggccagtcagaccttcctgactttcccccaggtgggctgagacctacaggctggatgtgctagaggcagtggctccagagcggccccgctgtgcttactgcagtgcagaggcttctaagcgctgctcacgatgccagaatgagtggtattgctgcaggtgagggtatcctagaaccttggacctctaagccctactcccacatcccccacatgcattgccatcctcaatacccacctgcctgcagggagtgccaagtcaagcactgggaaaagcatggaaagacttgtgtcctggcagcccagggtgacagagccaaatgagggctgcagttgctgagggccgaccacccatgccaagggaatccacccagaatgcacccctgaacctcaagatcacggtccagcctctgccggagccccagtctccgcagtggagagcagagcgggcggtaaagctgctgaccgatctccctcctcctcaccccaagtgaaggctcgagacttcctgccccacccagtgggtaggccaagtgtgttgcttcagcaaaccggaccaggagggccagggccggatgtggggaccctcttcctctagcacagtaaagctggcctccagaaacacgggtatctccgcgtggtgctttgcggtcgccgtcgttgtggccgtccggggtggggtgtgaggaggggacgaaggagggaaggaagggcaaggcggggggggctctgcgagagcgcgcccagccccgccttcgggccccacagtccctgcacccaggtttccattgcgcggctctcctcagctccttcccgccgcccagtctggatcctgggggaggcgctgaagtcggggcccgccctgtggccccgcccggcccgcgcttgctagcgcccaaagccagcgaagcacgggcccaaccgggccatgtcgggggagcctgagctcattgagctgcgggagctggcacccgctgggcgcgctgggaagggccgcacccggctggagcgtgccaacgcgctgcgcatcgcgcggggcaccgcgtgcaaccccacacggcagctggtccctggccgtggccaccgcttccagcccgcggggcccgccacgcacacgtggtgcgacctctgtggcgacttcatctggggcgtcgtgcgcaaaggcctgcagtgcgcgcgtgagtagtggccccgcgcgcctacgagagcggaaggggcagccaaggggcagcgcagtcgccgcgggtcaagtcgcggcagagggggtcggcggggacagctcccgaggactaggtccgttactttcgccccatcgctgaagagtgcgcgaaaatggtttatcccttgtcgcactccactcgtatctgggccacagatgagcagaggtggctgcttatatgtaaaaatacgctgattttaagtttcttatctttaaaatgccttggcccttcttgagaaagggtttgtgcctactgtcctcggagtccatcttcccaggcttgcctcttctcaaacactcatgaccccctccagaacctttagggtgaagggaaattaccacctatgggagggagcctggaaaaatttagaacctttggtgggccccctgcaagcaggagttttgttgagtctttatttagcaaacacccttttctgacccagtgaatcagatgctaaaatatgcacgcagccacacacccagcagtccttctgcacccctgggaatcgccagcaagcaaaggttgctctcccctgggtagacaccagctggaatcaccaggggtgcttttacagtcctccccgctagcctggatcccaccgcagacctgttgaatcaactgctgggagtggaccctaggcatcagtaaattttaaaaactccccaaattattgtaacatggagtctgggttgagcatcactgctctggcctatttaggaacttgtggatggatagtgtcccaggtctgtgtgtgcatggagaccctctcatccggtacaagaggacatcacaaattcagctggggggagcacaaagttgtgacagaatgcaaagaatgaacaaggggccgagcgcggtggctcatgcctgtaatcccagcacttcggaaggcggaggcgggtggatcacctgaggtcaggagttcaagaccagcctggccaacatggtgaaacctcatgtctactaaaaaataaaaaaaaatgagccaggcgtagtggcgggtgcctgtaatcccagctactcgggaggctgaggtgggagaattgcttgaacacaggaggcggaggttgcagtgagccgagatcgtgccactgccctccagccttggcgacagagtgagactctgtctcaaaaaaaaaaaaaaaaaaaaaaagaacaaggctgggacattgcagcgttctcaaagagaaataaagtagccatggagataagaagcaggatgatttgggcatgtttatcagaggtagagacaagggagaaatcaaagataagtttgggcttttgtctccagtaactgggagcctagtggccatttttgctgcaaagaggaagctgggcaagtgtagcagtgaggctgaagaaaagggaattaaattttggccatgttcacttgaaacgtcttttagacatcctagtgaaggtactggcacggaggatctagtctgagggtttaggtcagtgtttcagccgtggatctggggcagatgaatgtagacagaccaggccagtgatcaggactgagcccagacttcatcgtgagatatggaagttgagtcagaatctgcaaaggagctgagcaggagctgcagggggtaggaggaaaactgggagagtgtagcccctgggagtcaaagggagcaagcttcaaatgatgctgagggggtgagaatggagaatggaacactggattccatttggtagtacacagatcgctgaggaccctgtcccgggcagtttcctggaggaagaggcaagcctggctggagtgggtagaggggagagtgaaggcgaaggattagagtgtatagagaccagtgtcttggtctgaggggagtagagacaggtgacaaccacagggcagacgtaggttaaaggtgtttagtttttccttcaagtaaatgggcagatgtattccatatacgttcccagtgaagggccgggtgcggtggctcaagcctgtagtcccagcactttggaaggccgaggcgggtggatcacctgagatcaggagtttgagaccagcctggctaacatggtgaaaccccgtctctactaaaaatacaaaaattagctgggcatggtggcgggcgcctgtaatcctaggtactcaggaggctgaggcagaagaatcgcttgaacccaggaggcggaggttgcggtgagccgaaatcgcgccattgcactccagcctgggtgacaaaagcaagacgcagttttttgttgttgtttttttaattgccaatgaggaaaggggaagttctgtgctaggcgatagagatccaactgttgagcaggcctctctgcctgtggccttccggccggtttccagacgcccaggtggccaacattagagtccgcgtagcagtgtgaggtaacccactgagataggtcgggcctgcggagcctggcgagcagcggccctctccctggggcttcccttcaatctccgggacatttccccgacctggagctcctccgcctcaccgccaggcctctctgcagattgcaagttcacctgccactaccgctgccgcgcgctcgtctgcctggactgttgcgggccccgggacctgggctgggaacccgcggtggagcgggacacgaacgtggtgagcgcggggccgagggcgtatgggaagggcgaggatgggcaggccacagtgcaggcattctcgagggctgcctgggtgccgcgcgcaaggagcgttctaattgccgatttcccggcggcacagagaggctaattctgcgcgggggctgggaggggagcctggattgccggctccgcaagtactccacccgctgcaagcggacccgggcccaggctgacccaggctccgcgcacgcgcacttcccgcaccttcccgccctcgcctccggccagaggccactcttgtgcgcttgcccggacgctggcacccgcccccgttccctgtggtaggtggggtctgtgagtggagctccggagcgatgaggtcattcctgggggcgaagcgtgcgtgtccccgccccggcgttcctgccccaatgagacaagagctagatcccggcgatctacgtttcagtcttaacggttgcggcgcggctctggcccgggcgcacgcgcacactgacacgcgtacacgcacgcacgcgaccggggcggtggttggcggctacggacgcgcaggactgggggacgggcgggtacggctatgggcgaggcggaggcgccttctttcgaaatgacctggagcagcacgacgagcagtggctactgcagccaagaggactcggactcggagctcgagcagtacttcaccgcgcgaacc

SEQ ID NO: 2256 - DNA, 6000 bp, Homo sapiens
cgaggcgggctagagacccgcccggatttaggcgcgagccacctccaggggcggggcccaggccgcactgcgcaggcgcggctaacccgtttccatggctgcgagaactgacgctccccaaccgtcccgcaactgtcctgtcccagactttggcaccgtcggggtccgtcgtccccgaatgtgacagcatccccaccccggctgctgcccaggatccgccggaccccggcctcgatatgggagacctggaactgctgctgcccggggaagctgaagtgctggtgcggggtctgcgcagcttcccgctacgcgagatgggctccgaagggtgaggcacccgggtcaggcggagtcccggagtcattgtccttgagtcggggagctggggcctgactcgggggaggggctgcccagtgtggaggggctcccaaatgggggagcagagcgttccgagacaggagtattactgctcctgagccccctgtgtcccctcaggatcaggttaggcttcagtaggatccagcccccatccccactcctaatgcacacacgtggacgcacatgcacttaccctctgaggcaggtggaaccagcagcatgagaacctggagaagctgaacatgcaagccatcctcgatgccacagtcagccagggcgagcccattcaggagctgctggtcacccatgggaaggtaccccgaggtcacaggcagggttcctgccttcccccatacctcacctactctacccctccggagtcccctgtgtgcccttcccctctggcctggtacacctgttctccctgaaggacaaagaggaatgtgttacatgtttcattttgtatccctattggacaggactctggcacaccaggctgggtgcagggcatgagttgattagggagaaagctgtaggtcctagaacagcttaggcttcaaggggaaggcccaaatgctaaaggcatctgtgaattgactgtaaggctggtggtggggaaggggtggggaggggttggggagggcgggagggaggggagataacctaactggaggtggaacttcggcatggaaggaagcagccttcccaacatgaaagggggaagttagaaaccagggagatgcctggctggaacatggaccagggagtgtcaccagcagatgacctgagatatcaattgaccaaaaaaaaaaaaaaaaaagccgggcatggtagctcatgcctgttatcccagcattttgggaggccaagacgggtggatcatctgaggtcaggagttcaaggccagcctggccaacatggtgaaaccccacctctactaaaaatacaaaaatttgcagagcatggtggtgcacacctgtaatcccagctactcgggaggctgaggcaggagaatcgcttgaacctgggaggcagaggttacagagagccaagatcatgccactgcactccagcctgggtgacaagagtgaaactccgtctcaaaaaaaaaaaaaaaaaaaagaaaggtcctttgcaaaagaaagatggaactcatactaggggataggataggaacagggcactgtgaagggtcctgagtaggagtgaggccaaggcacacaagagctttggaggaccacagacagggactagagggagggcatgaggagaagggctggcttgaaagggatgcctgaatgggcgggcagaggataagggtgcaggtgcaggcagggcaaggcagtctgggaactgggcaggagccagtcacataagcatgagggacatccacagaggtgttgggagcagctggtaatgaaggtccaaggtgcaagagagaagtcaggaaggatactcatgggtctggaatagtttaggggcccagcagtgtttggggatatcagggttgagctgagccggggatgggagggttgccaggcaaaggtaggcccatctcatccctgtcctttaccctacccttcaaaggtcccaacactggtggaggagctgatcgcagtggagatgtggaagcagaaggtgttccctgtgttctgcagggtggaggacttcaagccccagaacaccttccccatctacatggtggtgagctgggcccctggttcatacctcttctcactccttcagagggctctggaccggggaggagagctggtagcccctatcccttcctcaggccctgtccttctctttatctgacaggtgcaccacgaggcctccatcatcaacctcttggagacagtgttcttccacaaggtgagggactatctctgcccatgggccacagttccgggtcagggcctggcaggaagggagattgtgtctgtgtggggaaggcatcagacacagaaagtttccctcctccttttcccaggaggtgtgtgagtcagcagaagacactgtcttggacttggtagactattgccaccgcaaactgaccctgctggtggcccagagtggctgtggtggcccccctgagggggagggatcccaggacagcaaccccatgcaggtgggttgaggttacctagggttgtgaaagcctaggtctgggttccccaaggcctgcgcaggtgagggtggcccagcgtgaacactgtgtgacctcccaggagctgcagaagcaggcagagctgatggaatttgagattgcactgaaggccctctcagtactacgctacatcacagactgtgtggacaggtgagcagtccgactgggcctgggcctactgtggagggctggaagaccgggcctgtagcctgcctctactcacctccttcacaacgtccctgcccctagcctctctctcagcaccttgagccgtatgcttagcacacacaacctgccctgcctcctggtggaactgctggagcatagtccctggagccggcgggaaggaggtagggtcctcccccaccagcctaagccccaggctactgcttcagggtatctttttgatagaggggggcagcttgcacacacgaagacaaaccctgtccccaagcccactgaggataccaggatgcctcagccaaggttggcctagacctgagctctgcagcaggccaggcccatgtgtccactactgaggctcaccctgctctggggtcagcagccctatagcctgggcaagtcctgcagcccaggttctcccattcccaggcagtggtcagtctcccagcccccacagctggctcacttgaagagaattcaacgtctgcacccagtgtgctggttcctctccccaggcaagctgcagcagttcgagggcagccgttggcatactgtggccccctcagagcagcaaaagctgagcaagttggacgggcaagtgtggatcgccctgtacaacctgctgctaagccctgaggctcaggcgcgctactgcctcacaagttttgccaagggacggctactcaaggtcagactccctccgcaccagcccccacagccccagtaccgccctccccatcctaccccgactgcgtccctgctgtttatctttgcccacccacctcaaccccagtgctcttttcagtccttgggcctcaggtgacacaccagctagtgggacatgggcccccacaggcattctcagcccaacccagccccttccttttccttggccccctggccagcacctgcatcacactggcctccactggacacccttgcagcttcgggccttcctcacagacacactgctggaccagctgcccaacctggcccacttgcagagtttcctggcccatctgaccctaactgaaacccagcctcctaagaaggacctggtgttggaacaggtaggcactggaaagttagctgctcaggaccactgtcccactttaccagcaccttcctgccactctccacttctctctcctagatcccagaaatctgggagcggctggagcgagaaaacagaggcaagtggcaggcaattgccaagcaccagctccagcatgtgttcagcccctcagagcaggacctgcggctgcaggcgcgaaggtaaggcctgtggaaatggcagggagggtggaggggatgcaggaggcatggatgtgggtggggtgcccccaccttccagggccagtcagaccttcctgactttcccccaggtgggctgagacctacaggctggatgtgctagaggcagtggctccagagcggccccgctgtgcttactgcagtgcagaggcttctaagcgctgctcacgatgccagaatgagtggtattgctgcaggtgagggtatcctagaaccttggacctctaagccctactcccacatcccccacatgcattgccatcctcaatacccacctgcctgcagggagtgccaagtcaagcactgggaaaagcatggaaagacttgtgtcctggcagcccagggtgacagagccaaatgagggctgcagttgctgagggccgaccacccatgccaagggaatccacccagaatgcacccctgaacctcaagatcacggtccagcctctgccggagccccagtctccgcagtggagagcagagcgggcggtaaagctgctgaccgatctccctcctcctcaccccaagtgaaggctcgagacttcctgccccacccagtgggtaggccaagtgtgttgcttcagcaaaccggaccaggagggccagggccggatgtggggaccctcttcctctagcacagtaaagctggcctccagaaacacgggtatctccgcgtggtgctttgcggtcgccgtcgttgtggccgtccggggtggggtgtgaggaggggacgaaggagggaaggaagggcaaggcggggggggctctgcgagagcgcgcccagccccgccttcgggccccacagtccctgcacccaggtttccattgcgcggctctcctcagctccttcccgccgcccagtctggatcctgggggaggcgctgaagtcggggcccgccctgtggccccgcccggcccgcgcttgctagcgcccaaagccagcgaagcacgggcccaaccgggccatgtcgggggagcctgagctcattgagctgcgggagctggcacccgctgggcgcgctgggaagggccgcacccggctggagcgtgccaacgcgctgcgcatcgcgcggggcaccgcgtgcaaccccacacggcagctggtccctggccgtggccaccgcttccagcccgcggggcccgccacgcacacgtggtgcgacctctgtggcgacttcatctggggcgtcgtgcgcaaaggcctgcagtgcgcgcgtgagtagtggccccgcgcgcctacgagagcggaaggggcagccaaggggcagcgcagtcgccgcgggtcaagtcgcggcagagggggtcggcggggacagctcccgaggactaggtccgttactttcgccccatcgctgaagagtgcgcgaaaatggtttatcccttgtcgcactccactcgtatctgggccacagatgagcagaggtggctgcttatatgtaaaaatacgctgattttaagtttcttatctttaaaatgccttggcccttcttgagaaagggtttgtgcctactgtcctcggagtccatcttcccaggcttgcctcttctcaaacactcatgaccccctccagaacctttagggtgaagggaaattaccacctatgggagggagcctggaaaaatttagaacctttggtgggccccctgcaagcaggagttttgttgagtctttatttagcaaacacccttttctgacccagtgaatcagatgctaaaatatgcacgcagccacacacccagcagtccttctgcacccctgggaatcgccagcaagcaaaggttgctctcccctgggtagacaccagctggaatcaccaggggtgcttttacagtcctccccgctagcctggatcccaccgcagacctgttgaatcaactgctgggagtggaccctaggcatcagtaaattttaaaaactccccaaattattgtaacatggagtctgggttgagcatc

SEQ ID NO: 2257 - DNA, 6000 bp, Homo sapiens
tttctcctcagccctagctcccacacctgcccatggtgccaggtcccagggccaactgctccctagcagccgtgacacttgtggatgccttagaggcttgtcttgttcaatcctcactcccatcctgtgaggcagtcccacttattcccccatcgtccggaggaagaaactggggctcagggaggtgaagtcacttgctccaaaccacccagtaacaggcaccggggttgagatcaccattcaagtcaccccacctgcattaatcactctgcctctcagcctagcctcccaatgtcaccacactgaggccaggtgggtgggggctgggggactgagggacctgttgcactgctctcagcccgtgggcattagcccaaagcggacctcggcgcccagaggtgtgaagctggctcctgctggtgctcaccatgggatcttggtgggaatgactttgctccttgtatgacaagaggagcttagagggctgtgaggctccaaagatgcaggcaggcccaggaggacaatgtccagtagatccccgtagtcctccctgaaacctccaaggcaggcttctcaggatactctgagggtcttctccgggcccagagcaaagacttcttaaataacgctgggccgcccctccacagacacaaactcaacctgggacctcgagggtggacagatgcccaaggcttcaaaatgaccattcctcaggggcctttaccatcctgcctttactggtcaagaagtgattctccgccaccccacaaagccggagtgaaaacccctgtctagccagttagaatcttccagacagggctactttgttttatcagacaacaaaagccacgtcacccctgggggttcctccggaagctctcctgccctgcttggcctggttccagtcatcacccaaccctgggacagagaggccccaggactgcgtttcatgcttgagagagggtgagacttgctgggggaccacccaactggtcagtgatagggtcacgacccaaaccatatctgtctgctgcagaagcagggccccactagacccacggagacaagcaggcagatgtccagcactctcagctctggggcctcactagtgcgccccagccggccccctccaagaaggggcctcagcctcctcacgccatttctcagagggagagagcagggacagggaggttaagtgccctttgcagccctagtctgggctccagggggcgggggtgacttggcttctcccagccttcgctgcccgggctgagagggggccggacctccagggcgacatcgaggtgtgtctgggaagtccaaccggtgtcccctttggtccggccgtccctaggagcccgttccgcccggcgccgctcgctggctttgtccacagcactctcccgccccaactaagggttggccgagaacaaggggttgggggcgtttccaccgcggcttcacggcaggcgggaccccgaaggaagtcggcgggggcccagcactccggcagccgctcgaggagccccgagctcctgcagaccgagccggggaacaaacctcccgcccgcccccgggcgtcggggcgccccagaggcccccgggatgaacggccggagcttctcgcgaaaagccgcccggcccttgcgctccggggccctggcgagccccactgggtgtttccccggaggagcggcaccctggggctcggtccgtccatcagtccacgcggaagacaccccggcgcacgtcccgccccggctcacccaccgtgcaccagtctccgcatgtcctggtagcgagcccataggtgcgcgctgaggtcggcgccgctggtgggtgcctgggcgggcgcggagcgcgggacgccggggcagtgggcgccgggacccggggggccgcacccagggcaggagggcgaggacgaggcggctcgcggcccgccgtggcctccgcacagcagccagcgccgagcggccgcccgcagccccgcacccgccatgcccaccgcgcgccgcccgccgcccgcgctgccctcggccagcccgccgcccgccgcccgccgccctccgactgcgcgcccgccacggtggcctcgtgctcctcacggcggccggccaatgggtgcggcgcgcggagcccggcctgccaatgggcgcgcccctcggcccggggggcgggaggccccggacccggcggggcggggcggggcggggagggctccccagccccctcccccagccagtctccggcgcggtccgggaggactctgcgccccccttcggccgtcacgccggcgatggcggcgcctttccctggccccagccctggaagtcagcgggcctaagagcggccgtccctgagaggctccggacggccgaggcgccgagaggagacagccggagcgcgacgggtaccccccgggcccccgggtcctctgccgccctctccgctcccgggtccgcccgccctaccctgcgcctctggatgcttctgaccccagatcctccgctcctccccctagtcctggtgctctcctttcccggggtcctggtccccggtctctgggctcggactgactgcccactgaccagagcccgggccagtccactcactggtctaacaaataaagagcccttcccgcgcttcccggtgccaggcccacgctgggggaggccgaggggcctgcagggcagccgacgtccgctaaccaggtgactgggccgtgcgctgcagggttgtgggccacggtcactgcgcccgcttggttcggacctcggcaactggccgcactgacccgtcaactcccggtttcccggcgcacgcccctcgtgagatgctgtggtcttttctagcaacgtcgacaggctttccaacaaaattcctctttcctgcgcagaaccgctctccactcgcatttcttctgctcagatccgtattccgagcccgcacgcataccaggctgtgctcagggtccggaggaggccgacccagtagccgtgggccctgtcggaggggagccagctgggcgcgcgttgttttctgaggtggccgcgctgtctttcagggtgtgtgtacattcgaaactccactgaaccttgattgaagacctacagtgtggcagtccatggcctggggactggtaaggattgaggccgtaggatgggctcgagtgtggcggtgtccccagggccccagtgagcaagtgggtgtgctgggaacctggccacaagtgaacctcctccaggcgaggggatgccctgcagcatccagccgtcaaaacctcctgtagaaacgggagcgagcatcaagcctgtgtgtgtgcatgcttgggcggagtctacccggaggagaaagaggcttccgggctggccctccaaagccggttgtacaggcggcagctcaggctgctcactgcgggccctatgaccctttctggggccctgcttgctctctccagtctgcttttgtatattttgtgtccatatcaccaaatcgtctcattggttctaagctttcatttaccttccttagattgtctaatagttgtctcctttctcaaagctgttcctgcagtttttactttagtcctaggtaatggggtgacagcccctttcagttatcttcagcaagcacagcagcatgagaagacgcaattacaagtgaagtctcttaagtcagagccctgcttctacctggcatagtctcttaaactgtcagttaagagactacatataaacaatacacgttcagactcggcgcggtggctcacgcctgtaatcacagcactttgggaggccaaggcaggaggatctcttgagcccaggagtttgagactagcctggccaatatagtgggacccccatctctacaaaaaattaaaaaattagccgggcgtggtggtgcacgcctgtagtggtgggaggatggcttgagccggggaggagggggttgcagtgagccgagattgcgccactgcacttcagcctggatgacagagcgaggtcctgtctcaagaaacaaacaaaaaccatgtttgggaatacatgtgaagagcgagggctctgccaatcattatcatcataatgaatattctaactaatattaatcagttactatgctccagggttgtgttcagtgcatcattcctattaccgcactaaattatcacagcgtcagaacaaggcctccgttttacggcttagggaattgaggcacagatgggctaagggagcacctgtagagcagggatgtggtttggtaacagagtgcatgctctttatactgctcttctgcgattattgtgaataaagcgcctacaagtgcctgtggaactgtaagtgccccatacaagatagcttttattaattttagggttctcacggggcgcttacttagatttttgctgtgataattgataaagttcagctttcaacactccatatcaaattctgttactttagaagtctaggcaccaatcacgtctccgaaataaacgcaaggcattgcataattgcattttggaatgtggtgctgtacatagtccatcagagagggtcatcacttctatctgggtattaggaataaaaatggcggtggcagagtagggggcgcggctgccaactgcgagctcagacctgcactggggaggcagggggcggggccgggccggcgccacgtgggctgtccttcccttttgggccgtcccacctccagagctgaggcgcctgcgccagctccttcgaggccctgctcggcttcagggagcacgcgcgccctgccgtgctctgattggcggagctgcacgcccccgctgcagtctgattggcggatccgcctcgctttagaaggtcggcgcccagttccggcactcgtgcgcctaccagacagtggcggaggacggcgctcgctagtctcccaggtcgcggtacacggcgagaacgggcggggcggtctcggctgcgtccgggcgatccagtgcttagttccgtcatatccctctccacgacctcggtcgagcatgttcaccagggcccaggtgagacggattctgcagcgggtgcccgggaagcagcgatttggcatctaccggttcctgcccttcttttttgtcctgggaggaacgatggagtggatcatgattaaagtgcgcgtgggccaggagaccttctgtaagtgagggggtagcagtctctgtttcctttcaggaaggcacgaggcggtagggatccgtttttctggggagtattctcagattgcagaccgcgcattccactcagagcgctgggcgagtgcagttccattcgcttggcagtcagggcggcctggctctcctgtaggccgggcacattggcgtccagccttgtgaccttccctgcacttacaggcgagatcacgtgcttcttccagccctctcatgcctgcccttcacccctgccggtgacatcgtttgggcttaaggaacagacttgctcacaacaatcgtagaagggggtggatatgaggggtcagggaaactcctgctaactagccatttctctttggattcttctgtccaaactctggagggagctgatctgcctggctttgctaattaccactacctttacaggacagtcattggcaccaggtctttggtctgggtccagatgatcagcactgtaaagatagtggtaacgcctggcactgcattactgagcattaactctggacaggccagttcctttcaggaggacttccccaacccctcggccctttctgctttgcccctctcctgaaacgctatcacttgtgacttgccaacccacattttaaagaattgttacattagtgattcctaaagatccttagtccttctgttcatccattcattgatacttaatgagcattcttgaggggctataatgaacaaggcagaggtgtcccttaccccagaagagctctaatgggaaagaagatgataaagacaattagcatacaaagtgatcagtgctgtgagaa

SEQ ID NO: 2258 - DNA, 6000 bp, Homo sapiens
atcagagttggatcttgtaatttttcattcacttaaatcaagattttgtacactcatcatatttcaaccaaaatctgaaagaatcacatttcttaccactaataaaggataccttggttatcttccctttatcctttggttttgttgaggctctgaacaccactgttggcaattctttcttcaaataatttagccagctctccaaattctcctttggtaccagatctgatagcaattagaaataagacatttgcggccaggcacggtggctcacgcctgtaatcccagcactttgggaggccgagacaggcggatcacgagttcaggagatcaagaccatcctggctaacacgataaaaccccgtctctactaaaaatacaaaaaaattagctgggcgtggtggtgggcacctgtagtcccagctactcgggaggctgaggcaggagaacggcgtgaacccgggaggtggagcttgcagtgagctgagatggcgccactgcactccagcctgggtgacacagcaagcctccatctcaaaaagaaaaaaagaaaaagacatttgctccaatgtggctattttgttgagatgcatttgcaaaatctggcaactatagattttactctggtttacattttcccagtcctttcaaaaggatttaactagaaaatcagggcagggtaagctcccctaccatactgcccgtatcttaacagagctcagcatctgcacttctctatttcaattccccttgtattgctcacttgaaaacttcaggacagactcaacgtctggattacaaccctactaaccctagagctatgtttccagaatttacctttagctagcagccaattgtttcttcatttttgagacgaagtgttgttgcccaggctggagtgcagtggcacagtatcggctcactgcaacctccgcctcccgggttcaagcaattctcctgcctcagccttccgagtagctgggactacaagtgcccatcatcatgcccggctaatatttgtattttagtagagatggggtttcgccgtgttggccaggcttttctcgaactcctggcctcaagtgatgtgcccacttcagcctcccaagcagccaattgtttcttaaccccaacaacaattttagatctcattcccattttctgctttgtaattctctgttctgggttttctttttcctgctgctcaaactcagatgcataattatgcatttcatttaaatattttgtcacatacgttccaatttatttcactcttgaactaatacccgacattgtgtaggtgtggggaatttgtcacactgtcatcacttcctagatgaaatatactacacaataagctgggtatagcagcttacactctttatttaaaagatggtaaatactgaatggcaaaagaatagtagaaaccagttgagtcagttgtaaaagtcacctggctccccactgcctagcactgtctctggcaaagtgcacgtactctggctttgctgagatcagagttggatctaatcagtcttcagtgactatcagactgtttcctcgtacctcacccatgtacacagaagacaaagggtaccctctttactcacctgatttatttaatataagtaccagctttttctgtccactctggacaatggcctcttctacctgaggacatctgcaaccaagaggatctctggcatccaacacctctaggacaacatcggaggcttcaatcacctatcaaggaaaaaatgaccagaactacattatcaaggagaaaatgatcagaactacatcccttgttctggtaataccttccacaagagagtactggcattatccatttagcaacagggtgagctcagagttggatctcatgtcttcactttggtatgaagaatgttgaccctcatcatttctcacacaggaaagtaaaacataggcttgctcagcagtctctgatcaagatggatttcaaaaatgcaaatatccctgtctgaatcctcccatagtgaattatatagtttgataggtccttctggccttgccaaaagctgctgaggggcagtcaggttctatccatgggggagtgagcttgggaaaatggatgttggggatgggagtgctggagagcaactacaccaagttgtcctccttcacttaggtttcaacagagtactttagagacctttagcctgacactgcttactccaatgtacctttctcaatctcaacactatgtcaacgtttttttttaatgttgtaaatcatgcttacaggcagaaccagttttgtgcaaatatttagaaccaaagaaactatttccgtcaggtaaacatagcaggaaaggcattaaacagcataagctagagtcgagtcacgaaatgatttgttggtgaaaaggtgggaggagggagaggatcaggaaagataactaatgtcgtactaggcttaatacctgggtgatgaaataatctgtacagcaaacccctatgacgcaagtttacccatataacaaacctgcacatgcacccttcatcttaaaaggttaaaaaaaaaatgacttgagtcttttaaacctcattactactgtcagacactgacctaggctaagatacctttttaagttcttggcagtacagcttctttgaattctgtttgcccgacttggctttgttctcagttttgcaaagcccaaactcctagaggataaagggggaaataacacaaaattagaagtagagcaactgtaacctctaactccattttccacagctgagtagcagcccttgcagttgttaaataggtaagatggagtctgaactcagttgtcttcctcccaagaagctcagcagcctgtggatgtgcttttatttctgcatcagaactcatctctcagccaggcacaacagcccacacctgtaataccagaaacttcgggaggctgagttgggtggatcacttgagaccagccttggcaatatagtgaaagcccgtgtctgctaaaaaaaattagccaggcgtgatggtgtgcttctgtagtcccagctacttggagactgaggtggtaagactgcttgagcctgggtggtccaggttgcagtgagttgtgattgtgccactgcactcaggcccaagcaaaaaaaccaaaatcaaaacccctgatctctcattcataaagagacctaatcataccttttccataggttccacatttgatggcttaatatcaggattagtttcaagttttcttttcttttctagttccttctgcctgtcaagtttctgctgctgttttagttcttcaagctgtcagagccataagggaaataggtgaaccagtgactagtgttgttaccttactctgaaaaatatcacacataacacactacaccactcaatgaaaattctggctaacataacttaccctctgtttccttagctcagcttccctaagaagagcctccttaaagggagcactgtttggaactcctgggtctttcctaggcttcttgtgaccccgctttttagcctcctttcttaattttcgatgatgttctcgaacctattaaaataaagagattttgtctgcttacaaaaatatctttatacttaagcagaattcaagtgagaaaccaatctggctgcaatttagttatgcctataaaatgtcctaggaaaatggagctttaattggaatcttacaaagtaatgcatatgtaagtataaaacagcaagaaattgtaactagaaggctctctatgcagagattaacatgctgaacaaatttagagacttatcaccaaatcactgcactttctcacagctgcactcctgatgcctaagagcttgtgcccatggtcagtctatccaatgccatttcccaaaaccaaatcacattaacccagactttcccgcaaaggaacagggcaaaatcagtttagcaatgtgtttggtacagctctctcaagcactacacttacctttttttggattttataccgcttatggcaggtcatgcgtttacttgctttctttaactctacaaagaaacacatcacaaatctgttaacccaaatgattagttctgggttaacgcactatggagttatatccttttcttgtgttattggctaccaaacctaacgttaagtctaatgcgaaatgcctaatgcaaacatacgtgctactttcaaatcccagagaattaaattcagtagatccagaatggagtcaaaattccctgcacttaccctcacaatattagaatgggatcatacacaacagcgtatgagacacaaaacgacaaccacttcgtgtcaaacagcacgaatcataaggcaggagaggaacactgagtctgggaggcgattctcagctctcacctgggccagtctgcacgtggccacggaaagaaaatattgggcctcaaacctggctcagacgctgcttccttacgaaaatctagcctagtcttccccaccctctgcccggcttcgttccgcagaatgagcccgcgcggttaacatgatcgccgtagggacttccaactctcggttctaccaggaaatagggccaaggcctacgcgtaggctcccacccccataccagcagagacaaagccgtagccgtagaagagcgtcgtggtggctgcagcaacttccagacgtgggtccctccacgcccgcctcccgaccccacttactaggccttttcatattggctgtagaaggaagcacaaacacatcaacctgcctccgctggcgccacgtgtgaactgaagccactgacgagcgtcacgcacttacgctgccgccgtaaagtgcgtcaccgcctctctgcgtgcgcgggcacgcagtgtcgcgcggagcagggatcgcttggcggccgcgggactggttttgcggcggcaccgggaggggtaagggaggtgagggcggcgggtgccgaagcgacggcagcggccgcggccggaggagcaatagcagcagccgtggcggccacggggcggggcgcggcggtcggtgaccgcggccggggctgcaggcggcggagcggctgggtaaggccgggcccagggcgggtggggccgctcccccttggtcagctgccgggcctttgtgtgggcccgggcgggcgggagccgcggcggaagccccgccccggccgtggggacgcgcgggtcgggccgggcgcgcggggttgggcggggcgcggcggctggcctccggatgggcccagtagccttgtcgcacctgccggcagggacaaaggcgcactacgggtcggaaactccccgcgctcctctttcccgctcgtcgcggggcagcttcaaagctgtcaacgtttccctcagtccccaataccagtgacaggtcgggaaagtccttcatttcctccgttgctcagggcctcttttttttgttgtggtttcttgacggttcgacacaaactcttagtgattttctttccgtattttttccgggtattttaatcaatgggacttgtatttatagtagaggccagatatttcagcttctcaacaccacaaagaatccgggattttgggaactgtgtatatttcttggtttggggaagcacagttttgttattataataagttttaatttaaaggggaagaaagagttgcaaaaatatagaaaaagccctgaaaaataagtacacggtatagtggatatagaaattcttacaataattatagaagcgtatgttggggtgaattgttttaattaacttactttccaacacaggattcttgacaaataattttaggtattatttttttctccatttggctatgtgcttttccccaaaaagtgcaaattggactcatgcacataaaagagtagcataatttttgctttattacttacaggtcgcccatatttgattttgagctccaaaatggaagattggaaaatatgttttgaagaggtgtttcaaattaaaacaataaagagtttatgtgtggat

SEQ ID NO: 2259 - DNA, 6000 bp, Homo sapiens
aattgtaaggcacatggaaacactgaatttcaggacactacgacaccagcagctgaatgattagaacaggagaacactggttgccagcagtatggaaagaaaggttggggatctccaggaaacagaaagaaggagcaaaagaatcacatttgaaaatcctggtgagcaattaaggaaaaagagaagtctcagatctctttttccaaactaaagtccacatggtgtttaaaacaaaatctaccacgatgatgttccttactctaggcttcggtttgttatacagtattattagtttgaagttggctaaaagtagttaaaatcgtcaaaaggcttagccaaaacttagccaagttttgctgatttttgttcattttataaaaagctgatcaacaggactcaattcattaagataaattaaggaccaatcccttttaaacaatctatgacaaagacacaagtgaatttgatgaacataaggagggaatctttgtggaaaggataacaaaaatttaagaaaggtggaaggaaaaagtcaaggaaggacagaaaagggaaagggtgtagataatcagtaatttaccagctttaccagagcacaaccagcgcctcgaaaagccagtctcctcattatgtctgaaagccaagtgaagccagtgggagaaggaagggctttagaagtgctgattcagtgttagtatattcaaaactgaaaaagaagaacaaggcagagaagggggaaatagaaaagaagggtcagaaggagtaaaaatgagtacgaatagatagaaaacattcaaatagaactgctaaagaaagataaagagaactggagaaaacaggcatatcagttctcttgtacctatcaaacaaactgctgcaaaggctcaggcactaacagtacctgacagttcttccattttaaaaccaaatgctttcatatgtttaaagatgtctcattgaggttcccctttactcacattaggaatgactgtcaattccaggaatgaggcatgcctgcccaactgccccctagtcaataagagcagagttcaatcacagagctggaatggagagtgaatacatgtgggaggctcacatgtgacaccaagtgttggcaagctggaacaaaccaagaatggctcatgtgagcaaaaggtctggaaaacaccctcccccacaaaaaaaaaattcagagaaagaacatttatttccaaaagtcctatctgcattggagacaccatataaaaatttgacaaggttaaaaaaaaaaaaaaaagggccaaccattttggcaggagttcaaaattacttttataaataatccactgaaaatcaaatgacaaaaaaatacattatcagcatgtgtatgtcgttcggatgacacaatatcccaatatccttgaatcattaatttactttggtaagataagaaaaagtttcaacttaaggataattttcaagtattttcttatccatgggacacattttaaaatgtattttgaaagtctgacaagaagggcaatgttataaggtgggagaaacaacaggacctttgctcctaagaccagaataggagtcctaagtcttccacctctgattatcagcttgatgttgtctgattagttgatgtaacctctcagatctgtttcatctctaaaataagaacgtaatgccgggagtggtgggtcatgcctgtaatcccagcactttggaaggccgaggccagtgcatcacttggagttcgagaccagactggccaacgtggtgaaaccctgtctctactaaagaaaaatacaaaaatttagctgggtgcggtggctcatgtctgtaatcccagcgctttgggaggctaaggcggatggatcacctgaggtcaggagatcaagaccatcctggctaacacggtgaaaccccgtctccactaaaaatacaaaaaaaattggctgggcttggtggcacgcacctgtaatcccagctacttgggagactgaggcaggagaatcgcttgaacccgggaggcggaggttgcagtgagccgagatggcaccactgcactccaccctggacgtcagagcaagactctgtctcaaaaaaataataaaaaaaaaaattagctggctgaggcagtgcatgcctgtaaacccagttacttgggaggctgaagcatgagaattgcttgaacccaggaggcagaggttgcagcaagccgagatcataccactgcactccagtctgggtgacagagcgagaccgtctcaagaaaaaaaaaaaaacaacataaagtgaaatcacttctgcatgttccccaggcacaggaacagcatattcatttttgtagacctgtcttacaggatagtatttggtataggttatgtgctcagtttatcttttaataaatgtattaaaagtgcacttagggccaggcacagtggctcatgcctgtaatcccagcaatttaggaggctgaggtgggcagatcacctgaggtcaggagttcaagaccagcctggccaacacggtgaaaccccgtctctatcaaaaatacaaaaaattatctaggcaaggtggtggcatgcacctgtaatcccaggcactcgagagggtgaggcacgagaattgcttgaaccagagaggcagagattgcagtgagctgggattgcgccactgcactccaggctgggggacagagtaagactgtctccaaaaaaaacaaaaaaaaagtgcacttgagaccttcaaaaaaaaaagtttatttgtatagtttaaaagtcctcagccaggcacaggggctcatatctgtagtcccagcacttggagaggctgaggcaggatgaccgcttgaggcagagagttcaagaccagactggataacatagattgatcttttctctacaaaaattaaaattagctgggtgtggtgctgcacatcagtaatcccagctacttgggatgctgaggtgagaggactgcttgagcctaggagcacaaggcttcagtgagccatgatcactttactgaactccagcctgggcaacaaagtcagaccttgtctcaaaaaaaaaaaaaaaaaaaaaaaaaaaatgcctgtaagcatcccttcagcaattttgtctttccatgaagaggaaagacagattccagagttcaatgccaagttttaaaatggccttgattacagttacaagttcaaaagtctaacaatcaataatttatagtggacagttaagaatacttaataatgtgcaactgggagaatatcgacttactatagacaaacagtgtatttcgaccgtttatgaactttagccctctcctatatttctagtaatatttagcaatacaatacatgtttaaaacaaaatcttggaaaacaggactcaaaggaaaaaaaacacctataaacctacttccaagaaaaaaaccactcttaacgttgtcattcggtttttggtatttatgccttagttacctattattttttaccaaaatgttaacaaaccacatatattattctacagcctgtgttttagtgaaggttcttccaagtcaacattcttcctcatgatgtttgatgacttgatagtaatctatcatatagatacaccacaatttacttatcttgggaattttggtaggatattaacatttgaggtattttgtacattcccaaagccaaagaaagcggtcaaggcccttccattcatccacacataaactctttattgttttaatttgaaacacctcttcaaaacatattttccaatcttccattttggagctcaaaatcaaatatgggcgacctgtaagtaataaagcaaaaattatgctactcttttatgtgcatgagtccaatttgcactttttggggaaaagcacatagccaaatggagaaaaaaataatacctaaaattatttgtcaagaatcctgtgttggaaagtaagttaattaaaacaattcaccccaacatacgcttctataattattgtaagaatttctatatccactataccgtgtacttatttttcagggctttttctatatttttgcaactctttcttcccctttaaattaaaacttattataataacaaaactgtgcttccccaaaccaagaaatatacacagttcccaaaatcccggattctttgtggtgttgagaagctgaaatatctggcctctactataaatacaagtcccattgattaaaatacccggaaaaaatacggaaagaaaatcactaagagtttgtgtcgaaccgtcaagaaaccacaacaaaaaaaagaggccctgagcaacggaggaaatgaaggactttcccgacctgtcactggtattggggactgagggaaacgttgacagctttgaagctgccccgcgacgagcgggaaagaggagcgcggggagtttccgacccgtagtgcgcctttgtccctgccggcaggtgcgacaaggctactgggcccatccggaggccagccgccgcgccccgcccaaccccgcgcgcccggcccgacccgcgcgtccccacggccggggcggggcttccgccgcggctcccgcccgcccgggcccacacaaaggcccggcagctgaccaagggggagcggccccacccgccctgggcccggccttacccagccgctccgccgcctgcagccccggccgcggtcaccgaccgccgcgccccgccccgtggccgccacggctgctgctattgctcctccggccgcggccgctgccgtcgcttcggcacccgccgccctcacctcccttacccctcccggtgccgccgcaaaaccagtcccgcggccgccaagcgatccctgctccgcgcgacactgcgtgcccgcgcacgcagagaggcggtgacgcactttacggcggcagcgtaagtgcgtgacgctcgtcagtggcttcagttcacacgtggcgccagcggaggcaggttgatgtgtttgtgcttccttctacagccaatatgaaaaggcctagtaagtggggtcgggaggcgggcgtggagggacccacgtctggaagttgctgcagccaccacgacgctcttctacggctacggctttgtctctgctggtatgggggtgggagcctacgcgtaggccttggccctatttcctggtagaaccgagagttggaagtccctacggcgatcatgttaaccgcgcgggctcattctgcggaacgaagccgggcagagggtggggaagactaggctagattttcgtaaggaagcagcgtctgagccaggtttgaggcccaatattttctttccgtggccacgtgcagactggcccaggtgagagctgagaatcgcctcccagactcagtgttcctctcctgccttatgattcgtgctgtttgacacgaagtggttgtcgttttgtgtctcatacgctgttgtgtatgatcccattctaatattgtgagggtaagtgcagggaattttgactccattctggatctactgaatttaattctctgggatttgaaagtagcacgtatgtttgcattaggcatttcgcattagacttaacgttaggtttggtagccaataacacaagaaaaggatataactccatagtgcgttaacccagaactaatcatttgggttaacagatttgtgatgtgtttctttgtagagttaaagaaagcaagtaaacgcatgacctgccataagcggtataaaatccaaaaaaaggtaagtgtagtgcttgagagagctgtaccaaacacattgctaaactgattttgccctgttcctttgcgggaaagtctgggttaatgtgatttggttttgggaaatggcattggatagactgaccatgggcacaagctcttaggcatcaggagtgcagctgtgagaaagtgcagtgatttggtgataagtctctaaatttgttcagcatgttaatctctgcatagagagccttctagttacaatttcttgctgttttatacttacatatgcattactttgtaagattc

SEQ ID NO: 2260 - DNA, 6000 bp, Homo sapiens
ttcaaaccaggtctctcaggctctaaagcccaaggccatcatgtaatgacagagaagcagacttgaagatcctagagacaggagttcccagagacccatcttgcacctgcagtttcttatttttttattgccaaacccaccctgttccccaaaaaccacagcatactgggcagacagggcccctggccagtctagtctgtgacctgggttgggatgtgctggctgctgtgaccctgataagaggagggggcccagagccctcactgatctctgtttgcttgtcctggactttgtctcacagagcagcttctgggaagagtttattgtccttaggccacggtcaccttctggcctgtcttctggcctttgtagaagagaagctggatcgacatgacagtgtacatttgaagttctgcttatttcctgcaccagtatcgaccaagccctgcagtgtgttgggcacaatgccaggcactgagaggccaccatacagaaacctgagtgccctgctgtgttcagtgagctgatgtcaggggaaaagggaatcagacaagtcaaagggagcccactgaatcccaaggagtgatgagaagctgaagagatagaaatttggaggggcagaggctcatctcctgcagggattaggagaaggttcctggatgaggtgcctggaaaaaagagcagtgcttgggaaggggaaggcgggaagggagggagagaaaagcagacgggcaggtgggatgtatgctgtgggaaggtagaggtgtctgggatgggagcaggagctgatgaagagggtagggaaggtggctgggaagggggttgggaccagctggcgcaggggtctgaaagtgattagccttttgggtgggagatacttaagatattttaagcaagggtgtgatgagttcaagactgggctgttgagagatggctagcaccaagcctggtccatgtaaagtgctagaagcatgtttgcacagggggagggtggacaggagatggggagagctaactatgacctgtgcctgtcatgcttcttagcatcacgtccgaattcatttactgctcacaactccccacaagagacagatattattgttactattatcctcatggtacagagaaagagacgttggcccaccatatgcatgtgggaggtgggggccagggtggacagaaagcagctatggttgctgaggattgagaatggggagtgtagctgtgctgctggtgccggtgggacagcacatgggcccagacctgctctgagcgccacccacacacagccaactgtctgcttgatgtgcccacagcccctccatctggtatgtccaaactgaactcctgacctttgtctcctcctccccacaccccgttactaagccagatcttccccctgttgtccactccagtcaaggccaccgccatctagttggccatccaagccagaaggctgggtggcatcctgggtgcctcagtctccttgaccacctaccccacctcccaccctctgaatatccctctaatccattaacttctctccccatcccccgtcaccacctagttcaagctgccctcatccctcatttagacggctcatctcctccttctgctctgctccaggcagcagccagagtcaccatttagaaaggtcagtctgccgcaggcctttccctgtctcgcacaccctatcctgagtggtatggcccctgctgacccctctatgtcacctagcccatggcccctctgagtctctcagcttcaactgcagagacttcttttagatccaggtaggcaggtgcttctccattcattcattcagcaagcggcaattccttcatttatacctgctgggtttagggtgttgaagcagacaggcctggcctcgtcctcagggagttcacattgcggtgtggaggtaaagtcacaaaatgaatccactggatcttagcacatgttgctcctctgcctgaaaaagtttttgtttaaacttccactcatgcggtgcttgcttggggcaacctctcctggatggccaggctgggcctggcggcttttctgaacagtactgacctcagttggcaagggtagcttgttagtatgcatggccgtctccctcttcgacagtaagccccacatgggcaggcccttgtctgtcttgttcatagttgtcctccaggtccaggctagtagacccttgctaaatgtctgtagaatgaatgataggtttttttttttttttttttttttagaaggagtattgctctgtcgcccaggctggagtgcagtgacatgatcttggcccaatgcaatctccgcctcccgggttcacgtgattctcatgcctcggcctcctgagtagctgggattacaggagcagtgtgccataattttttattgtggtaaaatatacaaaacataaaatttattatttaaccatttttaagaatacagttcggtggcataagtacattcatgttttgcatccatcaccaccatccatctccaggactttttcattttccccagctaaaactctgcacccattaaacaccaaccaccaattccctcctctctccaacaactggcaaccaccattctactttctgaatctatgactttgactactacaggtacctcacataagcgaaatcatacttttgtcctctgtgactgccttattttgtttagcataatgtcctcaggggtcgtccatgttgtagcatgtcagaacatccttcctttttaaaaatttatttattttgagacagagtctcactctgtcactcagctggagtgcagtggcaggatcatggctcactgcagcctcaacctccgaggctcaactgattctcccacctcagcctcccaggtagctgggactacaggcatgcgccaccacacccagctaattttaaaaattttttgtagagaagggggtctcactgtgtttcgtaggctggtctcaagtgatcctcccaccttggcctctcaaagtgctgggattaggtgtgagtcatagtgtgtggcctctagagcactaactttaaaaagctacaattacaaatccttcctctgtccctctgagatatatacctatgtatttcctacaacctaggaatgtctttctcaaggacctgaaatccattcctttggaatgtaatcatcataaaggtagggctcatgtctcccagtctatgtgggagaatagaatcctaacttccctaattgccagctagcagacacagttggcctaatcacatttacgctaagcactccttttaatttttcacttcccagactctaagtgagcccctgcatgctcccctgcctactcccttattcttcctttggaatgcccaatcacccctgcgcaaatggaatggagttcagctgcttcccctactgtcagtagttactgaataaaatctattttcatcattttaatgcctggctttgtttatctttaataatatcattaactagagttcaatctttatttatggttctttttgtttggttttctagtgaagatgaaattgctttgagtaaaatgtgcaaatactaaatgtaccattagataattttgacaaattcatacacccaaatctcctatcaagatatatatcaaggatgaggagaaatttgaacccctgtggattgctaatgggaatgtaaaatggttcagcttgctgtaaaaaatggtgtggtggtttctcaatacattaaactagaattagcatatgatccagcaatttcacttctgagtgtatacccaaatgaattaaaaagaaagcagggactcaaacagatattcgtacacccatgttcatagccgaattattcacaatagccaaaagatggaagctatccgtgtccatgactgcatgaatggataaacaaattgtggtgtatacatataatggaatattatttggccataaaaaggaaagaggccaggcacgatggcgcacacctgtaataacggcattttgggaggccaacgtgggtgaattgcttgagccgaggagttcaagaccggtctggggaacatagtgacaccctgtctctgaaaaaaaataaaataggattagccaggcatggacgtgtgtgcctgtagttgggaggatggcttgagcccaggaagtctaggcagcagtgagcaccattgcaccactgcactccaagctgggtggcagggcgagaccctgtctcaaaaaaaaaaaaaaaaaaaaaaaaggaaaaaaaggaagcgctctgggaaagggaggctttggctggaacaaatggtgaattcttttggcacccctgagctttcttgggcaggcattttaaaggggcctaggcccacctagagatccgcccttaggctgttaacttagcatgatgccatgttagagtttagtcaagtctcttagtgcagtggttagggtagtcgttaaatgctgaggagtctttgtagttctcaattagcaggcgagtttttagggatgaaaggtactgataatttactttgaatgtatcaaaaaataggatggattgctggatgcagagacggcatgtgataaagcggatacagcaaatgttactggtagagagtctgtcacccagtcattagaacatgagctccaggagggcagggactttgttggcctggcacataggcggtcaacaaatatttgcagaatgaacgaacaatacttgtaacggccttaggacaaacaagtgcacaaaaagaggaagctttccctgactctgttgtggcggggatccggacggtggaacggacgcacagaaagtgcgcggagcctggcggagtcgctctggcctcctggagcctctgctctatggcgggtcctcccggggctgcggaacctctctggccgctcgtggcgtccgctctatggccgtcctttggggacgcaggagcatgcgcagaactgctcccggcccggatcgctatggcagcggcgtcgtcgcgggccgggccccagcaatcccgcccgggcccggctgcctcaacagccgcccccactgccccctctcgggcatgaaccgagcttcttgttgccgcccgctgccctacccgccgctgccgccgcatcccgactctgggccagcgctgggaacatgcccctggccgcctactgctacctgcgggtcgtgggcaaggggagctatggagaggtgacgcttgtgaagcaccggcgggacggcaagcaggtctgcaggggtggggcccggcaaggggcgggggcgggcagaagtgcgccgagggcgccgaccggtagattaggtcgggggtggtcgcaagaggctcatctcggatggcgtttcctcagggaaatggtcccagaccaagacgaggcctggcctccctgtaatatgcgcccagaactacttctacttctttgttgtgttaaatttttttccttttaattttcattttctttaattacaattctaagttttatgtaaaaattttcagtctctgcctatctacttctttgttgtactaattggcatgcgtgatctacacacctttctcccaaccccgatactctcatgagagccggtatcatgcattcccaggacttaatacagcgcctagcaagcattattccttgaatgaagggccccaaacgtctctactgtagactgctggattcacttaaaactcgactcattttcttcccgccaaaccttctctcatgtcttccgtttcagtgaatagtgacaccaacccaccagttgcccaagccggacacctggagtcatttttaagcctccccacgcaccccaacactgattatattcatctatcactaagacaataggcctcctctcatctctactgctaccaccccaatccaggacaccctgttgtctctagcaaagctatggccacggtttcccaactggtcgccgccacttgacttgcttttctccaatccatcactttcactgcagcctcagtgatctttctcaaatttaaat

SEQ ID NO: 2261 - DNA, 6000 bp, Homo sapiens
taacagtcaacccatctgtagtttaaaaagcatacacagactcagattaactgtgtctgtgtatgctttttccataaatactgggtacaaagaggaagcaaacaaccaaccacccaaatacccacccagcaaatcggctactgactcactctcacttagccgtgaaaggaacagttacaaagacttcactccagaagccgaaaaagtctcttcctatgagggcaaaatagtgattagacaatagaggaaaacttaaagctataaacatgattgttatgcctaagctgagaggaaatgttcagatcaaaacacaactactaatgaaaagccttaggaccacacagagaggtgcaccgaattgtgctgacttcaaataccactgtttccgaggcacagggactgagtctccaaatactaagccacatctggaattctgcttttacagcacaaatgcctatagaaatgggggattgtgacgttgccatggggacccagcctcctccaccccaacaggtccccggcaagccccacgcacatttccttcaaggtggatttcgcatatttggaaattatggaaggccatcattttaggtttcagtgttaatggaaatattacaggacatgctagaaagcaaggcaaccccttctgtcagccgattaagtctgtccacatggtggtctcggacagaaaaaccttaaaataacagtgggaagcagtaagtcagcattaggccctttttcaaaatgtgtggctttcccccactttctctaggaaggagacaggcttcaagcatccttttaaatgcccctgttctctagctgcaaaaatccaagtgagtcaacctgtgctcaaaactgcctgccattagtagcccacctcaggctccaggtagccttacccttgctgaactgaacctctaatcccaccctgcagggctactggccaaggcagggtgtatttgcttttaattactgatgaccctgtttttgttaagaggaaaagtttactagaacctttggagaatcctgtgaaaaataatccttacccaatttcccccagaaacttttcatacacaattttgggaggttcccagagctcatgaaggccacccaagggcctctgaggggttcacaggcccccaggtccaaagccatgtttagacacaaaaaatcccaagaccccactcagaaatcaaagggtgcatcttggctttgccagttccctgggatgcagaccctccaactacctctccaggtgtgaattcaaatagcaatatataaaatatccacacatataccataaccacccttgggtgaccccagctggttctctctgtcctccaggagtgaatattctcccattcattctgactagaatgttctaagctaaagccagagtgacccttctaataagtatctgcctctctctgcaaggtctggcctttcccagaagctttctgggggagagggaagtagtcagcccagaggtgaagccacagtcaccaagctctgacgggcagatgggaggagaaacaggagtaaagcctcctgtttcacggccctgcccggcccaggggtgacactcacggtgttacctcctgatcaaaccatttccatctagtctcttagatagcaagtcctgaaacatccccctgagatgcagtcagggtttctgaatgcctttgagtgtgtgtgttgtcagtatgtgtgcccagccacaaagccaacaacaacaacaaaaaagcaccaggaagtcagcagtgccggctccaggtgttaacacttagcgcatcctgcccagcccccaccagcttgaggccagccgcctgggagccggacacagcaattagacccttcccaggccaggcgcctttgtcccctcgctaacatcattagtgtctgacttcctgtgcacaacggggcctcccggggggcaatcaccggctgaccggggcaaggcattagacttcctttgtcaaagacccttaaatgttaacaagcatgtgaacaagcttcccctcccccaccccctcctacctcagctgttcctccagcccaccactctcaactgtcttgattctccccaagctgtgggaatcccagttacttgggagaaatatcaagtctcaatgttgggcgagcagcactgcctttctacagaaagagcctccaaacctgatttcctagaacctttcagtataagcatgcaactcacactcgctgagtgcccactggttacaaaataccaccgtcctgccttaagaagggtgaaacaaagaaaggtgaaagtattcagccaacaggagtcccaggctgtgccacacccagcccaatgcccatcaaccacaggtgcactctgttcatgtgttcatggactgaagtacaaagtttggcctcaagatgcaaggactttgaaggtttgagtgatatcctgaggccttcagaaaaacactggtgagatctgaaaacggggtgagtgtgagttgctatacagctgcaatcctaccgtcatccctctcttggcaatactatcaccaccaaggccaaaatcactttgctctcatttacccctcattaccaagactcacagctttttatttgggggagaactgtggtgcatgtgtgcacacacattggcacatggtattttcaggaggcttctggacccctgaagcccccagacctctcacctgccttatagtccagctccactcaatagcttgatagcttaaagctacgtctgttgaataatagagagtggttttacttcggtgattaaaaacaaaattcaggccagccatggtggctcacacctgtaatcccagcattttgggaggcggaggccagcggattgcttgagctcaggagtttaagaccagcctgggcaaaacggtgaaacccattctacaaaaagtacaaaaatattagccagacatggtggtacacacctgtggtcccagctacttgggaggctgaggcagggggatcgcttgagccaaggaggttgtgaccgtagtgagccgagatcacaccaccacactccagactgggtgacagagcaagacactgtaaaagaaggggcgggcgcagcggctcacatttgtaatcccagcattttgggaggccgaagttgggggatcacaaggtcaggagttcgagaccagcctggtcaacatggctaataatacaaaaaaaaatttagccaggcgtggtggcacctgcctgtaatcccagctactcgggaggctgaggcaggagaatcgctggaacccaggaggcagaggttgcagtgagccgagatcgcaccactgcactctagcctgggcgacagagtaagactctgtctcaaaaacaacaacaacaacaaaaacaaacaaaaaattctaatgggggagggaagtggttgatgtaaaatctccattttaaatataattattggattaatgccatccaactgtaatcctttataggcagtatttgttacaactcagtaactaaacactttgtccaagatgctgggactcatgaactttacaaagtagaaacatgaaaggcaacaacttacactgttgagcacataaacccatcaagacagaggtatctagcacctttcggatcacaggtgacaacagttatgtctgcagccaagtcagttgcactgaatcaagataaaaagtgaactaggatgtggctaattcttattctttttttttcatcactgagtgtggaggaaaatactcatagtgtccactagatgaagaaaacagctgattttcccactcctgctcaactgcctttgcagagtatggtatttgcggtcaacacacaaaactgagttgggtttgggatatattttatagtatctgtgcatgagccactatgaaggataatctaaaattccaactttccaaaatgaataatctatgtctctgactcctactccagccacagcaaaactcattcagcttcaaaattaagatgttggtataaagcaaaggacaccatcgcttacatgatgccaagtcccccacaagtttattttgatgaatgttacaagtttcaaagcgtaaaaaatttcactgtcagttctgacttttaccttttgccaaactaattttaaaatagcaggcaatcggaaggatatattcaaacactaatgatccctgtaactttacatcgtcctactatttggatggaagccagcagtctgttcttaaactataagcaataaatctagaagactctctttcctaatttcccaaagataccacatggaatttccattaaagcacacacacacacatgcaaacacacatacacacaatgacataccaattaaatcattgtatgacatttaggccaggaaataattatgcttgccaaggagtattcagctttgttttaatttccttgaaccactaaaatgtcattcggagaaggcaaagaatgatgtaaaaatgaagtactgatgtcttggtcaattttagattttgataaatgtcttttttgtgggtgaagaaggcagtggggtgttcccaggaattaaggtctccctgcactccctctccaaggatttctggcaaggagtggtatagagaggtcaattataaagcaaatccattgtgaggcagacgcagcagatggaacagcaggtaggagcatatttccacccctgatgaagtgggcctggtggtgtgttcctagtcctctcctatagggctgaggcaagtaaatggcacatacaaccttgtcccttcacctgtcaacagaaagaaatcaatgtatcttgccacttcattaaggcttcccatggagaaatgtttacaaaatcaaagtaatatggtgaaattaaattagaaacctgtaacattttgtcatgaagttagcatgaaacagaagctaaccagaaaagattaaaagcagtgattaattcttttttaaaggaaagtccaaaggttctggctaaactgactttaaactaagaatcggggagctcattgctttcgctgctgcggccacagccatgagtatgctcaggtttcagatgaggctcgcctttagtgtcctctgctgtggcaagaagaaggtctggttggaccccaataagaccaatgaaatcgccaatgccaacttccatcagcagatccagaagctgatcaaagatgggctgatcatctacaaacctgtgactttccattcccgggcttgatgccgggaaaacaccttggcccgctggaagggcaggcacatgggcataagtaagcgaaagggtacagccaatgcccaaatgccagggaacgtaacttggatgaggagaatgcggattctgtgctggctgctgagaagatactgtgaatctaagaagattgatcaccacacatatcacagcctgtacctgaaggtgaaggggaatgtgttcaaaaacaagtggattctcatggaacacatcctcaagctgaaggcagacaaggcccacaagaagctgcaggctgaccaggctaaggcccgcaggtctaagaccaaggaagcacgcaagcaccatgaagaccgcctacaggccaaggaggagatcatcaagactttgtctaaggaggaagagaccgagaagtgaaagctccccctttgtctgtacatactggcctcagcgattacgtagatcaaccactaaaataaaacaagcctttacctgccataaataaataaataagctaagaatgggggctaggtgtggtggctcaatcctgcaatcccagcactttgaggcagggggattattgagccccagagtttcagaccagcctggacaacatggtgaaaccccatctctaccaacaaaaacacaaaaattggccaggtatggtggcatgcacctgtagtcccagctacttgggaggttgatatggaaggatggcttgagcccaggagatggaagtagcagtgagccatgatcactccactaccctccagcctgggcaacagagcaagaccttgtctcaaaac

SEQ ID NO: 2262 - DNA, 6000 bp, Homo sapiens
atattttcttccaagaaactgatactcattcagcaaattttgatgatgtcatttgacatctcaccaggtgtcaaaagaaggttttcggacaacaaccaggactgatattcctttctcaaatggtggcaaaattgatctgttagttgaacactgagagactacacttggccagtatgctactaggagaaacaaccaagtatgtacatttgcaggcaatgtgaaatacattactactgctacctggctgatagcaattgttaatataccatcaactctaagaggaatcccaatcagagacatcaaaatgttgggaggaaaggcacatctcatgattaattcatattatgcaaaaacagaagatcccatttgggactggggtttgtcttcactgttctatcatagatgaatcactaagatacatatctacatataaaatcaattaattttctaaagatcattatctgttcttagtaattaacaaggtttattttgattttgattttcaaaacaacatataaatatggacaaggcatctactataagcttaagattttctggctcaatggatgatcttttgcagaactgtctggtttgggcaaggtaattccaaacatgctttttccccacctaggttccaggcagtattcttaaaagatgcttgtttgatcagctggattttggacttgcaaattctccctaatttaatacgtagttactataaatcaaaactaaaagaagggtaactgtaattcaggatagtcttccatcactcccaggctctttttttttttttttttaagagccaaagcctcgttctgttacccaggctggagtgcagtggtgtgatcatagctcactgcagccacagactcctggactcaatcgatcctcctgccctagcctcctgaatagctgggactacaggtgcatgccaccacgcccagctaattttattttttgtagagatgaggtcttgctatttggcccagggtggtcttgaacccccaccctcaagtgtttacaagcatgagccactgtgccaggccaaggctcttttttaggtagcaactggcaggccacttttgattagatctaaatgatctaaaaaaaattaaaaactaatcaaacaaaaaacttttagggcctggtacagtggctcacatctgtaatcccagcactaaggccaggagttcaagactagcctggccaacatagtgaaaacctgtctttacaaaaaaaaaattttctttttttttttttttttttttgagacggagtctcgcacggttgcccgggctggagtgcaacggtacaatttcggctcactgcaacccccgcctcccgggttcaagtgattctcctgcctcagcttcccgagtagctgggattacagacgtccaccaccacgcccggctaattttttgtatttttaggagagacggggtttcactatgttggccaggtcggtctcaaactcctgacctcgtgattcacctgcctcgtcctcccaaagtgctgagattacaggcatgagccaccacgcccagtcttctacaaaaaatttttagattagttgggctacttgggaggctgaggaagcagaatcacttgaacccgggaggtggaggttgcagtgagccaagatcatgccactgcactctagcctaggcgacaagagcgaaactccatctccaaaaaataaaaataaaataaaataaaattagctgagcttggtggcgtgtgcccaggagtttgaggtttcagagctatggctgtgccactgcaatccaacctacgtgacagtgagactctgtctcaaaaaaaaaacaaaaaacttaccatgagctttaaaagtcttcatattctttgctgctctgcttcttggactctattctagataaaatagttcaaactgagaagaaaatttatgctccaaagcattaatctcagccctatttataaaagcaaaactttgggaaaactctaaaagtccagcaaagggttgtgaaatcagttaaggaaatgtgtggtcttcaaatgtttttatttggaatgtaaaaacatgtgaagatacttaagtgataatgttaagttaaaagcaggataaagatcattatgcacaatataatctcaattccattaaaacatgtagaagaaaaaaaaaacagtagaataaagaaagcaaactgttaataaggttttgctgggtaaccaacaggtaattgtgtgttattcttttctggaccttccaatttttctgaaggaagcaactattatttctttttaatcagggtcaaaaataaaaacatgtcattaagacacaacagctgaggttcagagaagttgaatgatttgccctaaagcagaaggtagtaaagtggcagtgatgactaaaaacctcgtcaaccctagatccaaggctttgcattctgccacaggttcgacctaagaatcacctccaagtatgtacacttcctaaatcccagttgtaccaattaattttcccaagtaaattttacctagttcaaatttattgcctttcaacattgaagggatatcaatgtgtctacttcattaaaaattagctggcacaggccaggcgcagtggctcacacctgtaatcccagcactttgagaggccaaggcgggcagatcacctgaggtcaggagttcgagaccagcctggccaacatggcaaaaccccgtctctacaaaaagtacaaaaactaggtgggcgtggtggcacacgtctgtaatcccagctactcaggaggctgaggcatgagaatcacttgaacccgggaggcagaggttgcagtgagccaagattgcaacattgcactccagcctgggcaacaagagcaaaaccccgtctcaggaaaaaaaaaaaaaaaaaaaaaaaaaaaagctggcacagtggcacacgcctgtattcccagctgctagggaggctgaggcaggaggatcacttcagcataggtgttccaggacacagtgcactacgatagtgtctgtgaacagccattgctctccagactgggaaacatagcaagatccccatctcaaaaaacaaacaaatatattgtaaaacggacactagtatgatgcatgcttgtaaagaaaaaaaaaaaccacaattcttaagttgtaaactaatctggcaaaaacctcaagacattagatgagtcaagagtttatctctgcctcacaagtcatttccagggcagtgtgcaatccattctgagccgtttatagtctttatgggctattaaaaaaaaaagccaagtaagagaagaaaggtaaggcaacctgttgaatcttacataataaaaagtaaaatgacaaagtacacctgaccaattccacaaactttttgcaaatcatctgaaacaaatacagtttataactttatatggagaaatcatcaagaaaaaaattgaaccgagtatactggcagtcaagataaaccaaatgtgagtttctctttttgtcactatcagctgttaagagtacattagcagcaggcaactggcctgtgaagataactttcagaataaaaaagaacaaatcaattctacaatcagagccccatttcaacttggcaattaacattggcacaaaatccatggcagaagtgccatccaggaaaaggagatctagacctcttctgcttttcttctttgggggccatgttcaactgtaaagacacacgaaatggtgcaactgcatttctaaatcagcaacaattcagaaatgtttcattctaaatagtgtccaaccagcaacaccgtcttaaaccgtttaaattatcgtgtaaaacggcttagagatgaagttttccctatgcaagttacagcccctgccaacattttaaaaaatatagctgctttcattctgcagtactgaaaacatattaaatggttacattttccaaaactgtcttaagctagagcaaccacatcagcatcattccgacgcacagaacacagggcttttattttgatgagtttattaaggccaagtctgcagggagcagcgcagcagtcgcggagcggcgaaggcaccgtccatccctcgccgtgcacagctcgagtgacagcgaccacagtcacggccgcgacacgggcacattcggcggggagagcggtcttgggctccgggacccgtcacgggctttgccattagggctccacacacaaccttacagcctctcccaaagaaaaacgatccatttccttccttagcttgctgagcctcggaaatcattaaataagactatcggggtttctctcccttctgcaatttttctgaagaggttctcagggagaaaattccaggatcgagatttggcacctcacatcaccgcgataaaaacggcgcctttcgtcaaataaaaaggacccgcgcgcgtacgtgaccgcccggcccacgagcaccagcggctcggtctccgcctgcggccctcggcccagccgagcaggcccacgcgggccttgggcggcgggcccagcctccacaactccgggcgcggcctgcgacgggcggtgacctagggcggcggcggcccccacctgggccggggcgggcacctgcgggagccgcggaggcgccagacctggggtcggccagctgggctctccctcgtcgcccaccagctcccgcgcctcacctgcgggctgtcctccagcgtctcctcgatgggcagcttgtcgatccccggcatcgtggcggagggagggcggtggcaggagacgcagctgccgcccacagctccccgcgccggcccgcccgccgcagctgaccccggcccgccctctccggcaagggctgcagccgtccccgcccgcacagccttctccaggcgccgagcggccgtgcgggaaatcccgccccctcggcctccctgccccgcctcccggcgcgtccattggctcccggggacgcccatccgcgctgcggcggtggtcgggaggttcccgtgcggcgctaggctctcccgcgagcgcgggcgtcggaagcggcggaggtggcagtgtctgccctgggatggccttccctgcacgcgcgcgtttgtatctaaatcgcaggggaccgtctcttcctcagcttgccggcgcgaggagccagagcctcgagttagggccacacgggggaatttggggcgggttgacttttcccgcaacatattttgtcagagaccttggagaaagtcctactgctggcgccttttagtttcctcagatgataacattcccaactccgctcgaagcgtccagtcttaatcccctccagcagaatggtgctgactaactcagatgtctgagatccgcagctgtgtcaataatagggctttctggcaaacttgtgaacgtaggctcgaaattgtttttctggacgcttgaatatcagtatattcagttgaaaacatgtgattttgttgccagtttatcagttcctacctggcctcccgaggtcagtccttcaggactgacgctgcaactccaactcccatgtttcttttaaatcacaaaggaaaatatcttttaaaaatcaggatacactgattaattatgttagtaactaattggcatttgttgaatcaaaaagttttggaagcgttaaatagttttagcctctaattttacaataaagtgaagctcaaagttgggaatttgaccggatgagggctacaagcctatcctttcctcctccctcttcatctttcccaacctgtcaccctggctcgtttatgtctctgtatagttgtaggctttcatcattatacagagaaaataacaaagtaagtagtgtcttctaaacatctagccattaattccaccaatccattccattttcattcaagaaataccagagatgctgagtaaagattaattagctgcctggttccacagatacatgggaacaaatccagaatagtagtagctcaaatccaaatatagtaacaaatagaagttatatattttaaacgaaaatagtaga

SEQ ID NO: 2263 - DNA, 6000 bp, Homo sapiens
tagcatcaggattctctaaggtaatgagcccaatcttctgatttaaaaaatattagtttttaaaaaaatatgatagagacaaaaaagcttccttaaatgtattaaaatattttaatatttaatagttgataatgaaaaagataatttttactgaatgcttattgcgctaggagctactctaaaagctcattaatcatcttaacaatactattaatgtaagttctctagtattaagctccatttttcagatggcagaatggagaaacagagaagttaaataaccttacttaagtcacagagctactaaacagtggagccagaatttaaatcacagcccaagcttattagctcataaccatgttctcatctacctctccacagaagggctatgatgctattttgtgttaaagttcttggcctgctcagacaaattaattaatgtgttcttctaaaaaggaatcaaggcaaccatagataaacaaaagcatatacaattttcctagaagtttttttttttctttttaccatcaagaaagttgaagctgcagaattgtcccacattctaaggatgctgtggcaatgagtaaaagtgacatcaaggtcaaggtcaaaggcagaagctagtttgcagtggcacaatgaagaaccaaccagttggtccttagtgccctcccacctctttttgcaacccattcctcagaactttttgttttaccctccaattgtccaaagcttccccctactctgctactggctctaatgttttaaaatagattaaatgactgaagttcccaaattatcaattttcttgaaatctgctctttcctgaatctgctttatctcagctggtattaagaaaataatgaattatctgttaaagttagtcctattaaggagtgatttactaggtaacaaccagaattttttgcattatacattacactctttaaaaggagtatgaatttcccagaattttagattgatggagtcttttagagaatatttgtgagtaggtggtttccagctcgttagcctggaaatcatgtcctcaccatccttagctggaatctaggattccttttctaaatgtttgcttgactctttattttttgttaatttttgttttaatttagactgagtctcgctttgtcacccaggttggagtgcagtggtgtgatttcggctcactgcaacctccgcctcccaagttcaagcgattctcctgcctcagcctcccgagtagctgggataataggaacctgccaccacatccagctaatttttgcagagacggggtttcactatgttgcccagcctggtcttgaactcttgacctcaggtgatccacccgcctcggcctcccgaagtgctgggattacaggcatgagccactgcaccaggccaattttttaaaattttaatttaatttaatttttttttgtagagatggtgtctctgtgttgcccaggctagtctcaaactccagagcttaagcaatccttccaccttgacctcccaaagtgctaggattacaagcatgagctactgtgcccacctgactctttaaaaattttttttaaatacaaagtgatttaggaaagggaaatgatcattctccatcttggatagagtttttcctcatgtggtttgtggattacccacttcagacttaactggagagattcccagccctgactctgacctactacaccaaaatcttccagcagggctcaggaatctgtatgctaacaaccttcccagataacttttatgtgtgcattaagtttggaaaccactgacctaaagggataatttttaaaagtaaagcaccagcatcacttgggttattggattctttcctattacagatcacagaccagaacttcaaggagtatcatgtaaaaacctaattataagaccaaatataattttaggagactaataattaacaactctatttacaagactgtacgtccttttgttgtaaattatacgtgtgaaatgtctcaaggtatatatgtgaaacatctcaaagaaatctttagtggatgttgtttaatcctgacttgctttccataaaattaaccagttgcccaaagtttttactctactacccacacgagtcgccagtaacccctaaggcattctctgaacaagcctcatttcctgtatgaaagaaaactggcttaaaatgaactgagtttggttaactgcacaaaacgtaggctgaataaacttaaagtggttatcaaaaaggactatgaattttgcagctttggagatgttttaacttaggaaatacaaccatatttttggatgagcagggtatacagtggcctaaagctagagaatccaaatggaaggttaaaactggattctagtacaaataggttaaaactagatttgactaaacctacctctccatccaactgaatgtgaacctgtttttgtttgttttattttttcatttttatttattttttgtttttgagacagagtttcgctctgtcgcccaggctggagtgcagtttcggctcactgcaacctccacctcccgggttcaagcgattctcctgcctcagcttcccaaagagctggaactacaggcgtgtgccaccatgcccagctaatttttgtatttttggtagagacggggtttcaccagttggccaggatggtctccatctcttgacctcttgatccgcctgcctcagcctcccaaagtgctgggattacaggcgtgagccccaccgcgcccagcctgttttattttttaaccagctgagtccggcaagaattccttgccattctgcgataatgtaatggcctcttgagagtcctttacagaaacacagtttagatgtacataacatactaagaaggaaaccatttaacttgacaataccacacccagataattcagataactaatcgaatttttcatcggaattatttggtttggccaagttaattaggtaacaaatacttttcttttcttttctttttttttttttttttgatacgtagtcttgctctgtcgcccaggccggagcgcagtggtatgatctcagctcactgcacctgggcctcccggcttcaactgagtctcctgcctcagccgcctgagtagctgggactacaggcacgccaccacgcccggctaatttttgtattgttagtagagactgggtttcgccatgttgggcaggctggtcttgaactcctgacctcaggtgatccagctgccacggcctcccaaattgctgggattacaggcgtgagccacagcgccaggcctttttttttttctttcttatacattgtttacactcctcacttactcctgattcttaacagttgccacaacctttcttcatttaaaatctaactcagttcaatcaggaaggtcacttaccttgaaagtcttccttctttagagctggggtgcatggtgttcttgttggcagagtagaaatgagatatcaaggaaaaagaaactgtaacacaactgggaacccttaactcattgtaagaactgcctccaaatcaacttcctcaaaaactaaagaactcttcgggagagagagactggctgataaacaatctaaggggaaaacttttaaagattgtaacactaaaaataattccgtaaaactacaatgcaagtctactcaacaaaactttaaaaatataattttatttttctttcaagagatcatgggaaaatctactattttcgtttaaaatatataacttctatttgttactatatttggatttgagctactactattctggatttgttcccatgtatctgtggaaccaggcagctaattaatctttactcagcatctctggtatttcttgaatgaaaatggaatggattggtggaattaatggctagatgtttagaagacactacttactttgttattttctctgtataatgatgaaagcctacaactatacagagacataaacgagccagggtgacaggttgggaaagatgaagagggaggaggaaaggataggcttgtagccctcatccggtcaaattcccaactttgagcttcactttattgtaaaattagaggctaaaactatttaacgcttccaaaactttttgattcaacaaatgccaattagttactaacataattaatcagtgtatcctgatttttaaaagatattttcctttgtgatttaaaagaaacatgggagttggagttgcagcgtcagtcctgaaggactgacctcgggaggccaggtaggaactgataaactggcaacaaaatcacatgttttcaactgaatatactgatattcaagcgtccagaaaaacaatttcgagcctacgttcacaagtttgccagaaagccctattattgacacagctgcggatctcagacatctgagttagtcagcaccattctgctggaggggattaagactggacgcttcgagcggagttgggaatgttatcatctgaggaaactaaaaggcgccagcagtaggactttctccaaggtctctgacaaaatatgttgcgggaaaagtcaacccgccccaaattcccccgtgtggccctaactcgaggctctggctcctcgcgccggcaagctgaggaagagacggtcccctgcgatttagatacaaacgcgcgcgtgcagggaaggccatcccagggcagacactgccacctccgccgcttccgacgcccgcgctcgcgggagagcctagcgccgcacgggaacctcccgaccaccgccgcagcgcggatgggcgtccccgggagccaatggacgcgccgggaggcggggcagggaggccgagggggcgggatttcccgcacggccgctcggcgcctggagaaggctgtgcgggcggggacggctgcagcccttgccggagagggcgggccggggtcagctgcggcgggcgggccggcgcggggagctgtgggcggcagctgcgtctcctgccaccgccctccctccgccacgatgccggggatcgacaagctgcccatcgaggagacgctggaggacagcccgcaggtgaggcgcgggagctggtgggcgacgagggagagcccagctggccgaccccaggtctggcgcctccgcggctcccgcaggtgcccgccccggcccaggtgggggccgccgccgccctaggtcaccgcccgtcgcaggccgcgcccggagttgtggaggctgggcccgccgcccaaggcccgcgtgggcctgctcggctgggccgagggccgcaggcggagaccgagccgctggtgctcgtgggccgggcggtcacgtacgcgcgcgggtcctttttatttgacgaaaggcgccgtttttatcgcggtgatgtgaggtgccaaatctcgatcctggaattttctccctgagaacctcttcagaaaaattgcagaagggagagaaaccccgatagtcttatttaatgatttccgaggctcagcaagctaaggaaggaaatggatcgtttttctttgggagaggctgtaaggttgtgtgtggagccctaatggcaaagcccgtgacgggtcccggagcccaagaccgctctccccgccgaatgtgcccgtgtcgcggccgtgactgtggtcgctgtcactcgagctgtgcacggcgagggatggacggtgccttcgccgctccgcgactgctgcgctgctccctgcagacttggccttaataaactcatcaaaataaaagccctgtgttctgtgcgtcggaatgatgctgatgtggttgctctagcttaagacagttttggaaaatgtaaccatttaatatgttttcagtactgcagaatgaaagcagctatattttttaaaatgttggcaggggctgtaacttgcatagggaaaacttcatctctaagccgttttacacgataatttaaacggtttaagacggtgttgctggttggacactatttagaatgaaacatttctgaattgttgctgatttagaaatg

SEQ ID NO: 2264 - DNA, 6000 bp, Homo sapiens
cacttatcctgccagcagcactgtagagccaacagaattgcctgtatacaaatgagacaactgaaactcaaaagataaacaacttgtccaaggtcatttgatatataaaccattttggcctgtagggcacaggagagaacacttagaagactttggagatgtatcttctgacctcccctataattgtgtttctggctattaaagaatactgtatatgaggttctgaaatgacaacaagtggcattcaacttgtagcaaactggtagaaactttctgggagaacattccggaggaaaaaaataacattagaatttgctttggctctgaagcactgcagataaaaatccctactgtcaggaaagcaatattaaacatcttggaatatatacacatgcatcagttagtgatgctttaatttatatatagatgcttcagtgaaaagggaagatataatgtaagtgtagaatgatgtcatatggaaaaaaacccaagcaaaggatgtagtagggcctttggaagaacctagacctcaaaaaatcagaggcacctggacagaatgatctgctcttggtaatcttctctctgcttgtctgtacccgtcttttatctctgaagatctttgtctctgtctagtttataaggaattcttcatcccttgagttaatacattgtaaaatctagaccactctcttttgttcctgttttgagtgtgtgaggaaggaattctggcccagctaggatcacttgcctaagtctgttgtcatattacacaaacatggcgacagggagccagtccctagaagtggcaaaccaattccagagaaggtgtttggcatataactcaaaagacagtgcctccaacatatagaaaagaagacatggtctctgcctttggcctctagggagaatgataacagaagatgcctgaagtaacagcaagatcataacatctaacccatccctgattctaagagtgtgaaaaagaaaaaaaaaagtcactatcaatgtagaaagccaaggaagacttacaaatgccttgtttcattgaatttcaatttcagtctctttaaaacagctgttgtgattttatattcacagcagttttaaggaaattatgtagatgatatggtaggaaccaaacacctatatgctgagtctaaagtcctcagcgtgtttactcgtatcattttctctgtctcatctttttatattccctggcatagattttatcctccagcaataatgggatataatacccaataaatatattaataaagaaatgtgatgccatctctccttcatgtacattatttgttttaattacaattttagcttatataattatgtttttccacctagatcctaaacttcatgaattcctcacacatagcgtagggtctggcccaaagtggatgcctattatatgtgtagagtgaacgaatgagtgattgcttgacaatagcacctctgtaaagcttaggttggaactggggaaatggattaacaaaagtgtttcagcactgttaagactccaccttgatttattcctttttattgttgtaacttacaatggtaatatttgcttactctaaataaattcaaagactacaaaagaatgtaaagcaaaaaatcagagtaatcttttcttcctactcctgattccattttccagaggttacccctctgaacctttcagtattatcctttctgagacttatgaatccttatacaacattatgtatgtacgtatagaggatcatattttgttaaaaaaagtgatattgctataaaaagtgtgattttttccccacttaatatgtggtggtcatctttcttgtcaatacataaacgtgccagttatcacagaagagaataccaaagggtgaatttgatgctgaggcaatagcttaatagcactatagcagagcatggccttgttattattagcagctccctaaattttgtctgaggatgatttgagctggggttggcaaacaagagcctgcaggctaaatttggcccactatttgtttttgtaaataaagtttcactggaacacagccacacccatttgtttatatattatatatgactgctttaatgctgtaatggcagagttgagttgttgcaatagaggccatacatactgaaaagcataaaatatgtactctccagacattagagaaaaggtttgagggaccagtctatctctgtcttcttggcctagtcaggacccaatatcaaagaccgcacagtatgctcatggattggaagaatcagtatcattaatatggcaatgttgcccaaagcaatatacaggttttcagtggtattcctatcaaactaccaatgtcatttttcacggaattagaaaagactattcacatggaaccaaaaaggagcccgagtagccaaagcaatcctaagcaaaaagaagacagccagaggtatcatgttatctgacttcaaactgtactataaggctacattaaccaaaacagcatggtactggcgtgaaaacagacaaagaccaatggaacagaataaaaaacccagaaataaaacctcacacctccaactgcctgatcttgacaaagtcaacaaattaagcaatggaaaaaggacaccctattgttattgctgggatagctggctaactatatgcacaagaaagaaactggacccctacctttcaccatatacaaaaattacctcaaaattgactaaatatttaaatgtaagaccttaaactataaaaatcctagaagaaaagttaggaaatgtctttctggacatcagccttgggaaataatttatgacaaagtcttcaaaagcaatgtaacataaacacaatttaacaagtagggcctaatcgaagagcttgagcacagcaaaagaaactaccaacagagaaacagacaacctacaggatgggagaaaatatttgcaaactatgcatctgacaaaggtctaatacccagaatctatatggaacttcaacaattcaacaagcaaaaaacagccctattacaaagtggacaaaatacatgaacagacacttctcaaaacaacacatacaagcagcaaacaaacatgaaaaaatgctcaacctcactaatcatcagagaaatacaaatccaaaccacggtgagagaccatttcacaccattcagaatagttattaataaaaagccaaaaagacacagatgctggtgaaaccgtggagaaagggggatgcttatacactgttggtgggaatgtaaattagtttagcctctgtggaaagcagttgggaggtttttcagtgaacttaaaacagagctactgttcaacccagtaattccattactggatatatattcaaaagaaaagaaactgttccaccaaactgatacatctacctgtatgtttattgtagcactatttacaatagcaaagacatgaaatcaacttaggtgcccatcaatggtggattagataaaggaaatacggtacacatacacagtggaatactacatggccataaaaaaagaatgaaatcatgtctgttgcagcaccatgaatgcagctgcaggtcattatcctaagcaaattaacacaggaacagaaaaccaaatactacatgttctctcttataagtgagagttaaacagacaaacatggtacacatggacatgaaaatggcagccataaacactggggactagtgggagggaaggagggggtcaaggattgaaaaagagctattgggtactatgctcactacctgggtgatggtattaatcataccccaaacatgagcatcatgcaatatacctatggaacaaacccacatgtgcaccccgaaatcaaaaataaaagttgaaattacaaaaacagataagtagacaatgcagtgaactcatcgagtttgtagaacaaaaaaaaaaatcacttaacgtttgtggttattgtacttcctctttcttttggcaagtttatcacaggtggattcaagtaactgaaaaagaaacaggaaaagatgcctggcatgcatggctgttattcctggcactctctctgattagggtcctgtatatatctctcaaaacacacacacatattcacacaccccacagatctataataaactaggggttttccttattatcggatagttaataaaccgcagcataattaaataagagcctacatttattattgtcattcagtaagcagcatatagttttggatttcctggttggagtccatccatagttaataattgggtaggatatgctggtatctcaatcaggatatgaatgattagccaatagttccttgaacagaaccttattactaatgaggagcagtagattgagttgagttttaaggaacttcaggatcactctgttttccttggtgggagaggagggagtgtgatacagagaagtaagtggatcaggctgcatggggttgtggtgacaaggctttgaagacacccatttatactgttggtcaagtaaacagtaaaatagcacccttggatttagggagtggtctgatcttaaattttaatatgcagaaccaccccccaaaacgtatataaaatgcaaatcttagagtcccagccacagacattcaggctcaccagacctgggtcagagcccaggaatctgcattttaaataaccccctcaggtgattctaatgggaacattcctgcaccaaacttggagaagcactgcattcctctaagatttgtctacctcattccatctccctgtctatttctctctctttgctttctcttgcctggtctctatcccttcctttcattacatgtcatgtaccttgatagagatagatgcctgcactcccatgtctagaggtacatggttgccaatgaatgcaaaactcagaaaggagactagaactctagccctctctttcactcctcctctttcctggcaaggtcacaagaacagtcatctatttcatccaagtgtttgcatctaacacaatcactgcattcagttttgagatttgtcatcaaacaaactgcacccttggtaagtaataccattgccctcctgagctgtggtgctattttcttcttttgcactcccttctttgtaaatgctcttacagggttgctaatcctcacctatttcttctttctcggggactttatgaattcaaacaggctcagacagactggcaatttcgtgcagtctccagccagacctgttttattcttcatgtcttagtaccttgctcagaatttattgtataaagaagtgcttagtaaatgtttggtgaataaagaatgaaaaaataatcagtgcctggatgaaatgaagcaaggcagagtaaatctcagaaaatttacttgcagctaagtagggctacgaggctctaatatgcaaatattttatttacttgaaactgggactgtccatctaaaactggttgatggctagactcctgatttgaaagctatttctattaaatctgaacttgtgtctggcagctttctcctatcctagcagaggttctcccacccccatacacaagcacaaccctgaatcgcaagcattgtcaaaggtagtgtattttctgttttttcagttttctaaaatcagagaaggtatttcaggaaagtgatttctaacagataggtactctatcaggtaaattttgatcctccttgaccttcattatttttcttttggctgtatccacattttgactgtcaagtaatgggacattacacggaaatagaaaagatatttttttctcctttcaaaattacttatttgtaaattaacccagattgagttttcaacattctacatcattaaagtaatgacagtaaatgatagtttataatatttacaacatattggagtagaaaaaaaatctatcattagcacatctttactgtacctttttaatagtgtaatatcatttgacattctgggcattatttttttcagatctgatgaacaataagaatgca

SEQ ID NO: 2265 - DNA, 6000 bp, Homo sapiens
caaattaagctatttattttatagttacaaggctttcaattacttttacagcaaactagggagttacctaggaaaccctcatgagctggttcttgagactcttctggtttctttcactgctatcctacttccaatttaggttgtagactgattcgtttacctgcctgaactctggtgcttgccatgtactgttgcctctgcccagaacccctgtctctccttcactataggtggcagaatccactcattctggcattggcattggctcatatggggaatcacattgatttgctcatctgtttacatgcttacagtattcactaccgtaccactccagagactgtgtcttattcacttgtgaattacagcctctaacacaatggctcgcagagtaaccctcaatatataaaacacggaactgaattgaaactgcactctcctctactatattttttagtttttagaaaatgcttttaatgggtcttatcttctagaatgatgaaatgtctttaaagctgcagtgaaaccagggcaataagtttagagccataatttcttgaaagagagtgatgaaaaatcatcgcttaattctgagccaccctactgagatcacagcttggacactgagcttagttttatgcaccttatgttctaggtaactggaagatgattgcaaaagatggcactaagaaggattaagtgtgattatttatgaggcacagttaaaagcagacagcatgcatatgttcacaagctatagggaatagacagatctctaaatatctgatgaacaaatctacccaaggaatacatttaacacagaacaacaaagggagaaataagatgacagaaaaaaaaaacataggtgaaaaatttagaaaattttcagcacatcataagatggctcttactggcaaccagaattctccaatggtagccaaaaagcttaatgatcacaggttaagaaatgtgtgaagcagactagagcatttgggtacgactgagtttcccaaactttctatactttgtattacaaaaataatgcattgtttctccttttttctaatataatatttttgtattagatattattttttcaaataaatttgtaataaattacaaataaataaagattcttgtctgaaggtctgaattatgacctgtaacatatggctaagatgaattatgcagagggttgaactctttgacctctacggactttttagttttgaaattctgtttccatggtaaagatttccttgtaggccatgtgtgcttgaagaggatgctgttggaagtgtttgactaaagccagagaacattatgtgacctccagtttttctacacacaaggatggccccaagcttcgtgataatggggggttatggtgtagttaccagtgcctcttacctttatgatttagttgaatgatacaaatggtacaaatgtcaggctcttctagtacttaccctgtttactttttgtagccataatatagtcatttgttaaccacatatttattgagtgctgactaatgaataacacaaaaataaagtttgttttttttttttttttgagatggagtctcgctctgtcacttgggctggagtgcagtggcacaatcttggctcactgcagcctctgcctcccaggctcaagtgattccttgcctcagcctcccaagtagctgggactacaggtgtgagccaccatgcctggctaatttttgtatttttggtagagatgggttttcaccatgttggccaggctggtttcaaactcctgacctcgtgatctgcccacctcggcctcccaaagtgctgggattacaggcatgagccaccgtgcctggcctgaaaacaaagttcttaccttcatggagtttaccttttgtttgaaggagacagatgataaacaaaaggacaaataaatgtgggtataatttcaagtaaagatatttgctatgaagaagtactataatggcacaatccacagaagtctttcacaaaattgtcttctgggtctaaaagtcacccagatcttgatgctaccttcttaaaatatccacaccctttactcatgtttcaagaccataaaatgaaaaacacaatgtttttaacacgtttctttaaatgtccttttccccttttcttaatcttctttctccttgcactaccatgccccaaagctcccaaagcaccctccttaaatgcccaaagagttcctattccccagtgtaaatgaggcttctgctattgtttggtttgtatgtcttagtgaggatttagaaagtacaatctatcttaattgttgatgagtgatagaaggtggtaggctgcttgggctttttgtatttatctacttagtttctgacttattcttattctgttagtttcagtgacatgagcttgtggtaaaccaaagccacctgtagcagatattattggtgccccgccagtatgctatattcccttactatttcagcgtataccaatgtgactcttaattcttctatctctggctttctgtggccactgaggcaactctgtctactcttggagcattgcagacaagccagggtcttaataatccctgaaagctgcccccaatcattgactgacggtagttggtgtttaaacaacccagttatcttgtcctcttggtggaatcactcagtctaaggtacatgttccatattgtttcccagagatttctaggaggattaagttctgggtgcctctagcggtaatgtgctagataaggcatctttttggtcttctcttccctatttcactttcttagtctcttactggtgtttcctgcgataacctcctaaataaaatacttgctcttgaatacctgtctccagatctgcttctgggagaacccatactaaggtggttattaattcagtcaagttgcagatcagacagtaacctcccactgattgtcttggcacttgaaggtcctgaatccaatgcaagttctatgtcttcatgctctttgtgaatgtatctgttgctcaaggtcgtgggtgaccttgagcccagcagtcagcattatccacagctgaagtaatacctatgtgctcatattaggctatctgacaacagtgcaataatcattagacaccactgtttagaccctgagtatgttcatgacatttgccttttgactgctaagtagaagatgtaatgattataggctgatgctttctcaggaggaggaaagttattgagctttacagtttcaaatgcttctgattttcttccacgtttagtctggctgctgacacatgtgttgaaatctctcatgtcgatcagcttgagaatagctgggactgctgagctaagtctgtgctcataaaagcaacaaagaattgtattacaggaaatgaccccaaattgacagaagattaggctaggaagcctgaacaggtgttttaatctctatgcacaaaatcagtctgtacatatattgctcacattcctgctgttttaactatattttttttttcaatttcactttgttattcacaatttgataatattttatgtggccatggtgtctgtgtgatgaactataatccaatgtgacattctctgagagtcaagcttccaaggacatcagattttcacaccaggacactttgtaggacaccttgctactctccatgggattcaaatattagaaataatgagagatctaagacttgatgtaattgcctgcatgtaatgaatcaggccaaataaaaaagtgagagacagagaaaggaaatggtgctaaggaaaatggggacctatcttagtgtttgtctgagagaaaactgctctttgtttttcccgatgtaatggcaagagtctgcagccaggaatctagtccttgcttaggagctgcatgaccttgtgaaaattacgtaggtgttctgcaatttgtaattgcatttattgtaaaattaattttacttttcatacgtcactagacagagcattttgaggttaggaattgggtctgaatcaatgatttctccagcacccacatggcatttggcacagaatacatcaataatgattttggattaaacaggggaacaagcacaaggaaccatggtggtcagaaacgggttgatctgcaccagagaaagggagactaggggagaaaggtcactctagatttcgttcaattattgaaaatacggtgtatttactatgtgctgggcacttttctaggtgctagaaagactacagtgaccaaaacaaaaatccacatctgcagggatcttgcattctagtgagaaagtaagatggtaaaaaagataaatacgtaaattttatacaatgcttcgtaacgacaaatgctaaggagaaaaacagcacagaaaagacagaaaggaaaagagaaggggcgcatgtggtgcaattttgttaggatgccagggagggctgagcgtagtcgtaaatgaccacattatttgatggatcaagccagggactgcaagtctgtgtttctgagagacacataaagaaaagaaggcttaaggaatccagaaagatccagagtggggaaatgaaacgaaaagaaatccagccagtgggaagtcgtgaagggatagttaaacgcgttttgggaggaaagaaaaaagcaaaagtgcggtacagcctttcgttacacgtgaaaagaatcatgtttctttttctagttagaaaaagccaaagattgtgcgatttatgccccaaacccccttgtaaggggattctcacctcaacttgtcttctgtggtcagtgtttcccgcccctgaatcagggttactgtcactatggctttcaattggcccggcgtaggcgcatgctctgcgcgtattggcctccgctcctgtccccagacaagcggccatcttgggtcccgcccctaccgtggggtcttctgggaattgcagtccccgctctgctctgtccggtcacaggactttttgccctctgttcccgggtccctcaggcggccacccagtgggcacactcccaggcggcgctccggccccgcgctccctccctctgcctttcattcccagctgtcaacatcctggaaggtaggggcggggaggcaagcccaagtggaatactgtttctggggcgcgggtctgggtttccacgcgcgtcaggtcatcaccccggagcccagtggggccggcgccgctcacggggcggtgggcttctgtcccgagtactcttccgccccacgagggtctcagggtggggactcgggccccccaattcccaagcaccgaccctagccctaacccgttcctcctccaccgtgtttatacattggggaaactgaggcacggggccacgccagcgggtccggggacgccacagctcttggctctgggggtgtagtcggcacccgccgttttgggatggttcgtcagtttcatagacaagtagcgaaaatccgtcccaacaggtctgtgttaaacacgcagctctggattcccctaaggggttgctgaacacgtgcccaggacaggagcaaaccggagtatagagaaggcagcattttgggagataattttacattactacttcaaaaacaggcaaagaggcatcgaatttattgttgtgggagaactcatcggtacttggtcggactttcttacacttattttatggttgttgtttttatttttagcgtcaaaggggggaattttaaaggtatatccaagttggtggtggtggggggtaaggaggcaggttagtggaacttgagatgcatctgcagatttctctgtaggctcacattctgccctcgctgtgttaccttggaacagccactcacagcgcttatctgggaaacaaggagctcaatgctcccaggtcaagtggccaaaggatgttgcctgaagccgaaatctaaattgaggttatgcttgtgaaagtttaccacttgcagatttactgctattattattctggtctctcagaaatgtgctgggaccaata

SEQ ID NO: 2266 - DNA, 6000 bp, Homo sapiens
gcttggccgcttgcagaattgccagggcaggcgctgagcgtggtcagagagcgtctctacatcccgggatcttgcaccccgaggcccctccgtgctcgccccggatcggtgtcccgggtagggggaccccacttaccccacaatggaaatcatcatggcagccaccaccaggtagttggtctggtaatagagcaggttgctcactacgcggttgttccatttggaaatgtccctgaagtccggccgggcaaagcgatcggaacccgggaagaaatcgtcccaggcgcggagtggggcgatattaacgtccatgttctcagctttgcgttcttcgcctccagaatctggcggcggcggcggcggcaaccgatcagctgagctgagttggagagttgacagcggctccgtctcggtcggctttgcggttggcagacagcagagcaaaggaaattgggagtgggcgggcgtgtttgctcctctttacttcttcattggctcttggttgggtacaggaaaacaggaacctccagacagaacaagggactgagtgcagaatagagacgaaatgacagaaagcaactagcggaaatcccctgtctgaagggaggtggcaatgccttctctagcagcagagaagctgcctccttcgaaataccttttttgaaggtttacctaggagtgtgttctctgacttagagaaaaattttggcagctgtgcagatgccaatctaagtgaaatgaaatggaaggcgactacagtgttaatggagaatgagctgcttttgaaaactaagtcttactaacctctacacatctgaatgcaattcccatgttttctctgtttcaccatgagtcactatgtgtgaaatcagattggcaaaacgggaaagaaggtcatgtagaacagaagggctggtctgtttttttcacttctcttctttgttctccacctctgttctctctaggctaaattgttggactgctatgccattctgataaagtaggcactctggccacttcagtcctgagctgggcatgttgcttacattttaaagcaaacagttgtctgcagtgaactagttgttctgcatccagcattttctgggcagaaatatgcattccacttcaaaagttttcttagttttattgcaatatttggtgacagctttcactgagggaccacaatatattcatagataacgtgatgttttgtatcccagcccaaagacctggcaaaagaagtattcgttgtcaattctcttctaagcttccaagggtcatcttttttcagttaaggggctgattggtacaatgcatgagaaaaaaagtagtttgtttaattgtataatgtaataggtagaattctaaggtgaagatttctaagataacagagtctctaagcccctaagtggcttagacaaggtgaattcactctactcagatcaccaatttttgaaaacttggaaagtaatgaaatatactaatgcaaagtctagaaaacataatttaattttccttattaattcagaagacagttaaggagcttacagcgactctaagaaattactactactactgttgtttaggaaaatttggtgattgcatggaattagtgctaagatatatcttatgtgctgctttttgaataaagtttaaaatgtgaaaatattcctgagtgctcatgttttcttgattctggaaaaatgggatggtgtgaagtcagagaaagcaaaattagagtcgcagctccttcctctctggcaggtgactttggagaaactacttaatctctcccagcctcggtgtcttcatgtgtaaagtggggataatggaacatctgccatatagacgaggctaagtgaaggaatgtataggaaatgcttagtgtataataaaggttcacagttatatgttactattattgttattagcaataggatagcccacgattcttgtttgctattaatagtgctttaatctgatttgttttctatgctttcattataaacatctactaacttttctctaccttgctccaactttattgttgtggatgtatctgggtagggggaaaaggttgagaatattcagtacaatgccagcaagtatttcgagttcttttgaggctctgtgaaagcactgtgggttttttttcttttcttttctttttttttttaaagaggagaaaaatgtaatcctgctctgccttcaaaacttctgcaatccagtggaaacactagttaaatatgagacagtaagaggagtgctaaatagagatgcactgagcctcagtgctcagttacaggaagtcagagggtgtggaggaattccccagggcttcagaatgtcaagaggcagcactgtgggcaagctgagtaaatcatcttggtcaagatgagagtgggaactccagtggggccccacactgttggtgagatttatgagtattagaagctgtaactaagaactttatcttccaactgctcagaactgcatgaccaaaagctgtcaagagtgtattagtaacaatatgattactccttgatcacaggcaattgatacccaagaaagaattaaacctctttagaggtttaaacataaataaataaattctgaaaagacagagaaagctgtttatagcatgattcccttctgtctccctcccaaaatgttaaccctgtctctctctttggggtatgggagattttttttttctctaaatatttctacctttgttaaattattttaaataaaaatgaacatgtaatgagtcattacttttttccagtaactgtttgaaatgctattagtagcagctctttgttagtgttcattccggggagggaggggtcagattcactgtagaggtctttctggagctttaatttattattatttttagagacagggtctcactatgttgcccaggctggttttaaactcctgggctcaaacagtcctcccacctcagcctcccaagtagccgggactacaggtgtgggaagccgagccctgcttgatggggcttttataatgggactggtgtgtctagataggaccattcagactatctgtctgtttaaaaaccatagcagatagtctaattgtttatgatatgttccatttgaagtaaaataaatctgttgaaggttttgcttgcatgtctctgttgctttcattcctggcaagggcagatggctatttctaatccgtcaatcaatctaagccagtgagagtgcctggtgtcgtttatcaaaataccaccatggtgagtcaggctgttagtctcaaagcaagcagatgcagggccagatacctttgcagacttcttcatcggctagctgtactctatccctaggcctcagtttcctcccctgtgaaatgggtgagactggactaggtggcctttaaggtgactgctgcttttcactatctgagagggttgcaatgctcactaccactaatcaaagggtatccagtattgttgggggttcaggctacaggagcccattttgataagcactgaggttaaatcctcagtgaaaccatctgtggagttgtctgggcaagaaaaagtagtttcatagttgacgctgagacatgtgatgcagaaggaggctggtatctcttgatagggactgtgaactctattcccacgctcactgcctggcattgactttcagctcagtgaatgctattgaactgaacctaattgggggaccataaaggacaagctttccttaaggttcactgaaaactaggacaagaggaggttaaatatcacagtgtagtaacagcagctacatttactgagtacccatcaggctttatgtactccatttcagtggccctcaaactttaccagtggagaatcaccccaggctttgcagaaggctgaagggtggggtggcgggggggcggtggggagcgtggtgggggcggtgaggggtgaaaatttgtgttaaaaaaaacttcccaagtgatgttgatcaggaactgtattttgagagccactctggattttacttaattatcagtcttacaaggtgaatagtgttatgcccactttataaatgaagaaatagaagtgtctaagggtttcgtagctcacaactgagaagaatttaaaatcagttacttttgattccaaatatcattcttgtcccactccatagaaggagatgtgtgtgtacgtgtatatacatacatttttgaacatgatcatttccctctatccagccatccagattcacagtgtatatttgtatttctgactctagaagaaaataattgaaacttttatcacaatttatctttaggtgataggattatgggtgttctcagttattctttgatttttgtgattgttttcctttatacttttttctttgtatctaaatatacacatttatctcaggaaaagttttaatcattttgtttccgctgaacttatctaacagaatgtgacatgaaaatattaatgctgatttgttcaaagaaaataataatctcccaccccaccaatgtaaacggatttagataaatttattattcaagtgagtacttataaaggcaaagactttggaaccatcctgaaaagcagaaagtgaaaatttccttgatctttgcccccagaggaaagctctggcatactgggagggttcttcacgaatttttcatagaatataccaatattttgtataattacgtattaacatatagtttgtgtaaacgcataatgtattgtctacattttcacgctgcagagcaacattatgcacggtataagattcacctaattaagcgtaggtaattaagattataattacagggcaagactttaaagcccatgggagcccagccgcagtcaacctcgcacctccctgccggttgtgtttctggcctcgcccctccccgcttcgccagccccgcccctccccgctttgccagtcccgctcctccccgccctgccgcgcgtgggcacctgggaagaggcggagaacaatatggcggatggcgaggagccgtaagtaccggggctctgcagacgcgccgggctgggctgggttgtgagagagcgcggcggtgggcggttgccgccgccacccggggtccccacaccccccgccccgtcccctcgcccccctcccctcgcggcgcccagtgtgtagcgcgatgctgacccttcttttattctctcttttagggagaagaaaagaaggagaatagaggagctgctggctgagaagttagtgctgccgggaggccggggccctctccggggacccccgcctccccccaccccaggcctaggggaccagccgcagcgggcccggggggctgggagggggacacccggagcgcaggccgcgctgcctcatcccctgatccccgccccgcagccccgggggcctggcgggccgctcccggtatctgcccggtgcgggcgtcggggccaggctgtactgccccagctcctgcaggggccctccggggtgcttgacgtaaaggtcttgaggaaggacccttgtgcactcctcttcctccatcccaaattgtcagagcagtgaccctgtgaaaaggcaatctaccttaaacacacaggaaaaggacacaagaccgttttgtggccttttgcaaacactgagacagtagtactaattgcaaacttttaatgataactctacatgtcaggtattgtactaagcactccagtcattttggcagaataattggctcttaaaagatctggaaagaggttgttgacttcaaacagcctatttatcccttttactacacaccctatttcttatcagatgcttaattctatgctggtgagacagatttaatcgaagtgttttctaacctggccagcgccacataatttactcccctccctgcctgggcagggaaaaaatactcttgcattggttatggtgagtttgtaaatttccgtgccgattcccagtagcagtgctttgatctttatgtgtgtccctc

SEQ ID NO: 2267 - DNA, 6000 bp, Homo sapiens
gactgagacagaagaactgcttgaagccaggaggcgggggttgcagtgagccgagactgtgccactatactccagcctgagtgacagagcaagactccgtctcaaaaaaaacaaaaacgaaaagaagggacgggactaggtgtggtggctcatacctgtactcccagtactttgggaggccaaggcaggtggatcccttgagtccaggagtttgagaccagcctgggcaacattgtgaaaccctgtctctacaaaacttagccagggatggtggtgttcacctttagtcccagctacttggcgggctaagccaggaggatcgtttgagcgtgtgatgtggaggttgcagtgagccaagatcatgtcattgcattccaggttgggtaacagagcaagaccctgtctcaaaagataaaaaaaagaatggacagagatataggagacagagtatgaacaatcttttcaaagtttctatatgaaggaaaataggaatgaggagctacaggaagatatgagatcaagagaagagtcttttactaagataggagacataaaagcatgtatgtatgatgttgggaatgtttcaatagtagaaagaaaaatcggatggaacaatagtgatgtgtgtaaacaaggacaggctccacttcataagtaacagaacacatagtatataggtataaatgcaggtaccacacctcagatatggttgagaatatatagaagttctgtttgattactattattttctcactgaaaataaaaagcaaaatcatcccaagtgggaggacgtaatggacatttttggagagccaacaaaacatgaaatagtataggaaagtgagtgaattagggcagtggttctcaaagtgtggttccccaacgagcagcatcagcattacttgggaactagttagaaatgcaaattttagggctccagccattgagtcaactgaatcagaaactggcaatggggcccagcaatctgttttaacatgtccttcaggtgattctgatgtacactgaaattgagaatagtctgaggacatgtaatagaattataaggctacattaagaacctacttaatggctcatgcctgtaatccgagaattttgggaggctaaggcaggaggatcacttcagcccaggagttcaaggctgcagtgagctatgagccactgtactctaacctgggcaacagaacgagatcctgtctcaaaacaaaaacaaaaacaaaacaaaaaaaagaacctacttaaggttagtgaaatcaagattagccacttttcttctccactctaatttttttttttttttttttggtagctcttggcctgaatttcaagttcagctccacttcttacttatcttttccgtgcccaaattccctcttccataaaaatgggagtaacagtagcacttaattcacagggttgtaatgatttaatgtactgaatttcatgtagaatacctgcaacaatgcttggtgtatagtaagcttgaataaatgttagatattatagttgtcgcctcacaaattacacatctaaattaaaataataattgctcatattaccttccatttccagccttttaaaccacttaaatagctcactagaggttataatccatagctactatgaagcaagctctcaccatggccaggcagcatattatagatttaacctttattatcccaatgccctcagtaaccctatatgtattattccatttgtatagttataacatattccataacattgttatccagtacaaactcacagaattagcaaaatgcagaattagaatttaagtcgagtttttgtgtggtgcaaaactaatgctctttgccttggactacattgcctattcattgtcagaaaacggtaccccaaaatttggtgctttgacatgctgaactagagaagcagccgcaaggtttctctgatctccccaccccacctcctgcctctcaatcctctgcctcccccaaaacacgggataagactgttctttgaagtttcttatctacctagaaaccacacacatcaaagaacacaattgctttctatctgcttcctccctgaaatttcattaaccagaagaaattaaaacatatcacaaagccagatacagtggtgcacacatgtagtcccagctacctgtgagtctcagatgggaggattcttgaggccaggagtttgaggctgtagtgtgctatcatcatgcctgtgaatagccaccacactccagcctgggcaacacagtgcgacctggtctcataaaaaaacaaaactcacatcatagaggaagagactgaaaattaaccaccacacttagagcccaaactttgcctcaaactactgttttttgtttttgagacagggtctcactctgtcacccaggttggagtgcagtggcgagatcttggctcactgcaaccttgcctccggggctcaagtgatccttctatctcagcctccctagtagctgggattatgggagtgagtcaccacgactggccttcgaattattattggttctctagtttcacttggtttacaaagagaataatttacaagtgaatttctgcattaatctctcctaaaatcatttactactcctctaaaattgcctgtagcccccccacctctctctcccctatgaaaagtattaaacttcaaccatctgaccctttttttagttttcttattttgttgtatcattcccatgcttatgcacattaattttctcttgttaacctgtcttttattaacaagcatgttgtcatgactcttttgatggggaggaaagtgatcaccccctttccaccccttcatactacactacctttccatttcctaacccgtttgtaggaggttactgaagcttgcattaatttcttcaatagatatttatccagactagtataatccaggtgctggggaaacagtggtgaacaagacaggcacacctcatgaaactcacagaactgaaaggtgaatggattactatcttcatcctttttttgtttcgtttttttcctttcatacctagtcctgcacatgcatccttaacttctgcagtgtggtatatgggaactggatccgctcctaaataggtatgtgacttctctgagctttatcttcttcacttaaaaattacaagcatcggccgggcacggtggctcacgcctgtaatcccagcacttagggaggctaaggtgggcggatcacaaagtcaggagttcgagaccagcctggccaacatagtgaaaccccgtctctactaaaaatacaaacattagccgggtgtggtggcacgcgcctgttgtcccagctactcgagaggctgaggcaggagaatcgcttgaacccaggaggcggaggttgcagtgagccaagaccatgccattgcactccagcctgggtgacagaatgagagactccattccaccccccataaaaaattacaagcatctgtaaatacataatctcaaataaaaatcttcgtgtatatctccatttttaaaatgatagaaacgagagtctcaatgattaccttgaaaagatcacaaggaaaatgaaacaaacatgaattaagtacctgtaagatagtttgctggttacttttacatatatgataaatgatggatcagggacttcaacctagatcacaaaatcaccaccacactgccctgcttctgtcatgggaaacacactttgataatttcttcattctttctccactccctggacttgaagcccgagaagtaatccatccgcaaatattgaacactttttatattcatatatgaaacgcacagtacacagtttttaaaaactggtctctgttgtcaaggaacttttgagccattcagagagacaacacttaaaacacacacacacacacacacacacacaaactgagggaagtatgaagtgaccaaataatggtatacaaagatgatctcatttgatccctattaccactctttgaggaggtactattattattgctcttttatagagaagaaaaggtagctctgtaggcagtaagcaagtctcaaggttactcaagcaggaaagggcaaaacagattcaaatccaagttctgactcctaagactttctctaactatatatggtaagacaaacccagaaactccagttccctaagcaagtaatagaccccatttggctaggagggctggataaatactgagaaagggggaagatgaagccgaaaaggtaggctagggcctaatgtaactcacggacttcagaatgcagactgtaggaatccactaaaggtttcttattaaggcagaaattactgcagtcttaacttgacatagtagtttctcaacttggtagaagcagactatacaaaaagtaactttacagttggctacgtgacttagacaaattactctctctgacctcaactcttacaggtaattgagaggagaattctatatttggacaatcgccgtgattaaacgagtgtatgaaaggcgtctgaagctagggggcgctagataaacactgatttcccctttagggaaaaagaatgcaggctttttgtttacatagagttggcaggcatgcgttatccagcaaggccggaacggaagacactctcagcctcagctgcaaccacatctgggtatgcagaaaccttctaagatcccagcgtttccagggagatgctccatttcccctcacttctccggacctgtcgctagaccatgaagacctgactgccctctaataaagtgcctagccagcactcttagaccgcccaaccttcccagctcttccttccgaggcggctactcgatgacatcacatccacttccgcttccgaaggcggcctcttttcattcctcgggaccgctctaggctgccaccacgccggctggccccaaaaactcgatggttgttgggcggggtcgtgacgtccttggcgtggctgcaggggaggccgcggcggggaaaatggcggacgggaaggcgggagacgagaagcctgaaaagtcgcagcgagctggagccgccggaggtgaacacaaccccagcgtcgtgggcagcgtgggatgctccgggcctttctttgagctcccagggtggggggagtggggtggggcgagaatgggcggatctggacctcacccggccaggtgttgggcccagacctgcctcgggcacgcccgatgcggccctctgggctccgggcctacatcgcctccttgcctggggagagccggccactgttcgtcacctcctggccccagcggaggccctgattccgaggagaagggagatgggcgccagaaagggagaccgaactcggggtgggaccaggagcggcggtgcaggagccgctaccgccacaccggagacgcacatcacacaaaacacacacaccggagacgctcatgagacataacatacacacagtgcgagccaccgagtagttgccgcgggaactggccgcaggctgagtttctgacggtgccggcctctcagttacacgcaggagttaattacgcttgctgctcccttttcactgaggaggtggacaactccggcctgctctctttcctttacttccaagtttaatattgaccctgtgacaggatgggccgaggtgatggaggggaagaggaatgcctttgcctgccctctggtttaagctgcggggtctagggctaaggtttggttgcttttctttgaagtatctcccttaggctgttgccagctgaccgcttgccagatacttaggcgactaaatagtctagcgtgactcttcctgtattttgttacgacgttaaactcaggttacagctatccttattctgtccattccactccctaaattcgggtcttgtgcgtgaaggaaaagaaacgtaatctctccagctccctctttgcacataacaagacaagtgacttaacacgtgcgagctgtttaaaatgtttttagaacattttaaac

SEQ ID NO: 2268 - DNA, 6000 bp, Homo sapiens
atatatcactgggatagacatcctgtgtagtaaacaaaatgcctgcactggttccttggtctatggggtgagagtgatggtagtaaaagtcaagtgaaagcctctgagaccccactatcaccaccacccaccccggccaagagagcaagcacataaacaacatcacacaccagagaaaatggcggagactggtgccacccttgaagaccaaagacgtgtggagggtatcccccaccatgtacctatttaattcatcagtctgaccttataaaaataaacagagtggcaatggactattgcagattcagccaagtggtagccctgaccacaggtgctgtgcaggtgcattgctagcacagacagatcagcacggcccccgcttctcaggggccatctgatcaccacactttttcatccctatcagggaccatttgcactcataggaacggccaacaatacacacatatggtcttgccccaggccaatgatacctttcccatcctttgtcatcacagtctgaaggagactgggccatctgaacgtcttgcagaacactgcactggttcatggtgtcaatgacaatgtgctaatcaggatggatgagcaggaggtgacaagtacatggaaaacttgatgagacatatgtgctccagcgggcagaagattaaaccctatgaagaattaggggcttgccacatcagtgaggtttgtaggggtctggtggtgtggggcacaccagaacatccccctgcacactccatcacagaagagcaagcacaatgcttagaggcctctttgggttctggaggtagcagattccacacctgggagtgctgctctgacccacatatctctgggtcacatgacatcaaaggctgtccctcaggctatgggacccacagaccccatgatactagaggcatacatggtgggaagatatgctgtgtgaagcttacagcaagctctggtgggaaaaaccacaaagtagaccccctagggttctggagcaagaccaggtcatctatagtagagaactagacaccattcacaaagcagctctgccaggctactggaccctggtagagatgactaggggacatcaagtgaccatgaggccagagctgcccctcatgaactgggttctgtcaggccctctaatatgtaaattcaggtgggtgggcctagcagcaatccactgagactgtaagcaatccgttgtacatccacatcacctaccactgccacagcagctcctctgcctcagttcacaactacgccaatgggcagttcttacggaggaaaaaggctgcgcttgatcacagctgagctggctcaatacatgggtcagatgtagtacctggatgtgcagcggtcgcatggagcccttgaggatgaaagccacaggctacagatggtggaaccagaatggggaggagacttgtcctcggcgatgtcctgaagcagctgccccagcgctggatgcctactgacctgggaagagcaaaccccaaggtgatgtgtcctggagcaagtccagcatgactgttggctggggtcccagctcctcactccccaagcctgtcccaggctgcctgagtgtcctcaagacatggatgctgccttctctcagagtgagcaaagctgcagtctttttgtaactgaatctccaaagtaacatccaaccacatctgtcctatgctgttgggaggagatcacacaagggtgtgaataccagaaggcaagggccatcagggccataatagaggctgcctactcaccccacccacctttctgtctctcctaccctgcccccaaccagtgtttaaacatgtccaagaacctctcatctgagaaaaagccatatcccactccagtgcctgtcccagctctcacagtccattccacacctgggaatgcctctctgacccatacatctttgggtgacataaaagcactccagcctccaactagtaactcacattcacccttctcacttccctgcatcctacctgtcaacacacttcaatgtagtgtctgactccagacacaccggccagcccagatctgctatcgccagggccactaacagctcctagtccttatcagatgacctctgggcagccagctgaccccatccaccatcttgactgctctcttcagtggcctttgggagggctcctgataatccccagccctgctaggatctcctctccttcagtgtgggccggacctcaggactcacttctcgctaagagaatatggcaaaagtaaaggaatatcacttccaagacatggcatctgtcttgtatggcctctctctcttgttcgcttgctctgaaagaaaccagctgccaggttgtaagctgctctgtagagaggcccccacccaagagccagtgggaaactaagtcttcagtccaacagcctatgaggacctgaatcctatcatgtgaagaagcttggaaggggatcctcctgaagatgagccttcagaggagacagcagccctggccaataccttgcctgcagccttgaaagaccttgaagaagaggcacccagtggcatcgtgtccagatccctgatccacagacaccgagacagtgggtgctaattgcttcaaggtgctaaatcccaggataatttttttttttttgagatagagtttcgctctttttgcccaggctggagtgcaatggcacaatttcggctcaccgcaacctccacctccagtgttcaagtgattctcctgcctcagcctcctgagtagttgggattacaggcatgcgccactacgcctggctaattttggatttttaatagagacagggtttctccatgttggtcaggctggtcttgaactcctgacctcaggtgatccacctgcctcagcctcccaaagtgctgggattacaggtgtgagccaccatgcctggccatcccaggataattttttatgcagcaatagataacacaagcccatgcagagtctcttcagctttcctgtcagcagctcctagcatccgaggtgcatccttcacatcctttgttggtgtctcttaactgttggggtttcccaggtcccaggcttagaccttctcatctccctgcactcactctggattatacaaccactcccaaggcaatctacagcttcagtccaaacacgcccttgagtcccatacatggatatccaacagcttcctggatatgtcccctcggcccaaattcagcacagccagaaacaaactcatcttcttcccccttaaattgctggtcttcctgtgcgctcctatctcagctatcatccacctagctaagccaggatcctggtgtcatcctgcatgcctcttttgctgtcctcaatcaccaacacctatagaccccacttcctggccgggcgtggtggctcacgcctgtaatcctagcactatgggaggccaaggcaggcggatccacttgtcaggagttggagaccagcctagctaacaatggtgaaatcccatctctactaaaaatacaaaaattaaccgggcacaatggcgtgcatctctaatcccagctactcgggaggctaaggcacgagaatcgcttgaacttgggaggtggaggttgcagtgagctgaggttgcaccactgcactccagcctgggtgacagagtgactctgtctcaaaaaaaaaaaaaagattccacctcctaaacatcttgtatttccagttctctccatcactcctgcctccctaccctgggtcccaggcagagatgcttgttcactgcacaaagtgcctggctaagagggttgcgattcagccctgcctctgctcactaaggctgcctggaactagacaagaaccacagcaacctcctcgtttgctgccttcaacctcgttcaatccacttccacctggtagcagccagagggattctaaaacccacactagttcacgtctcaccctgctcaaaatgcttccatggccttccattgctttcagaatacagaatagtcaaactctctagaaaaacatctagctcttttttgatccggattttctctccctcaagtcttgtctgttgcccggcatcataagctcctagggttagttcttagggaggggcttgcacatccgggccctgccatgacctctgcagctttgcacatggcatccttctatctgtaacatcctccctgcgtcttcgctcccctgggcaaagataactcctactaaagcctcagatgtgacctcctacaaaatcccagagttgtccagctgcttgaagtattgagcctttgagctttgggagaagttaaaccattgtgctcctaagacggtaagaagcgtcagaaaaccaggctctgaacctctgctgtctttttttttttttgagacggagtctcactctgtcacccaggctggagtgcagtggcgggatctcggctcaccgcaacctccacctcccaggttcaagcgattcttctgcctcagcctcccgagtagctgggattacaggcccgtgccaccatgcccaactaatttttgtatttttagtaaagactgggtttcaccatgttagtcaggctggtctcgaactcctgagcttgtgatccgcccacctcggcttcccaaagtgctgggattacaggcgtgagccaccgcgcccggcctctgttgtcttgtcagcaaaatggccctggtgtgaccgaggtcacgcagccagcaagtgtcgtcgggtcccctggagcctcagcttctacctccgctccagctcccaccacagcgcaggcgagcgcacgcgcacagcgccgggccgcacacctccgggctctgggcggagcgcctcgggcgttgtaggcgggaccggaccctctggcccgcccctccgtgtcccttctggtcgccagtggacgccgacgtcatgacgtcgcgttccgtagggctcttcccgggctttggtgggtcacgtgaaccacttttcgcgcgaaacctggttgttgctgtagtggcggagaggatcgtggtactgctatggcggtgagcgcgctggcgcgtggcgggcgggcgccggggacatgggtgcggaggctgcgcgcttcccgtactctggccccggcccagggcggcgctctgggtgaggctgggccccaggctctggggcgcagctactttctcgcctgcaccctgcgtgaggcgactcgcctacctaccactgacctggggccctgggctccctaaggcgagctcggcccgttcagcctctgtcctttattcaccccacacatacttattgggcgccatctgtgtggcgctgagcgtacaaaagacaggcccccatttcactacactcctttaaactttttttttttttaatttcccaatgatccttgttccaaacactacacttacttttgtattaccttcttgtccctttgtcttgtatactgtctgttccacatctgagttccagacctcttgttttggtggctcttctatgccatctctatcacaataccttgcgcactgtgtgtgctgaaataggtctaatgcttaaggggagataatagacagtaaacaggtaaataggcaaatgacataacctcagtggtttttcatggagaaagcacggtgatgtgggtgaccccgatatttgagctggcttctatttgtttggaagccactgactcagattgctcagctgagagcattccaggtgagagaacagcaagggcaaagatctggaggctggaaggggtttggtgtgttggaggacaagagtcacaggtggagagaaagaagggaaggcccctgatggtaaaaaggaagctgtatcatgcctcaccagcttcctaggtttctgacaaccgcaccttctcttgcaggaatcatcggaatccttcaccatggcatccagcccggcccagcgtcggcgaggcaatgatcctctcacctccagccctggccgaagctcccggcgtactgatgccctcacctccagccctggccg

SEQ ID NO: 2269 - DNA, 6000 bp, Homo sapiens
aaggatatacttctattgccatgcttatattaaatattggaatatttattttgtggtaaattatttagataacagctttattgaaatataattcagatgtcataaaattcattcatttaaagtgtacaattcaatagtttttagtatagtcagagttgtgcaagtatcattacaatcaattttagactatttttagcagcccaaaaagagaccacatacccctcagccatcatcaccctccgcctcctttctccgtgtcctaagcaatctttaaaaaatcttaggctgtttcctaagatctttctattctgaacatttaatacaagtggaatcatacaaatatgtgttctattttagaaggaatatcaacctaatattttaaaggttcatccatgttgtagcaggtatcagtacttggatctttttttaatggccaaataatagcccattttaaaacagtccattgtgaataaatttccattgtaaatcttttttttctttcttaggtaaaaaaataaacagaaataaaagttttaacactttctttactttttaaagtgttagaccattgcatgaatcccctaggtacacacaccttagttgatgacattcttatgatacagtctttggttttatgggggatgtttgtctaaatactaaacaataaaatagttattttatgccgagggcaaaaaggccctccacaaaatgatggtttgagaagaggagaacatttattctaaagccatcttattaaattttgcctcaaagcaattcacattgtaacagggctctgatgcagtcatttgcatttatattgacagttggtcaatcagtattattgagtacccaatagttcataaggccctgagagtcaaataatacaattatgaaggccataagaagccagacaggttaaacacagtcttccttgtgatgctggtgaacagccatatacttactgatggatctcacctcccaactcagactcttatggtcagaggcatatttagtgctttcataggctgtgatctactaaggatcacaatttttttcctataagtgttcatcatcatagattctgtgttacactgcccaaggattcattgctcctagctcttggaaatttgtttgacatcactcagctagcaacccctttgggaattattttggcagaagagagtcacctttgccttatccatggtcatactccctaccaggggcagactacgtccaatgactggctaataaaaaaggcctggctcctcacctcaattcaagacaaccctgaaaggccctcctatcttcagaacttgtaacagggtcagctgacatcttcaacaatattgcattacaaatcaacttctccctctgcccaaccttggttatttctctacccaccactggagttaatcctgagtgcactccttaataaacttcctacatgcaaatatctatctgggagtctgattttcaaaaatcctaacctgctccacttatggaactttctaactgttcattagaacagttcatttgaggttgagcacttgacatatagagaaagaagtacaacaagagaacacaagtgattcagtcagtaagtcctactaatcatggaaaattattgacaccctaaactcttacataaagacttcccagtgttttttcaaatctcacttttgatgttactatgatatgatttggcagtgtccccacaaaaatctcatcttgaattgtaactcccataatccccacatgtcatgaaaggtacctggtgggaagtaattgaatcgtggaggagggcttttcccatgctattcttgtgacagtgattaagtctcatgaaatctgatggttttataaagggcagtttccctgcacacactctcttgcctgctgccatgtaagatgtgcctttgcttctccttcaccttccatcatgattgtgaggcctccccagccatgtggaactttgagtccattaaatttatttttctttataaattacccagtcttaggtatttcttcaaagcagtatgaacgtggactaatacatactatatccatatatttatcccagatgacccttatgtctttgcaaagaccttattgagttcaaagttcaaggtgccacagaacattctaaaacaggtttcatctgagttgaggatcttttacactccatttcatggtgttcaggtttttcaagactctacatttatgactttgaatacttcttctccccttataactgaatgatcaaagtggaagtgaggatgatgattgagatagaagtataaaccatttaattcaacttggattaagtttgagttgagatgtattcaattcaagcaggctttttctggttttcaaagaaaactttgttgttgttgcccttctcacttgaagagctaaaaggaccccacaggcggtaccacagaaaaaattagggtctaggtcagaaagagggtttatccaaccagtgcaacatggtataggtagattataaaatcagtcttcattatcaggaaggtctaaggctattgctgaaatagttccaagcaccagtccaagggtgagacaaggaaggagatagaacaaggacccaggcagatagctgagaaaataaggcattcaatagaagcagacatctggcacaatttaagaaatgtggttcagaaatttgcctgtgaatggtacataggtgctggagcttcctttctcagattgcctggtgcacacagcagggattaatgtatcaacttcatgtatgccctggactggaaaacctcccaatttttatttcctttttcttgcacccatttcctcaaaatcttactcattaaaattgacagtgtagactggcaggtcgagaatgtgatggcaaagagaaagttgcaagttcccttgaatggttaatcctaatcacacatgcatttattatttgcacatttttttttttttttggaggggggacagagtctcactctattgcccaggctagagtgcagtggtgtgatctcagctcactgcaacctcagcctcccggattcaagtgattctcctgccccagcctcccaggtagctgggattacaggctcccaccaccacacctggctaatttttgtatttttagtagatatggggtttcaccacattgaccaggctggtctcgaactcctgatctcaagtgatctgcccacctcagcctcccaaagtggtgggattacaggcgtgagccaccatgcccagcctatttgcgcatgtttcctactgccggaagaaggaacagttctcccatataccacattccagggcatcctatgatcacataagaacacaatcctcctgccacaggtaagcgcaatgtaccaggaaacaggttgcgggtaaaccattgttctccctctgccattatgatagaaatatcatgacaggcagctctgcccccaaatcttgcaaaatctcaatgtgcacctcaagtttgtattgttttagcctatgatggaactgacaggttggggaaaatggaaagcaaagttccatcagtctggatcgccttttgtagtgtccccagtgagatcatagctggagaggcaaggatgtaactcactcaaaatttaaggcttatggccaaagttgatgactaataatatagaattgtaggtttgggctttttgctttcttaaaaaactctgtcaggtttggaaagggacctccaatctaattttgagataccacaggtaatgtccaattgtcttaaggtgtgactaaaatttttcttttgtttgttttttgttgttgtttgtttgttttgctgtgttttgagatggagtcttgctctgtcactcaggctggagtgcagtggcacaatctcggctcactgcaacctccacctcctgggttcaagtgactctcctgcctcgcctcccaggtagctgggactataggcatgtgccaccacgccaggctaattttttttttttgtatttttagtagagatggggtttcaccatgctggccaggctggtcttaactcctgacctcaagtgatctgcccacctcggcctcccaaagtgctgggattacagacatgagccaccacgcccagcctaaaatttttcaaaataaacttgctgttacttttcttctttaatttaaaaatacctctataggctacatgagagtttttgaaaaagtagccatgtttggcatggaaataggccccaaatatgtcaacacctgtatttccttccagatttcagtcctataactttggactcccaacagattaagaatcactggtctaaggtttctaaagtcagggtagatccctttcccaagtgacagccacaaatccaacgctgtatcataccctatctaaagaaaagataaaagtaaactggcttggcacagtggctcatgcctgtaatctcagcactttgggaggccaaggcaggcggatcatgcggttaggagttggagaccagcctaaccaacatggtgaaaccccgtctctactaaaaatacaaaaattcgccgggtgtggtggtgcacgcctgtaatcccagctactcaggaagactgaagcaggagaattgcttgaacctgggaggcggagtttgcagtgagctgagattgtgccactgtgctccagcctggatgacagagcaagactctgtctcaaaaaaaaaaaaacaaaaaacaaagataaaagtaaactgaaaacaaggatagaaatgtctgctaacatgctctgtgaccttgatcaacagctttccccgctcttggccttggtgtcctaacttaaatggggaaactgtgatctctctcagctcaaaatttacatgacattatttacataccaaacctgccctacgcttcctggaaactttactacttatgagtgtggctcctccttccctttcaatcccttaattaaatagcttcccctctacaggcttttgaagtggtagcagttcctcctaactcctgccagaaacagctctcctcaacatgagagctgcacccctcctcctggccagggcagcaagccttagccttggcttcttgtttctgctttttttctggctagaccgaagtgtactagccaaggagttgaagtttgtgactttggtaagtagacttttctcattgctttttccttaaaactgtgttcccagcaaagtctgataaggcaagcgtcaggtttcatcttatccttggattgtttcccagagaccaggctctgttcaaactcagaaagtgaataatcaagttttgcaagttcctcttaatgaagacctaacgtgtcctaacaaaaatattttttggtcgctgtttttttaggggttgctttttatttgcttttgctgatgttatttatttacttactttacaactgccttgaattcagattccttttgacagccacaccagtccagaagaaaccacagctggcgctgtttatgtaccaagagctggcttcattcaatttaatcattatttgtttgcaagccaaaaaacagtcattttctgaattaagtagtcctttcacctttgtttatcaggaaattagaacaactatttgtaaacaaccttgaagcataaaagtgaatctaaatttggaattttaggatgattttctgatatatagatttagttgacgattaaaatcattggcacatgtgaccagttatgaaaaaaggtggggggtggctgatgcataatatcaagaaaagaaaatatactgttgacattgtttgaaaatagatggaaagagggtttgcaaagtgaaggggattcatcatgttacctaagagtctgattttctgtttctgtatctttttttccttctgtttcactctttctctgcctctaagcctctaagctgcttcttgcctttcctctctcgttttctttctcttccctacatttttttatttgagatagtgaaagtgggctgataagtaggtaaattttctttctgtcaagaatact

SEQ ID NO: 2270 - DNA, 6000 bp, Homo sapiens
atatgacattaagcaagttgcttaatttccctgggtctcaatttcttcatcttttattattatttttaaaattattttattttatcgagatggagtcccgctctgtcaccttctgagtgcagtggcacgatcttggctcactgcaacctctgcctcccgggttcaagcgattctcctgcctcagcctcccaagtagctggatttacaggcccatgccaccacacccagcttttttttttttttttagtagggatggggtttcaccatgttggtcatgctggtctcgaactcctgacctcaagtgatccacctgcctcgggctcccaaagtgctgggattacaggcatgagctaccacgcccagccaatttcttcatcttttaaatgaaaataatgatacatatctaaatcatactgcctagcacaccgctaatgctcaaccaaaatctttccttctctacttattaagtcattgtgggcgtatgggaaatttaattgaatcagaagccatcatggtgctgtacaagtgcttcatacctattgaatgtgaatctgaacaggcgataaaattgatttcaatctctgtagcatgacactactgtgagtggcctacagatggcgctagatgtttacaacggactccttcctccctatgcttcttgccacttgacggaattgtactttgagaaggggtaagtgactaagtgcttttcaaaatcagtatcactggaccttgggtttcattattattattttgggttaagggttgtgtgcctgtttgtctttgatttggttttatattcagagggaagaatggtggtaacaagatctttgctagtcatgtctcttttttctttttcatgaagacttttactggaaaataatatacacagtagatgaaaaaattgggaaatagcctatgtaacagaaattacatttttaaaaaaattaaggtattctaagaagtaggcatgtattgtatatatacttggcaagagaaaaatttcttgatggttatataataatattttttcaattaaagaattcaaacatattcattcagcttctgatgattcatatccacaagtcaagattcttaaagtacaatttctaactggtgtctacctctgtgtgacctggtgtggccctccccagatgaccacagcttagcttgaacccattagaagggtcaaagttagcgtagccaaatgtcccagttcaccagaattgacccatgaaatctggtgttctcagaacatgtgaatttcattgttaaaaccagaaatgtcctggaaaaactggggaagaattgattatcacaccaaggtcataccaaaaatatttatctgctgtgacaacgacattctcattgggaggagaagaaggaggtatttggaacaagtcaccagacttcatgggatattattagtgaaataagagcaaggaaagggctgagttaaggcagtgaccccagagtttgttttgggattagtcagggagatctattttgcccttccctcaaggcattcacaatagctgcacaccaacctgactgtgcagttacatggggacctggctcaaaagagcccatgcttgttttaatgatctgctgtggccatctttaaattgtaataatgtttaaacaatgggccctgtatttcatcttgcaaattttgtagtcttggatgtagctttctggcccctgaatttgtagagtaagaaagtaacagcacagagacttcattctcaaccaatatcttcactgcttacaaagaagtgagttctgcacagttagggacaggtagatacattctttattgaacctctaactgagtgtcaggcacaatgaactagaactaaaatgtggtcttagttaaccttgctctcaaatatctagagtcagcatggagaggtaagacccacaaaatggagactggccaaatagaacagaaaatgggaatgaaacgactagagacataaaaccctctcttaataacaagcccggcacaagtctgcccatcagaaggccagctctgggcacagagttaataaatccaaccaaattccaggatcagcttcaggagcaggcaccatctcctttgggataagacaagagaagctactgactctactcgtacctccctgttctctggtttctggaccccagtggtccagagcttgctttctcagtgcacagaagcattttctcccactgaattgccttgttttacgaccctgagttaaatctatattacaaatcaagtgtggagtattttttcaactgaaaggcagtgacatacagaaaaaattaaccaagggccacgtaaaggtcaagtccaatttgttgttgtattaggattttttttattggcactccagggaaatatcaaaggtgaaacgtgattgcttttaaattaggatcaaggaggcttcgagttaacgaattctgtctaagcctgcttattaggtgatcctgactgtgaagtgatctcacattttcttatgagaagatacggagagagacagaaagagagagtattttagattttcaaccatcttaaatacgtaaacttttcaggttgtagaaaaggtagctaaaaatattcttaaaagatttaattttgggttagatacagagatttaaaatcatagactatataaaataattcattaagttaatattgctttgtttcacttttacattttataaaatgattttatctaaactctttgtactcatctttggcttgtgtcttcaccactaaagccaattttgagtcttttaaaattgtttcccagatatattcactaataaaagataattttgtcttctatatagatgaacctcagatttttgaagtcttaacccaatgaaaattaatttcacacttatctaacagtacaatgcaggtgtacattaatagatgtgattcacacgtggtgattcaggcacccagggttccctctttggacctacggtttcaagagtgctgtgctcacttgcaggcagcttgtagaaaggaatgaaagggtggaggcagcaacccgcttatcaaccacgtcagccttttaaaggggacacatatcatttctgctcactttctactggctaaattagtgacttggtcctacctaggtacaacgtagtcttggcaatgtggtcacttctgagccataattcaattctatggaaagagaataacagagtttgatggagtattggtcatctaggccatatcatcttaagacagaagatgctgttactgaaaaagttattccaagatataagtacccattcataatacatattagggaggtttttgtaagttttatagacatcttattttattttatcttattttattttattttattttatttttattttattttattttatttttgagatggagtctcgctctgttgcccaggctagagtgtagtggcgtgatctcggctaactgcaacctccacctcccaggttcaagtgattctcccgccccagcctcccaaatagctgggactataggcatgtgccaccacacccagctaatttttgtatttttagtagagacggggtttcaccgtgttagccaggatggtctcgatctcctgacctcgtgatccacccgcctcgacctcccaaagtgctgggattacaggcgtgagccactgcgcccagccttatagacataagtgaatatttgctgttactatgtttatatggctttttaaagtgatgttttaaaaggcttgtttataatgacaaccaaaagtagccattgtaaggttacaccaaaagaaggatctctaaatccttcttgagttcccctcctgactccttgattagcaaatggcttccataagcaactcacgctggtttaactcaggttagtttacaccattggaccttcccaaatagtacattgtttttttgagataaagcattgagagagctctccttaacgtgacacaatggaaggactggaacacatacccacatctttgttctgagggataattttctgataaagtcttgctgtatattcaagcacatatgttatatattattcagttccatgtttatagcctagttaaggagaggggagatacattcagaaagaggactgaaagaaatactcaagtaggaaaacagaaaaagaaaaaaaggagcaaatgagaagcctaaaaagaagggaggaggagaaggaaaacccaacacccccacctgcctcccacttcttatccaaaggctcaaagtcccacccagctccctgcaaccatcacttctcaccacctcctctgatttagcatcctggtgcctacctcctatgtccctgttcatctaacaaaccagccctcccatttccaccctgcaaatctctcccgcctgccccagtctccccatttacacacctaaattggctaaaatctccccataagtttttccattagtccctcaactggcatgtaatagtccaagtggaaagaaattcagtggcagttcaacaacacagaactaacagagctctctcctctgcctttgtctgccagggagtactttgtggagatgtactatcggaatgagacgcagcacgagccgtatcccctcatgctacctggctgcagccccagctgtcctctggagaggtttgctgagctggttggccctgtgatccctcaagactggtccacggagtgtatgaccacaaacagccatcaaggtactgaagacagtacagattagtgtgcacagagatctctgtagaaggagtagctgccctttctcagggcagatgatgctttgagaacatactttggccattacccccagctttgaggaaaatgggctttggatgattattttatgttttagggacccccaacctcaggcaattcctacctcttcacctgaccctgcccccacttgccataaaacttagctaagttttgttttgtttttcagcgttaatgtaaaggggcagcagtgccaaaatataatcagagataaagcttaggtcaaagttcatagagttcccatgaactatatgactggccacacaggatcttttgtatttaaggattctgagattttgcttgagcaggattagataaggctgttctttaaatgtctgaaatggaacagatttcaaaaaaaaaccccacaatctaggatgggaacaaggaaggaaagatgtgaataggctgatgggcaaaaaaccaatttacccatcagttccagccttctctcaaggagaggcaaagaaaggagatacagtggagacatctggaaagttttctccactggaaaactgctactatctgtttttatatttctgttaaaatatatgaggctacagaactaaaaattaaaacctctttgtgtcccttggtcctggaacatttatgttccttttaaagaaacaaaaatcaaactttacagaaagatttgatgtatgtaatacatatagcagctcttgaagtatatatatcatagcaaataagtcatctgatgagaacaagctatttgggcacaacacatcaggaaagagagcaccacgtgatggagtttctctagaagctccagtgataagagatgttgactctaaagttgatttaaggccaggcatggtggtttacgcctataatcccagcattttgggagtccgaggtgggcagatcacttgagctcaggaggtcaagatcagcctgggcaacatggtgaaacctggtctctacataaaatacaaaaacttagatgggcatggtggtgtgtgcctatagtcccactacttgtggggctaaggcaggaggatcacttgagccccggaggtcgaggctacagtgagccaagagtgcactactgtactccagccagggcaagagagcgagaccctgtctcaataaataaataaataaataaataaataaataaataaataaataaaaacaaagttgattaagaaaggaagtataggccaggcacagtggctcacacctg

SEQ ID NO: 2271 - DNA, 6000 bp, Homo sapiens
ttttttttttagttagtgggcatggtggtgtgtgcctgtagtcccagctacttgggaagctgaggcggatcgcttgagcccaggacttttaggcttcagtgagctgtgatagtgccactgtactctagtctgggtggcagagtgagatcctgtttcagaaacaccaaactttttaaattaacgtgtgtgtgtgaataatccagagtgattacctattatttagtgtggtaaagaaacttatataccctttttcataagggaagggggagatggagaatgtagaaattcttttgagtgacagcaagtcattagggagaacaaatggaccttggaggtggaaggcagacattaatgggaaggtgaggtgtagagctgcacaggaacaaagattgtcttattatgcagagaaagtcctccaggtaatcccttggggctgccctcagaagaacagatgaaaagtctgtcaggtcatagtgactgtcaatctattctctagtggttgatatttcctggttgtttgatgagattactagggagggagttttacaacattgcatttcttctttttatttatttgtttttttttttagacagagtctcgttctgtcacccaggctgcagtacagtggtgcaatctcagctcactgcaacctccgcctcccaggttcaagctattcccctgcctcagcctccccagtagctgggactacacgcatgcgccaccatgctcaactaatttttgtttttttagtagaaacagggtttcaccatgttggccaggcaggtctcaaactcctgaccccgggtgatccatctgcctcggcctcccaaaatgctaggattacaggcatgagccaccatgccctgccctgccaacattgcctttcttttggaaaaaagctttcttggtcagataaggaaattccaaagagagtgtacccttggtgcttcgggaaagaggatcagggagacagggaaaggtaagagacagaccttggttctgaggccgttcaattttcaaagcattgagcatgctgaagtgctgtattttggggaatcgttttactgtgcctcaataatattttgatcatatgtatgacttgaagctgttaataaaaattgtgatgtttgaaaatccttgccaagagaattggaatcttgattaagaatttcattggccaggcgcagtggctcacgcctgtgatcccagcactttgggaggccgaggtgggctgatcacctgaggtcgggagttgagaccagcccgggcaacgtggtgaaaccccgtctctactaaaaatataaaattagttgggcgtggtggagtatgcctgtaatcccagctagtctggagcctgaggcaggagaatcgcttgaacctggaggccgcggtgagccaagatcgcgccattgcactccagcctgggcaacaagatcaaaactctgtccagggagggtgggggtggggaagaatttcttaaaagcagcctctgcttttatgtgtaattctgtaacaaagtcaacatgttatgggacctttattactttatcttaccagataggtaaaggatgaataaatctgcccttcacttacatttatgattaatcagacaggtcagctagtgtgaataatttctaatgaaatagagaaaaaaatgaaaaaatatcaaggcatgccttgaatgtcattaactattttagatgatatcttttaagccataggaatcacagaacgcttttgtgtaggtataacaatgttgcattttaaaaagagaagtgaagcaggagtggggagtagagggaaggtgggtcaatggcacctacttctggacctagcaaggctgaggtgtgagaatcacttgagcccaagtcagaggttgcagtgagctatgactgcaccactgccctccagcctgggcaacacggcaagaccctgtctcaaaaacaaacaaacaaacacaaacaaaagggaggtgaatgaagggagaggtgtttacaaggctagtgcaatagttttggtgtaaggcaatgggaggggagaagggtttgaataaggatggcagcagtagaaaaaaaagcaagccatctgaatgaggtatggtgggacttaggcttttttgaaagaaaataatcaagtctggccctacaatttagagcctaggctgctatgtaattatttataaacaatttataaaattgattataaaaatgacttataatcaattattaagtgtgagggcaaaatacaattttagatttctataaacttagaaagttgattacccatgccctcagagttaaaaaaatgctaaaaacttcttagtaagattaaaaacaataaatgtaataatgctgatggcatttctataatatattaaatagtttaaatattaaatagttaaatagtttaacactcgtaacaaccctatgagattggtactgttgctatttccattttgcagttgaggaaattgagacagaaagagatttgtctaaggttacaaagctttccagagcagtctggtttcacagttcatgttcttaatcactacactagctgaaattacaatgttaggataaattaggaaattcaaataagagagatgaattattttaagtgtttgagctgcagctttctggcaagtagctgaacacgaggaaactcagttaaggaaaaatcaagaacagactaattttgggagacctaagagaaggcatgtagtagagaacagattgaagaaagaggaggtgctagcaaagaaatcagaagaccagcaaactaggtaggtgtagatccggggaagtgtcttaaaagaaagggaaaaagggtttcaagtaggggatggggattggtgaaaaccgtaactgtttcttttgagaatgtgtcaatgaaaggaacgttgatagcatagcaactggagggagtaacatcactgaattaaaaaaaaaaaaaagacaaaagaaactttttttttttgagacagagtctcactcttatcgcccaagctggagtgcagtggcgtgatctcggctcactgcaaccttcacctcccgggttcgagagattctcctgcctcagcctcccgagtagctggcattacaggcgcacaccagcacgcctggctgtttgtatttttagtagagacagggtttcaccatgttggccagggtagtctcgaactcctgacctcatgttatctgcccgcctctgcctcacaacgtgctggtattacaggtgtgagccaccgcacccagccaagacaacagaaacttctgagaaacagaaaggaagaagacagtggataagaacatatttacattataaggcgctaggaaagtagtggtggaaggagaaggtgggaagggatggcatagtttcaggcagagggagtggctttggagagaagggttctgggttaatttggttagaagttttgggatcacgaacaggaggtggtcacagatattttataatggaggcaaggtcaaaccggaattggagtcccatagctctgagcccaggaaactggatgaatttatctattagtatggactgggactggcatctttaacaacatggaaagcttgaaacagtctttgtggaaaataggagatcagccagagattagaagaaaacgcaagaaaattataagtaggagtccagtcacgaattcatatccaatctggtcagttatgacttcctccagcgaaaagccacacatcttgcaaacccttgagagagaaaacacaaataggggtaacctactggagacaggcccttaagactataaagtagttgagcgattccatactgaaatagagttggctatagcgatagagaagttagtcatatatggggctaatgatccaggagagtaaggattcacttttgtggtgaaaagttgtaagcaggtgaaaggtagggatccatggccacggacgggcaggtggagatcagggaagaggcgacgttaaacataaatagtttgttaatgatttcaccttactgattatttctcttttggcatctagaaggctaagattctcatgtgtatttcagagctactgaaagtagtcctaggttgtggagggagaaatccactttcacagctgagtctatcttctcagtctagttatattctcctctcacaaactagccaatgctgccgccttatgcaaagccgacaccacggaaagatgtgctttacagaggcaggatgacgccaatcggcctagggccggcggtgtttcgtctagattaatggcgagggaagtccccaatagtccttttgaaaccttttcactcttgcctggtgaaagcgcttgtcagccgtaaatcgcgaatacaatgctaagctctgaggcccttgctaaatccaagtaggagcagggatctgcgcggcctcaccctcgggtttccgcagggcgtctcgagagctgcggatgggggcagcaggagccgggcgggaacagaggaaagcgccggccctgagacctagggaggagcctcggtgaaggaacccggggcgggttcctgcctagatctccaagaagctccaaaaatggcgggcggcaactcggcgagccggacgcgcaggcgccaccgtggccgtccttccgccagccgcgggcggcccaagaaccgtccacagcgcccttatccagaagcctacgcctctcgcgattggctgaactgcgcgagcgctccgtgtgggggcggggccgccacgcagcggccacgtttcccgccccgctggtgcgcgtgcgcgcaatccccactggaaagcgtttgcgcgcgcccctgccgcggcccctagctcgcgcctcagctccctcccctttccgggcaggcccgtcccgtcagcaaggcagtgagcaccgcggccagcagagggcggtccggacccaagtctgcagcggcgccattggcgtgtggaaaatgccaccagatggcgggttaggattgcagctccgttgaaggcgcggcccccgctcccgaacccccggcgaccaccccgtaacaacccccccacatcgggaataacacaccggagacttttggggggaaactaggtcgatggtcggcggcgcccggatgggcagctgaggtgagtgcgggcggcggcgacggcggcggggggcgggaaagagggggaatgcggcggcagcggcgcgggggctggaagcgccgatccaagatggaggccgggcgagagcgagagagcgcgagcggcgagcgggcgggccgggcgcgggccccgtgcgggggagggaggccgcgcgggcctgtgcggggtgcggcggtcgtgggccgtccgagtgcccggagagacgtctgtgggcgcggtgggcaccccggcgtcttcgtcgcttgccacccctcccgcgggcaccaaaaattttgcccccgcccgcccgggcactacggcgacaggcgcggaagcctttgtggcgcgctcgggcccgccgccaagcccgccctccgcccccccccgcccgggctctcgggagtcgcccgcgcccagcggggccgggccgacgcgggctggcgcgaatgccttccgccgcctgccgacctgcgtttctgcggtgttttagcggcggcggcgtcacatgacaacgagttcatttcagcggaggggcctggggggtcgctcggcggggcggctggcccaggcttcttgttggcggggtggggcagcggggtggcggctgggggagatgcatcaatgctgggctttccagctatctgccctctcagcccccgacgggggcctccttgtgaaacgtgtccaggcctaagcactgccccgctagtttgccagtcccctgagagacgaggccaataaaagttgttttccctcctttctcgaggtgggggcggggtgggaaactagagtgcttggagttggacctgagccccgtttgcagggtccgaactgggttcttcttgtatggtatgggtactaagaaattttcaggttttaggattgtcacgtc

SEQ ID NO: 2272 - DNA, 6000 bp, Homo sapiens
ccctgtctcaaaaaataaaaaataaattccttaacttctctgagattcaatatcatatcaaaaacaggtaaaacaaaaggcatcaaagaatggcaagaattacgtaattttttttttttttttgagacggagtctcactctgtcacccaggctggagtgcaggtggcacaatctcggctcactgcaagctccgcctcccgggttcacaccattctcctgcctcagcctccccggtagctaggactacaggtgcccgccaccacacccagctgattttttctatttttagtagagacagggtttcaccgtgttgccaggatggtctcgatctcctgacctcgtgatccacccaccttggcctcccaaagtgctgggattacaggcgtgagccaccgcgcctggccaagaattatgtaatttttaaaaaataaaaataactggccgggcacggtggctcatgcctgtaatcccagcactttgggaggccaaggtggacagacggtttcaggtcaagagtttcaggtcaagagaccagcctggccaacaaggtgaaacactgtctctaccaaatatataaaaaattagctaggtgtactggcacatgcctacagtcccagctactcgggaggctgaggcacgcgaatcgcctgaacccaggcggtggaggttgcagtgagcctagatcatgccattgcactctggtcggggcacactcaaaaaataataaatttttttttttttcctgagacggggtctcactctgtcacccaggctggagtgcagtggcgtgatcccagctcactgcaagctccgcctcccaggttcaagcaattctcctgcctcggcctcctgagtagtaggattacaggcaagtgctaccacgcctggctaatttttgtatttttagtatagacagggtttcaccatgtcggccacggccaagctggtctgaaactcctgacctcaggtgatccacccacctcggcctcccaaagtgctgggattacaggtgtcagccactgtaccaggccaataatagtaatttttttaaattttttaaaaaggtgttcttagtggcagaaatgaaagaaaaaataattatacaaactcccttctcccattgcctcccttctttataacgttttaaattttcgtttttatttttaatttcctctcaatgcaataaaattatttcatagaggaaggcatgtaaactaaggtaccaggaaacgggaaaggaaaaaaggtgaggaaaaggcaatataagtaagagtaagctgatcaagtggggttactgctctgcctaggtcctctccttgtatgtccggaatctgaagaggtaaatgtgaagatacttcttttcctacggcaggcaaaattcttaaaagcctccactaacccacacccttgtatcatgccctccccttgagtgtgggagagacctgtagatataacgggatatcattacggtgattatatgacaaaatatatgtttgcatatgtaattaaggcccttaatcagttaagtttaccacaagggcctcagagcttagctggtgagcttttaaaaaagaccttaaaggggggagtcagaggtcagacacacaggaaatagggagactgactcctgctagcatggataaaagctaacagccatgttgtgaactatgtggccacacggcaaggatctgagagcagtccttggccaacagctaacaagaagatggggacttcagtcacactatcacaaggaaattaattgtgccaacaagtagtgaccttgaaagacaactctggccgggcacagtggctcacaactgtaatcccagcattttggtaggctgaggtgggcagatcacgaggtgaagagatggagaccatcctggccaacgtggtgaaaccccgtctccactaaaaatataaaaattaggtgggcatggtggcacgcacttgtagacccagctacttgcgaggctgaggcaggagaatcgcttgaacccaggaggcggaggttgcagtgagccgagatcacaccactgcactccagcctggtgacagaatgagactccatctcaaaaaaaaaaaaaaagaaaaacaactctaagcctcagatatgcactgcaatcacagctgacaccctgattttagcctgagatgctcagctatacctccccaaacttctgacctatggaagctgaaataattgttaatctgttaagtgtgaaatttgttatgcattaaaaaaaaaaagaaagaaactaatatacccccctaaataaagatataaagatacaggacaaaacaacaaataaaaggggaaacaagaacgtatctttcccagagtacattatttcttctcacagcactgagattatgaacatacacagagtcagaatcaaggaaaaaaagattaaaactgtacaaaattctgtaaattttaagttacagcaattaaatgtgtgtttttcacagacatcttgttacacaatcaccgtaagatactatccccattttattttatttttttaaagagatggagtcttgtatgttgcccaggtaagcctcaaactcctgggtttaagggttcctcctgcctcactacagagtagctggaactacaggagtgcaccactgggcccagctccccatttttagagataaagaaagtaaggctcaaaggtaacaccctgaacaccacaaacccaggggacgttcaaagtaacttcggtccaggacccactccttctcccctacaccatagtgcctttaaggctttaaaagagccaatcaaatctacagtcattttattagtctcttcaaaggaggcaatcctagtaacacaacaaacttccatattttgcatctatttaaatattccttagccttatcagaacatcgaaactgaagtggatacagaaaaatttccactcaaaagcagttcgtttgtgaaaatgaccactggtagatcacttgaattaatttagtttactcgaagtacgttttaaatatgtaaaggaaaatgcgtggcaaaacacctgtagatcttctacaactttatttgggtaacaatttgtcttataagtattcttaatcatcaaaagcaaggaaataacatttctgcttctttccattccatatttccctacttggttaaaatttttcagtctgaattcctcatacattatgaatattagaacaaggtacgttacattaccatacaataaacaagttatttttattttcactcttctgtatatttccctaagtgcttcaccatcggaatgtgcaattttcttaaaacacgaggaaaactaaaatgtagagtcattcaaattccagataagttacaaatcacacaactttgtgccaattcagatactttctcaagtaaacactatttttgcgaagatgcaagtctttctagtcagaatcacgagaataaactctatccatcttaacaccaactttaacagcaaataatttttttttatgacaaattgcgttttttttttttgttttttttttgtctgtaagtgtccaaaactatcctatgacttatactcccggagcacgattccctgcaatgtgaagagaatcgacagataacatttcaaatgtgggtagatgggggtgacgtgacaatcctaaaacctgaaaatttcttagtacccataccatacaagaagaacccagttcggaccctgcaaacggggctcaggtccaactccaagcactctagtttcccaccccgcccccacctcgagaaaggagggaaaacaacttttattggcctcgtctctcaggggactggcaaactagcggggcagtgcttaggcctggacacgtttcacaaggaggcccccgtcgggggctgagagggcagatagctggaaagcccagcattgatgcatctcccccagccgccaccccgctgccccaccccgccaacaagaagcctgggccagccgccccgccgagcgaccccccaggcccctccgctgaaatgaactcgttgtcatgtgacgccgccgccgctaaaacaccgcagaaacgcaggtcggcaggcggcggaaggcattcgcgccagcccgcgtcggcccggccccgctgggcgcgggcgactcccgagagcccgggcgggggggggcggagggcgggcttggcggcgggcccgagcgcgccacaaaggcttccgcgcctgtcgccgtagtgcccgggcgggcgggggcaaaatttttggtgcccgcgggaggggtggcaagcgacgaagacgccggggtgcccaccgcgcccacagacgtctctccgggcactcggacggcccacgaccgccgcaccccgcacaggcccgcgcggcctccctcccccgcacggggcccgcgcccggcccgcccgctcgccgctcgcgctctctcgctctcgcccggcctccatcttggatcggcgcttccagcccccgcgccgctgccgccgcattccccctctttcccgccccccgccgccgtcgccgccgcccgcactcacctcagctgcccatccgggcgccgccgaccatcgacctagtttccccccaaaagtctccggtgtgttattcccgatgtgggggggttgttacggggtggtcgccgggggttcgggagcgggggccgcgccttcaacggagctgcaatcctaacccgccatctggtggcattttccacacgccaatggcgccgctgcagacttgggtccggaccgccctctgctggccgcggtgctcactgccttgctgacgggacgggcctgcccggaaaggggagggagctgaggcgcgagctaggggccgcggcaggggcgcgcgcaaacgctttccagtggggattgcgcgcacgcgcaccagcggggcgggaaacgtggccgctgcgtggcggccccgcccccacacggagcgctcgcgcagttcagccaatcgcgagaggcgtaggcttctggataagggcgctgtggacggttcttgggccgcccgcggctggcggaaggacggccacggtggcgcctgcgcgtccggctcgccgagttgccgcccgccatttttggagcttcttggagatctaggcaggaacccgccccgggttccttcaccgaggctcctccctaggtctcagggccggcgctttcctctgttcccgcccggctcctgctgcccccatccgcagctctcgagacgccctgcggaaacccgagggtgaggccgcgcagatccctgctcctacttggatttagcaagggcctcagagcttagcattgtattcgcgatttacggctgacaagcgctttcaccaggcaagagtgaaaaggtttcaaaaggactattggggacttccctcgccattaatctagacgaaacaccgccggccctaggccgattggcgtcatcctgcctctgtaaagcacatctttccgtggtgtcggctttgcataaggcggcagcattggctagtttgtgagaggagaatataactagactgagaagatagactcagctgtgaaagtggatttctccctccacaacctaggactactttcagtagctctgaaatacacatgagaatcttagccttctagatgccaaaagagaaataatcagtaaggtgaaatcattaacaaactatttatgtttaacgtcgcctcttccctgatctccacctgcccgtccgtggccatggatccctacctttcacctgcttacaacttttcaccacaaaagtgaatccttactctcctggatcattagccccatatatgactaacttctctatcgctatagccaactctatttcagtatggaatcgctcaactactttatagtcttaagggcctgtctccagtaggttacccctatttgtgttttctctctcaagggtttgcaagatgtgtggcttttcgctggaggaagtcataactgaccagattggatatgaattcgtgactggactcctacttataattttcttgcgtttt

SEQ ID NO: 2273 - DNA, 6000 bp, Homo sapiens
tagtagctaggaccacaggtgcatgccacaactcttggctaattttttttttttttcttgatagatgaggtctcactatgtagcccaggctggtcttgggctcctgggctcaagcagtcctcctgccttggcctcccaaagtgctgggattatagacatgagccaccactcttagccttgtaattcattttagatataatcatttcatcaagaattttttttttttttttttggagatggagtcttgccctgtcgcccaggctggagtgcagtggtgcgatctcggctcactgcaacctccgcctcccgagttcaagcgattctcctgccccagcctcccaagtagctgggattacaggggcgtgcctccatgcccagctaatgtttgcatttttaacagagacgggttttcaccatgttggtcaggctggtcttgaacttctgaccccatgatctgcccgccttggcctcccaaagtgctgggattgcaggcatgagccagcgcgcctggccttcatcaagaaatttttgtatctaccttaatgcattttctctaatggcttagaaatttagaattttatatcttggcagttgatgctataggatgggagtgctggtgagatgcagtcagtctctttgaaaagattgctgctctgggcattatgtctcagatgccttaccatttccagctgtctggtaagggtgagatcccagagttttatttttctagtttcatgctcttttattagtattgtattaattgggtgatttggtttcagttctgagattcttgacaaaaatctgtgttgaagaaactagggacgtgtacaggtttattatgtttctaattctgtgacagagggctgatgtttcataaacccacctcaattttaaatgctaacttctgggccgggcacggtggctcatgcctgtaatcccagcactttgggaggccgaggcgggtggatcatgaggtcaggagtttgagactagcctgaccaacatggtgaaaccccatctctactaaaaatacaaaaattagccgggcatgatggtgtgtgcctgtaatcccagctactcaggaggctgaagcaggagaattgcttgaacctgggaggcagaagttgcagtgagctgagatcatgccactacactccagcctgggtgacagaatgagactccatctctaaacaaatacatacatacatacatacatacatactaactttcatttttcctccagcttttgttggcagctcttggttagacatagtacttgagttacttgttcagtagctggcttccacctctgtctttgcatggtggtatttgaatataagcaaagtatatatatatatttttttattgttgttttgttttttttgaggcagactctcactctgttgcccaggctggagtgcagtggtgtaatcttggcccactgcaacctccaccctctggggtcaagcaattctcctgactcagcctccctggtagctgggattacaggtgcctgccgccatgcctggctaatttttttgtatttttagtagagacaaggtttcaccatgttgcccaggctggtctcaaactcctgggctcaagcactccacttgcttcggcttcccaaagtgctgagattataggctgagccaccctacctggccctgcaaagtatggtctttataagttaatacagcatgttttcattcagcaaatacttattgaatgcttattacttgcaagattgagaagctcctacaccagatcttcaaaggctgctctgaagtgatttgcttaattttaggactagtgccttaataacatgtgtagtgactgtgtagttttgttcgtgtttatggaagtttattggttaagagttcctgagtatagagacctttccatatactgtggtgagaaacagtactttaaaaagcatgttgacaatacctgaattctgtgatcaatcttagcatggctaaaagtaagaccactagacattatatctcctcaaggagcttataatgaatccatatttaaatttcccagattatttcaaagataggttttgtttgtttgttttttgttttttttgagatggatttttgcttttgttgcccaggctggagtgcaatggcacaatctctgctcactgcaacctccacctcttgggttcaggcgattctcctgcctcagcctcctgagtagctgggattacaggcttgaaccaccatgcctggctaatttttttgtatttttagtagagacagggtttcgccatgtcagtcaggcttgtctcaaactcctgacctcaggtgatccacccacctcggcctcccaaagtactgggattacaggcataagccaccgtgcctggcccaaagatagttggttttttttttttgagacagagtcccactctgttgcccaggctggagtgcagtggcgtgatctcagctaactgcaacctccaccttcctggttcaagtgattcttctgcctcagcctcccgagtagctgggactacagacacacgccaccacccccgactaatttttgtatttttatttttttgagacgaagtctcgctgtgttgcccaggctggagtgcaatggtgctgtctaggctcactgcaacctctgcctcccaggttcaagcaattctcgtgcctcagccttctgagtagctgggattacaggcacccgccaccatgcctggctaatttttgtatttttagtagacatggggtttcaccatattggccaggctggcctcgaactcctgaccttgtgatccacctgccttggcctcccaaagtgctgagattacaggcatgggccacagtgcctggctaagatagttttttatagttgatttgttccagctaacattggatttggctgtgtctcctaagtgttttttaaattctttaacagtccttccaccatcttcttcctcctcttcttgatattgattagctggagaaaccatataatttgttttattgaagatgccacattctctacttggctgattgcttccttgaagtatttaacttttttctctgtttcctgtaaactagcacatagatcagatctaaagccttgattagattcaagttcagttttgttttgtgtgaatggtaagtactgactattgcatttcatgaggagacacataatgtctgatagtcccacttttagtaatgctaagatcaggggattcctgtagtgtcaacaagacagacacggacgattgtaaagtttcttctcctttcaccttattattatttatgtctttagcatctattaatgatcattgcctagatctgttagttcattagcacttgcagaattgtgattttctaatttattattctttttccatttattagcaaaagaagttctaaaaattgttttttaatttttatttttttaagacagggtctcactttgttgtccaggctggagtgcagtggtactattttagctcaatgcagccttagattcttggactcaagcaatcctcatgcctcagtctcccaagtagctgggactacaggtatgcaccactacgcctggccaattttttgtatgttttgtagagacagggtcttgtttgttgcccaggctggtctcaaactcctggactcaagcaatccacccatctaagcctccccaagtaatggtattacaggcatgggccactgtgcccggcctcctgtctcttttgatatgacactttcattaatggcataattgttaaatgaaccttggttcatttaactttagcgctcatgttcttccaattattattgttgtatcttcttgaaggaagcccttaaggaataggtaagacttaaatggcactattaaagggtgcatttgttgggatagtgcgtttgttttgatatgaggagtttattcctcatgtgaacataggtctagcagcaggaaggcagaaggcactgtgataccagtctcgggctgtagagtgatgggagagcaagaaaaataggccagagaaatagcacaaggggccttgccatctgtattgagcgatttggtgtttttaatgcttaggggatgggccgtgaggttgatagaaaattgtccttgttggctgggcacggtgggtcacgcctgtaatcccagcactttgggaggccaaggcgggcggatcacgaggtcaggagatcgagaccatcctggctaacacggttgaaaccccgtctctactaaaaatacaaaaaatttagccaggcatggtggcaggcgcctgtagtctcagctactcgggaggctgaggcaggagaatggcgtaaaactgggaggcggagcttgcagtgagctgagatgtcactactgcattccagcctaggcaacagagagagactccatctcaaaaaaaaaaaaaattgtccttgtagagaaagggccctcttgattgcaaattgttcttgttgagagagggccctcttgattgtcattttcattggaatttgcagagaaaaactcagcctaagaagctaatattttctaaataaagtttggagaaaaatcacctgtcaagtgctggttaactaaatttcttaggaccctgtaatccttaagcatgcagtttattcagatgtcaaatatctatgttgaatttgaatcaatgtggtgtgtgtgtgtgtacatatgtatgtgtatatatttttatttatatgtatataagaataatttttttcctttagttggtggtatggattggataatgtacatatatataatttgtgaagtgataaaagtgtatttaaataatttatttctgctgacttactcttggtttttaaaatatcacattatttaattggcctcctgttacattattggctatattgaaatctaaggactaattgtagattagtggtctttatcatatcttggtataaaatttggctgatggttgttttgctatgttttaattactgatttctagggccccgtggttatgaatgtgcttcagtttcataatgcctcctgctatggcagacatccttgacatctgggcggtggattcacagatagcatctgatggctccatacctgtggatttccttttgcccactgggatttatatccagttggaggtacctcgggaagctaccatttcttatattaagcaggtatgttaataggtataatttctatgtgtttagcatactgtgtcacttgggggaaatatcattctataatagaaaatgttaatgtaaattatatgtgataatgatagtaatgaagtgatggtaattaagaaaaattagtttatgttagctagtttgaaatgtttgtttgggttattaaaactgtcaagaagattttcttttgagttcgtctttgaaattactgtctttgagcttgtcacacttttaaaaatgtgatttttggttcattttctcttctctcctttttcttctcttccccctttccttgactcttgggggaagaaagacttttctgctgttcaccagatatttttccctcagcaggcttgccttttctgttgcattagtttttaaagtaaattgatgagcaccgttgatttgtaaaaaccagcatatacatgaacttgtttttctaaactttctttctaatgtttttcaaaaagctgaacccaatgtgaatatcaggagttacggtatttttaagaaaacatatttatgatatacctctgaaaactcttggctttggacaagcctcttaactcctttccaagcttcttcattagagaaactggaattctaaaatggcatgatccttaaagtaaaaagaaaatacagaattgacttaagcatctcatacgctcatgcatggtgcacctatttttatagtcaccagtgacaagtatggattcctatggctatacttcacattagattaaccatttatctctttttaattgtgaaatatacataacctggaatttactatttagacatttttaggtgtgcattc

SEQ ID NO: 2274 - DNA, 6000 bp, Homo sapiens
agttaaaccaggcgcggtaggtggctcactcctgtaatcccaacactttgggaggccgaggcaggtggatcacttgagcccaggagttcaagaccagcctgggcaacatggtgaaaccctgtctctacaaaaaacagctgggcactgtggcgcatgcctgaagtcccagctacttggaggactgaggcgggaggattgcttgagcccaagaggtcaaggccacagtgagccgtgtttgcaccactgcactcctgcctgggtgataaagcaagaccctgtctcaaaaagaaaaagaaaaaattatagttaatttcagttatctgagtcacttttaaaaaacgttctgtttttatctgaatgtatctggtcaagttttgagcttgagaaacattgtgtgctctttgatatttaattttcacatatttgaatctgtggattctggatgtgtagtattaagtcttttcctctttatgtgaggtttctcttgtattgtttaaattgatttgaaatgtgttatgctttatgtcttcctgcttttttctttttcttataaaataacctttactactctaaactatgtattctcacataaatggaatctgtgacccaacagttaatttacatctggagttattaatttaaaactcctttcattaaggacttttggggaaaaaacaatataccaatttattttaatctgtagcagtagaaataatgaatgaaaaatggaaaacaactgtttctctaaagacattcattaattatgctagagcatgaagtgtgtagcactttcagaagacttatttataagcaaggttgcattccactactctgaaactatgtctaaatggcctcacccaccattagtaaaagtactcaaacatttaagcaataactcttcattgccggtgttttcatcttttcatctatagagcaataaggataaattttacccataatgtacaacagcactgtggactatgttaaatgcaaagttatttagacaaagatatcttttaacatacctaatggtttcagaaagtctctaagacttcaggacacattctagacatgatattttccttggttagttgaggactgtttatcatctgcagaaatcaagctaaagatacaacacaatttactgtaactatgtgaagaatgtagtctagctccaaacctcatagagatttaagctcaaataagagccctcatttcaaggtagctcaggttatattttcagacatttgctaagcatttgcccctcctcagccactactataggtgcaaatgagataaagcacctgacttaaaaatctgcattttgaaatgtgattatataagcaccaaaattaaacatactcaaatttttatgagtcttgcccttacagtactcttctgttttgagagattattttctattattttttgtttaatgctgctataccccaatttgaatttctcctttggaagcatgtataatttttctcccattgtcagtttgaactaatgtgcattttggcccttacacagtccagttctgttaataataagtagtgatgtgtgctactaactcagttactgtaaatctcaggatcagcaaaacaaaggtcacaagaaggagaggcgatttggaactctaccttcaactgggccatcccaagtacttaatttgtccccctacttctgaggtccttttttcagttctgagttcttgggcaggaatcagaattttgtttttggtttcctaattgttgtaagattccattgctgtctcttgaatgtgtccctccaaaattcatgttgaagcttaatccctattgtggtgctattaagggatagagcctttggggaagtgattaagctatgagggcttcattctcattgaggggattagtgaccttataaaagaagttgaggctgggtgtggtgtctcacgcctgtaatcccagcactttgggaggccatggtgggcgggtcatgagatcaagagactgagaccatcctggtcaacatggtgaaacccatctctactaaaaatacaaaaattgccgggtgtggtggctcatgtctgtaatcccagcactttgggaggccaaggtgggtggatcacgaggtcaggagatcgagaccatcctggctaacacagtgaaaccccatgtctactaaaatacaaaaaattagccaagcatggtgacacacatgtagtcccagatactcgggaggctgaggcaggagaattgcttgaacccgggaggaagaagttgtagtgagcagagatcgcggcactgtactccagcctgggtgacagagcaagactccatctaaaaaaaaaaaaaagttgaagggagctctttgcccccttctgccccacttcatgtagtgaagacactacaagaaggtaccatctatgaagcagagagtgagccttctgaatttgctggtgtcttgatcctggacttcccagccaccagaactataagaaatacatttctatcatttataaattacctatgctaaggtattttgttatagcagactaagacaaaaattagtgccaagaactggggtgtggccataacaaacacctaaaactgtagaagtggctttggaactggataatgggcagaggctggaagagttcagaggaacaggctggaaaaagcctcttgagatgaatggaccattaagggtgattctggtgaggaatcagaaaaggagagctatagagaaagcctcacttttcttagagattacctccgtggtcatgaacagaatgttggcacaaatatggatggtaaaggccattataatgaggtatcagataggagtgagggacatgttattggaaactggaggaaaagccatccttgttacagagtagcaaaaggctgggcccagtggctcattcctgtaatcccaacattttgtgaggccaaggcagaaggatttcctgagcccaggagttcaagaccagcctgagcaacatagtgagacctcatctttatcaaaaaaaaaaaaaaaaaaaaacactaaaaataaaaaattagctaggccgggtgcagtggcttatacctgtaatcccagcactttgggaggccaaggctggcagatcacttgaggtcaggagttcgagaacagcctggcccacatggtgaaaccctgtctctactaaaaatacaaaaattagccggacatggtggcgggtgcctgtaatcccagctacttgggaggctgaggcaggaagatcactcgaatctgggaggctgaggttgcagtgagcagagattgcaccactgcactccagcctgggcaacagagcgagactttgtctcagacaaaaaaaaaaaaaaaaaaccaggcatggtggcacctagccactcaggagactaaggagagaggatcacttgggcccaagagtccaaggctgtagtgaccctgacagagtaagactctatctcaaaaaaataaaagaactaaacaacaaccaaaaaagtggcaagggacttcactgaattgttttcctgttttaatgttttgtggaaggaggaacttaggagccgtgaaattggatatttggtcaaagaaatctctaagcaaagtgtttagggatcaacatggcttctcttggctgtttatagtaaaatgtgagaagagagaaatgaattaaagatataatttatcatcagaagtgaagatttgggaaattctcagcttggccatgtaaagaataaaaaagcatgttttggagagaacaccaaaagagtggcctagtcaccttttgataaggagattagcgtgcatgggtggaagcttggtgttgttcatcaaaacaatggaagaataaacccatagcatttcagtgattaccggtgctgctcctcccatcacaggcccagagtgccaaggcatgggggacagaactatcaaaagaggggcttcaggcgctaatgaaaccctggcaatcccttcctggcactgtgtcaagtctgctccccgaattttggcacagtgctccttagccattccaggtgtggctccagtaggcccaagtatagtggctgctcctctagagggcacaggtggtgaaccttggcagtgtctgagtgatgccatctccagtgggtgcagagtgtacaagctgcggggtatgataacttccacctagatttcaaaagatgccctggagagccttagcagatcctggcagagaattgctacagaggtgaggccaccattgggaaccctcaccagggcaaagcttggtggagctgaggtgcgcggggttgctccctgaggccctagtctagtagagcttccagcatgcaactccagcctgggagagccacatgcagaagactcaaactctaacccaggagaactgcagcatgggctgcccccaataaagtcatgggggtgggggcccctggtaccctgggggcccaactcctgctccagtgtgtccagaaggcaggatatcaagtcgaagattattctgaagccttaaaagttaatgtttgccctgttgggttttgtattggttgggacctattatccctttcttcttttctattttctcccttttggaatgggaatgcatgttctgtgcctgtcccatcattgcattttggaaacaggttggatttcacagactcacagctggaggggaatttgcctcaggatgaattgcacctttgagtcttacccatatctgattttgggaaggagttaagacttgtgagactattggaatgaaatgaatgtattttgcctgtgaaatagacatgaattttagagggccaggaactggatgctgtggtttgaatgggttcctccaaaaattcatgttgaaacctaatccctactgtggtggtattaagaggcggggccttttgggaagtgatgaagtcatgagggcttcacccttatgagtggaattagtgcccttataaaagaggttgaagggagcaccctggaccctttctgctattaggatgcaaccagaaggcatcatctttgaagcagagaataaaccctcaccaggcactgaatctgccggcactttcattttggacctctcagcaacctccagaacagtgagcaataaatttctgtggtttgtaaattacccagttttgtactccttgcagaagactttaaagaaaattaattaattacccagtctaaggtggtttgttatggtagcctgaatggactaagacacccagttacagccatttatcgcttctcctctaactccctcatccatgatttttaaaaaagtttttgtttagttaaagaattcttggattaggctgggcgtggtggctcacgcctgtaatcccagcactttgggaggctcaggcaggcagatcacgaggtcaggagatcgagaccatcctggctaacaaggtgaaaccccgtctctactaaaagtacaaaaaattagccgggcgtggtggcaggcgcctgtagtcccagctactcaggaggctgaggcaggagaatggcatgaacccgggaggcggagcttgcagtgagctgagatcacgccactgcactccagcctaggcaacagagccagactccgtctcaaaaaaaaaaaaaaaaggaattcttgcattacaaactcacccatttgcttcttagccttctttttgtgcttgccctttgaactttacatgtcttttggaagccaaatcttaatggtagatagaaatttcaaaaggccccatgaaaagttttgtgtggttatggaaactagtttagcagtacctattttagtttgagatacttgcccttttcttacaggctgtcttatggttatatgttatagatcttaagattatttatacagttgacctttgaccaatgcaagggataagggcacagcccctgtgcagtcacaaatccatgggtagcttttgactcccccaaaatgtaactattaataccttattattgactagaagccttactataacataaataatcaaataa

SEQ ID NO: 2275 - DNA, 6000 bp, Homo sapiens
tatttctgtcctctctagaatctttgctttctttccctcctatagatccctcgccacgtagctcgtgtaggcctcccttatctttgtgaagccttaaacttaattctgtgggccccactaagttgtgataaagcatgcataggggttttggtagaagataacgttaacacaggtagattggagctgggtctatgttgaaaaaaatttggattactaatttaagtggtttgccattgatttctagatcagagatgtttaatagaactttcttcagtgatggaaatgttctatatctacagtgttcaatacagtagctgttagccacatgcagctccatagagcacttgacatgtggctagcatgactgagaaatcaaattttaaatttaattttatgtatttatctatttttataagacagagtctcactcagtcgcccaggctggagtgcagtggtgtaatctcggctcactgcaacctctgcctcctgggttcaagtgattctcctgcctcaggctcccaagtagctgggattacaggggcctgccaccatgcccagctaatttttgtgtttttagtagagaggggtttcaccatgttggccaggccagtcttgaactcctgacctcaggtgatccacccgccacagcctctcaaagtgctggaattacaagcataagccactgcgcctggctgattttatttaattttaatcaccttaaatttaaatggccacatatggctaaggctaccattttggatggtatagctctagacatcagaagttatatttctcattttgttttgtttttaaactgggagaatgatatatgttagaaaaaaaatggaaacaatgtgggcatttgggtggtgaggatgaggcaagaagaaaatcactttctgttcttgatattaatgcctttaacaaggatgaggaacctaggaggatgagtgggtttgggaaggtagacaggaagttcaatactgagttgagattatgggatatataaacagagatgtccaataggcatctaaagaagagtttacagcagaacagaaaaagccagggctagaagtataaatttctgtagtcatctttgtagaggtgataaagctatagaatataggtcacatcctctagagtgggagtgtagatcttgaagaaaagagcattgagcacagaactcagaaaaatgtgcatattgaaagagtcgagctaagcgtagtagctcacactcgtaatcccagcactttggagggaggcaggaggatcacttgagcctaggagttcagcctgggcaacatagcaaaaccctgtctctataaaaaatacaaaaattagccaggcatggtggtgcacacctgtggtcctggctgcttgggaggctgaagtgggagggatcacctgagcccaggagattgaggctacagtgagctgtgatcacaccactgcacatcaactccagcctgcatgaaagaacaaaaccctctctctcttaaaaaaaaaagagagagagagagaaagaaaaaaagtggaaagaggaagagcagcaggcaaacaggaaatatgaaatatttactatgcaatgtttttaagaaattggcacctaaccatgcaagtgatagcagaaagtttttgctttaggtgtagtgcttgtcaggaagattcaatattttacttgaaaatgtaagtacaggtacaatgtaactaatttctactgcttcattatatagatctgatagatagtttttatttggccaatgcctgccatcattacactattatagtgttatttctgcctatagaatcataaatgtgtctgttaaatgggcttaatatttgggcagattgccaataaatgtcacaaactccagtccaaataaatcagtttataaacctaggagaatgtccagctacctttggtgttttccagataatcagtagttgtaattaatgatgtttaaatggattttctacataagattaaggagaaattgtttgacacaacctatataatctgcatttttatcatctgagtgggaagtcttattactttccccacactgtgtcatacacttgcagaagaacataaaaggtagtgattatgctacgtgccaagaaagacatcagagcagattgaaggggtgtagtatgagtaaagaatttgagaccagagaaaaggctctggaaaggaaggcaagcatggagaaggaaacttgaaggaatagattggctgaaggtcagatctgtggagtagacagtaggtaacaggtcaatttgttgcccagctcagtgcctgatacataataggtgctcagtatttattgaaggaaggaatgggaaaaggaaaattcattctgcaagaacagtagaatcctactttggccccaccttattttatttgtcacttgacctcagttatcacatctttctgaccttgggttgctgttaggtttattgttaaaacatacactaaatagtttatattttaacttgtaattgttgtctagctctggacaattggagggccgggggggtgctctcctatttagagaacacgggaatacgccgggcgcggtggctcacgcctgtaatcccagcactttgggaggccgaggcgggcggatcacgaggtcaggagatcgagaccatcccggctaaaacggtgaaaccctgtctctactaaaaatacaaaaaattagccgggcgtagtggcgggcgcctgtagtcccagctacttgggaggctgaggcaggagaatggcgtgaacccgggaggcggagcttgcagtgagccgagatcgcgccactgcactccagcctgggcgacagagcgagactccgtctcaaaaaaaaaaaaaaaaaaagagaacacgggaatatacttgagtacttggatgtttaatttccttttgttttaagactataacagagtaggtgtgaccatatctagcccctgaatattctggccttgggtgacacaggtgagcacttctagctgatctgacaggttaaaggtgtacacttattttctctgtaagaagcgtcatctggtaagatgatcaagaatggtgcaaagcaggatggggagtttaaaattgtttccaaatgtgggaatgtaaatgaatataaacatgtaagattttaatataccaaactgatcagattctgtgtaatttccaagtttcttttttctttcaaaactcctctgaaatctgactgtccacaaaaacttactttatagaattttatgtgatttatttactcagatattatactgacctcacatccagtagtgaaaacagattttattgtagaatctggaaagatagagggccatataggttgtattttcagttttgtttatactaacacgtgtttacaacccagtttaatttacaccctgtattgtattattgttgtcatatctctgtatgcatgtaagtataatatgtgttggcaaaggaaaattttgagtaagaagaagctctctgatctatttgattcaatatgtatttgagtgtctaacagacactgttttagacactggtgatacaacactgaacggagcaccaaatactttacagcgtctcctggagctgttgtcaagacatactttccaaggggaatatttcagaataggtgataactagtcaacgaaggaaaagtaccttagtcatctaggagagttgtacttagagtgaactgaaataaactaagctcacgaaagacagagattttttgtttggcttttgtctgttgcattcactactgtatctccagggcccaaaatagtgctcggctcataataagtattcagcaaatatatgttgttgattggagtgtttgttttgaatttctgtaatcaaacacataccttggtaaattatctttacatcttgctagttgaaaattttatctcagttgctttgtttttaatgttaccttgctttttgtttctacttgtgccatacatcaggatgctggaaaagcttattaatattgacagtcatatggttatctgatattgaaaagaatagatttggaaaggaacctaagaggtcatcttttgttcagcttcctgcctaggaaaactaagtaagatgattaggtatgtatatttaattagtcatttaaaaaaaaaccaggacaacataattgagttccctcttgagaaaatggagaaaggtacttaaccctagctataaagggactaacctggaaattttagaacttctgtgtgggaaagtggaaaaaaaaaaaaagcacaactaagctgctctttgttgatatcagaaatgggcctgtcattcattttggcattgaagcatagcctcctatctcggggcaggactgggacatttttttcctcccacaagagctggacagttattacaggttcaaaaagccccgaccagtttttcaagagtttctcctcctcttttccccctgaaactcgtggtgcttttgctctgctttcaagatgcattaagtctcctgctttgtgactgctttggagccagcagatactctgatatgtataattcaaattatgcaggtttcacgagtaagtttaatcttattttttaagttagttaaaaggcaagtgatatttagaaaaatgttaacttgtagttatttcaccctttttactttaagcatttttattgcttctcggccttttggctaagatcaagtgtgtactttaagcattttttaaaataaaaatatccttttaatttaataagaaaacaaggttctacatagaaaagccccttcatctaagacctgcacttttcaatttcttttgagatgtctttgttgtaaacagtattcatatgtcttttgaaagccagttaactaaacagttttcttgagcatctttttagttttactgagaagtattttaaattgagcttttctgagctcgattgcttacgtctgacacagtctcaagtttccactgaatggtaacaaagactgtagaatgttgttggtactgcagtgagaggcatgcttccttagaccaggtaagagagatcagtttgtttctcactgctgggtgagtttttacagctcttattttatattctttaagcagcagcaatattaaattgataaatagccaggagcacgctgatttcaagacgtccttgcttgttgcagacagaaaaactacagggttatgtatgggggttggggtggggggggaggggaagaattagtttattactcagttacttatataaattaattaaaatgtgaaaataattctggagctcagttttcttaattcaggaactaaagcagcagttgaggaaatcagtaattttaaaggtacttcatggttattacttgtgaaagcaattcaaaggatagtttttactttcatttttttccccagtagttaataaaataagctttgcccttaactaaacattttttccacttacgaaaacttttaaattgccaacagcaaaatatacttcccaaggatccttggaaatcaacctgacacttgaaaaatatttcagcttttatagctgtttcattcctttttttccctagtacatttttcttaaaagtatttgtgctttgaaaatgtcagctgtattctaatgaagcttaggcattgtttgctcataaaggggccggtgcattccactgctttatggtttattatgaggcacagtgtgagagtgtgggtggcaccatttggtgtctgcctcttggggtagtgactgccattatgttagccttggactggcaaagaaaatatagcatacaagatgctatatgaatctggatactgtgaagaaaatcttacccctaaacaattcttaatgaccccggaatatatgacaacttgattgaattgatcatttcaattatacccttgaagtttgcattttagttacaacgtatattctattagacacgtcttattttttgatatataatagcatttagtcattctttgaagttcaataaggaagtgaat

SEQ ID NO: 2276 - DNA, 6000 bp, Homo sapiens
tgcctcattgtgccttaccatatctcctgttctggactaggatttccttgcctctcagcttggaatacttgtctgaacttgctctgttattttcacccatgtccaaaccttgaagtactagagagttgacacccgacagagcaactttttcacagtgaggatgggagccagtgtgtaaatatgcccctcttctgtccttcaagtggacagttttgaagtatgctcttcaaaacttcttggagagtcccgtccaggatcaagcctcagtagcctccagcagtgatcatctcagtaacacatctcagtaacccataacacatggggttggcttttcctccttcgtgtttcacgcttgccgtctcccactccagttcattggaatcatctcccaaaataaaccaactgcatgtaagaaattgtgtcagggtgtttgtggggaaggagaaccagctaagatctgtgcattaccagttgttaaatattttgactgtcacccctgttcataatctaagaccctgtggaaaatttcacatgtacaaaggagacaggaatattcatagcatcagaatatgaaaaaaggtaaaaactcccaaatgcctttcagtaagagaatggattatctgccgggcatgttggctcacatctgtaatcccagcactatgggaggccaaggcaggcggatcacttgaggtcaggagttcgagacgagcctggccaacatagtgaaaccccgtctctactaaaaatacaaaaattagctgggattggtggcgcgcacctgtaatcccagctacttgggaggctgaggcaagagaatcacttgaacctgggaggcagatgttgcagtaagctgagattgcaccactgcactccaacctaggcaacagagcaagagtctgtctcaaaataaaattaaaaaaaaaataataaaatagaatggagtatgtaaatgttatttttgcattagtgaaaatgaatgaccacccatcaagatagatgaccctcttaaaatgttgaacaaaaaaagattggcagatgaataataaattttattctaaatttatgaagttcaaaaacatgaaaagctaagcaatatattatttggatatacatacacgtgtgttaagattataaagaagaacatggaaattatacacagaatttaagatgttattttggaaagggaaagttgtggggacacactggtagggggcacatgaggtttcaatggtgttaataatatgttgcttaagcaggtacatgagggtttatcatgattcctcatatctcacatttactttatattttttagggtgaataaaatattttatcctaaaaatattttaggtttgatattaaggggttacttttattaagggtgactttgaaacctttctactgctctaatgcagtcattccagaaaactggggagaggttgaatccctccctgaggaaattccgaggcttcgcctctactctgtcctattaaggtgattaaactgtacataacaggattgtctctagaagcaagacccagatttaacacttataagtgttatttcttttgtcagtcactagatggatttggtgtgaaaagaagatgctttaaaaaaaaatctgaaactgttctgacaactgcagatcttttcatgtgataaaaggtgtcactaaggaccttcttactccaagtgtgatttttggctgctgaggcagcaccagcatcacttggaagcctgttggagatgcagaattgaagccacaccttacagactgaattgtaagattccctaagtgattactgtgcacctcaaggtttgagaggcagtggtccaggagtctggtacttccacctgcaaaagcagtatccagtgccagcagagggggcagcacgtggaaatgcctcaggtttaactgtaatggacccgtctttttcacaaccctctttgtgttggctattctgtggcccgcatatttctaaatagagtagactttattatacctctctcctctttccaaatttgctgggctgtggactctcatctattcaataaaaacattgaacttccattaagcactgaggagatgatagtgaatagaatgatatgactttgactctagaagcttacagtctaatgggatgcaggtagcaagtgagtaattacaagtttaatgaatgttggaaagtcaaagaaaattttatgggaaaacagttggagatggggactccggggaagcttttctggagaaagtgttgtttaagtttagatgaaaaggcatgtgcaggtgagttgtgggtgaactgggggattgttccaagcataaggaatgccaatgaatggtgctctttggacatctgtttgtattgccagtgccttgcatagttcttggcatacaataagtgcttaataaatgtttgcagaatcaataaatgttctgtcacatttcagatgtctactctctggcattggagatggtggaaactttattttccttttcaaaggaaataagatcccttaatggggaaataagaaagaaagctgactgttgtgcaaattgctaaattggaactatgagtgggaatgaaaaattgatttacatgaattttcttccctgtagcaacttgacaatttattctgttctggagaattctcagtttttggcttaaaaaccaagctgttcctccttattctgaatttcttggcctgctgtgaaactaacatttactgtcttttacaacatgccctgattaggtcatggaaattcacaactaaatcaaactaggatatggaaaatttgaaactttcactgcccattttatgtaatggcgttggaaggtgttataaaacattgacttttaaatctttattttcaaaagctatattatacgatgaatataataattgccatcatttattgaacacttactacatgcattacatagcaaaatcctcatactacctctgcaagagagtaagttgaaccatatgaaaattgcccaatatcagcaatttcatgtggttcaacctagtatcttcagactctgacctataaagaggttagggaatccctcatagccataacttcactccaaatttagtactgaatcttttagtactatcttttatagataaagagatcctaagatagttacagctcctctatgacagcgacccctttccctacattagcccaagcactttgtgtgtgtacttccatcatggttatttacgcattgaattgaggtggtttacaatccatttcctctgctacactgagttccttgagggtggatgttttgtctgtcttgctcatttttgtatacgtagtacctagagtgaaaagtatttgttgaatataactttaagttttcttaaagttatattttttgtggaaactaaatttttattgatttgttactggagaatgtgaagtaatcactggggtttttgcattttagaatcagtcagtggagtactgcatttgacattcttggactctcaggactagttacatgcaattatgcatacaattgtctctccaccctgccccagagaaagatctgaaagtgctctcttacctatctcatctcctttaggcatttgcttaaataccaccttctccgtgctaccttcccagatcactctatttaggactgaagccattcctccaacacctctgcttatatttttttcccatagcacacataccagcatgtaatatagtttttgttttacgtattcttttgcatattatctttcccatcctgctagaatgtaagctccatgaaggcaggagtttttgtctctattttgtccactgatgtctccccatatcaagaatagtgtttggggccgggcgtggtggctcacgcctgtaatcccaccactttgggaggcccaggcgggaggatctcttgagtccaggagttccaaaccagcctgggaaacatggcgaaacagccgggtgtggtggcgcgggcctgtagtcccagctactcgggaggctgtggtggtaggatcacctgagactgggaagtcagggctccaatgagccgtgatcctgccaccgcactccagcctcggtgagagcaagaccccgtctcaaaaacaaacaaagtggcatatagaagatctataagatttgactggagtaaaatgagaaagatctaatcgttttaatgcgctgttcacacggggtttttaacttcggcacgaacgaatgaacaaaatcttttcatatggaaccaagtgtacgggtatttggggtgtgtgcagtttccgcgggacagaatgacctgtcctggtttgggtattaacttgccttgatattgaagaacctccacattcccagtggtctctaactcattgtctgaataatttcaaggtgtcccacagttggccccacgcatagcctcaatcacgatcactcgcccccctgtcccttattgatgctcccccagggcgaccccgcaaaggcctggggaccgaatggaactgccccagtccccctccttccaagagagctggggttttctggcttcggggtcagttggaaaagagattcccacccaagtcgcagggtgggagtaggggggatgagataggagtgatgaaggaagtgtgtctaaaattctaggcctcaggcccgcagctgtccctggaggcggcggggaagcggggtggtcgggtcctgcggagggctcccagggaggccacagggggaaccaaggggcggtggctgagtgcacgagtcccgcccctccatctgttggccccctactctcaaagggaagcctgggggcggggtttgtttactccgtgcacgcactgccggcccggccaatccgtggggagcggcgccaggcgtcgcacattctgagggccaatcggcgcgcactgtgctgctccgccgccaaagctcgcgcgggggaagcggggctgtagctgggcagggagagggcggacgaaatcggtagcgatctcggctgcggcgctgccgcagctgcccggcccgcggggcgcgccctgacccttcatctttgggcaggctcgagggcgcgcgcacggttggcgttctggggcctcaaactcctgggccttgaccgggcaggccgcgtctccccgggtgtgagtccaccgggacccggccgccgcctaagcgcgggcgccacagaagcggcggcgcccgaagacgcgctcctggctcggcccgacagcctcgcttggccgccagttcttctgcagccgaaggcggtaaggtctggggcgagggcgcgggcccgcgcgcggagggcctttggacccggccgggcgcgttcctgggtaggtttccctccctgcgcacaggggcccccttgttcccccacgagtcccatctgtttagacctgggttctccaggcctggccgggtaacccgtgagtgtctgggccagagtcgaaagcagaggagggtcaccctcttagtgcatagagcaaatcgggggaggtaacgtccctgagtcacgcctcgtggaagaggggaagggctgctttctactttctcgttctcttcaaagaaggatggcttctaaatctggttttccgatttttcccttctcctttcatgactcacaggcctctgtgtccaccaggtgttttgtttgtttttaaagagtttctaagctttgtgtgcttggaagaacctcatatgccccataaaggaacttttctctgaagtagaggatcgctttttgggcccagactcctttgagaaaatctggaaagccaaggtctgtcttcacaaagaagtgtaagggttttcctaggatctcgctgagagacagtacaacgaagtggatgagcgccccagtctctcttaccagcctgtgctatctcccattgtgtgatctcggtttcttcatctgtaaattagatgcatccacctattcggtgtgtttcggggagtgaatggactaatgtatggaatgcaatcgtaagaaaatcctccacgtattaaatgcc

SEQ ID NO: 2277 - DNA, 6000 bp, Homo sapiens
tagttctctagtatcacaatgccataagttttctttattgtcagtaatgttaacagtattcgcatttgtataataaaagttcatggcacacttgtttaaccatagacaattcacagttatgagatacagtaggaaaaactatagtacaaattgcctgaacttacagaacaacaggtctgagctttaatatcatgataccagtatgtcacaagctatgttaacaaatgcagcaattcacttcttacttagttgaagctgcaaagtttgcagatagttttgttgttgttgttgtggtggtggtggtggttgttgtttttgagacagagtctcgctctgtcatccaggctggagtacagtggcacgatcttggctcacggcaacctctgcctcctgggttcaagcagttctcctgccttagcctcccaagtagctgggattataagcgtgcaccaccacagctggctaattattatatttttagtagagatgggtttcaccatgttggccaggctggtcttgaacccctggcttcaagtgatccacccacctcagcatcccaaaatgcagggattataggcataagccactgtgcctagctcagatagttgtttttaataagttagaatagattgaggattcgttttttttggtggggggcactcttacatctttaataagtcttgtacaggcttactaaatacaatgaattataccaactatatgctaataaagattaaaaatttacattccagttaactacctaaagagtttaagtccactttcatcctactgatatagctcgaggaaggctagacctgtacgcccccatccttcatgtcatccttaaccctttgtcttgagaaagaaggtttagctgcttctttagttcttctaaaagaactaaaagaaaaatttctttttcttgctctattatcttcatctgtagggtgagattaatatttccagaattgtggaaaaattcactctgtagcagttgaagagcagatggtctctgggacatgttccttttcgttaagtgatagatatacttggcttgtactggataccttttactgagggattccaatatctgaccagttcttgaacctgttaaaacttctgctcgctccatttctgttctaaacagctgaaagagctctagcaggatcacactcaagctatatacatatctaactggacaaagccagccctggtctctacaaatagtttttgtttttttttaattagctgggctcagtggcacactcctgtagtcccagctacttgggaggctgaggtgggaggatcacttgaccccaggagttggaggctgctgtgagctatgatgacaccactgcactccagcctgggcaacagagtgagacccttggcatcatactcagatccttccaactgctgggatgaagcatacagacaagtgcccactctggatataggtgttggtgttctctttctgtttctatgggtccagtctgtgttcttttgtaagatgtctgggcaagccagaccaaagtctcctatttttacttgctgatcagggccatgaagaaaaatatttctaggcttcagatctctgtttacaatacccatgttatgtatgtaaaacacaccttccactaaatcttgaaaattttttgttgcaacactggccataaggacaggcaaacttgcccacacactcttggccctgtttgtttctctcagctagccagtcccacagctggagcttgcacacctgcatctggatgtgcagcatcaggtggtactgcacctcgatccccaacaagttgaagttttctttggaagattcctcagtggatgtgaaattctcctctaggagggaattacacctgagcagcaggggctgtttcacaattgaccaggtagacaaaccagccaggccattttcctggagctccagggatgattcatattcactggtgtctcttaagacggaattgatggtgtagttcacagcttgttgttctgattttgagtgtcagattctgcaaagggtttttcttttctgaggtgagctccgcgaagataatgggtgagctgctattttcaccatttttaacaccgtattggtatctgtctgcttggtcggagaacacttccagaaatggcaactgaacggaagctctgtctgcttgtggttggaccacttgaacatgttctgtccacgcagtgtgataacgaatgatattagggtgctgaagacctgccagcaccttcattccccgtagttctttcatgtaatgtgtttttgttgcacccttaatcaggattttttaaattgcataatactgaccatctaatttattcctgaccttgtatactcttccatatccaccttttcctaagatggcaagttcttcaaattcatttaagtaacgtgaagtttgtgcttcaaagggtacttcccttgatctgattttctggatatgagaaatagcctcacaaggatcctgatgaactctctctttagtggacctcattaagtgagtaatagctctgtggtgatgtagtctcaatgagctaaacttgtcacaagtgaaagaagacagcagccccattttgataaaggtctggcaaagtaacttaaacactgtcttgaatgaactgggtttggttcacgcacatggctcaagtgcttcaccaaagaaataagcggcagctggtttgcaactgcaaaagggaaagttggctgttgtaggggttattttaatacctggagttctgctggaacataagtcatatttggagtccaggctcttggcggaaaagtcgatggcagatggcacagcaacagtctccaccccgtggccctcctctttgtgctcgtgggctgcagcgcagcccaccagcccacccagcaccacctctgagaattattcttctaataacgttattcttccttttgcattcagatatgcttaagaaattgtacagttccaagtagctcacttagaacacccatttgcatgtactaacataatgtaaatattaggcagtacagcattgttatttgaatattcattgaaatgtttaagtcctaaacacttccaaagcagatttaaaaaattatttttctagaattgtaatgtgtaaataattccctggtatttcacgtagtccagaaacatgtccaagcagttgatgttgaatcaatcttgcgagcctccaaatcagtatcacaagctaactgtatttgtttaatttcttcttttcctgtatttgctcttacaaaaggggtattggtcagtaaaatggtattaacatttattaaatgtcaaaatataaagaaaggtagtaattccaaattattaacatctgtttttggttttatgtttcttctttttaggccaagacccatgttcttgacattgagcagcgactacaaggtgtaatcaagactcgaaatagagtgacaggactgccgttatctattgaaggacatgtgcattaccttatacaggaagctactgatgaaaacttactatgccagatgtatcttggttggactccatatatgtgaaatgaaattatgtaaaagaatatgttaataatctaaaagtaatgcatttggtatgaatctgtggttgtatctgttcaattctaaagtacaacataaatttacgttctcagcaactgttatttctctctgatcattaattatatgtaaaataatatacattcagttattaagaaataaactgctttcttaatacatactgtgcattataattggagaaatagaatatcatgtgttcttatggtcaaaaactatatttgcaagaaacaagcaagtctaatttcattttacaacttctattgatttccttttaaaagtcctagctattgtaaggattcacttgaagaacaaaattatatggaataaatactgtgggcaaggcgttgtgccagacttgtgcatagagctaccctctcctgccctccaggaagtgacagtctagtaagagagatatataaatataaatagcatatcattaagttcacttaataaaactttgttttaaagtgtgatagggaaaaaatataagccaagaagcgtgaatgtgaaaacgaaataaacattctgtaatttgtgtgatgctgccatactgcagtcccagaatgcagaatccagtggtcatgaaagacagcgatacttaacatttcctgagatcttaaaatccaaaaagtattaaatgtttaaggtttttctgtaagttttcatccagaagacttaaatacaaagtaacgggttaatacattcaaataagtggaaaactcttacatttaaaactgataatttcacttaagttgatagaactctcctttgctgtgcggttgaaagtgtgatggggaaaaatatgataaacccggatgcaagaatgtcaaaactaaacattaaatgatttcgtatccaaggtcttatgttaacagttgcggggggcgggtacatgggaaatttttttgaacaatttggaaaagaacgtttttaaacgtatgtattaagaaacgtaagtttaaattcctcagagaaaaaaaattattgacaaaacaacaaactaagccaagtaaatcaccagatctttcgaaatctgaatgaaaaatactgagattagcaaccctaggagacaagcggaacaaaaatcagtgttcgatacccttcccacaccttcgtacggttttcatgccacttccaaatccacttagaaagcacaactctatcatggggcattttcgcccctaagttgcaacacaccagcaaacctccgcagattccctgaccgccactggacagtaccgcggccccggccgcgcgaggcccggagggctaagccccgcccctcggacggcctcggatcctgccgctctaggcccgccgggcgctctctatggtcggccgggcggtgtgttgtcatccgcggagcgacgaccggaggctgcggcggagccccggcggggcgtttggtttcggtttggccctgactgggattagtgttgacgatcgaaatgggagtccccaagttttacagatggatctcagagcggtatccctgtctcagcgaagtggtgaaagagcatcaggtgggtgagcgaggggcaacggctcagaaagccgaggacccggggctccgcggccctctccaccttagagctggggctttcgagccacctctttcccctcgtcgtctggacgattagtggcattagggagggggacggaaggtttgaggacgcccggatgagccgaaaggggctaaggacgcaggttgcctgtgtgtggacagagccgctgggttcacggcttctctgacagctcttgcttctgctggtccttccgcgactccgaaatgaagtcctgggaaagaacgcttttactgttctccggtttcctcccggggagctgcaagttgcctttttccttacagaggctgcgaagctggagtgggtgtcctcgtaggttcccccatcccacccagagcggcagacccacttacagacgataacagccgcttccgcacgcagtcaccttgtttactttccctgatctagagcgcggcccacccggcccccggagcctagactttccgacgtggctgatggtcatattggtgatgccttttgttactttctgttatttcaaaagcagcaccaatcccctgttgccaaaacaaaaaactcttgggccagctggggagtggggcgtaggaccttttatttggaggcctcactgtgtgacagagggggttgggaaacgaattgatagaacattaatactactaataatatttggcatgtactgaccccaggacaacgttaatgtgtagattccgaaaacgtagtttatatattggaactgtggaaagagaggagaaagcagtcgtctattaggtaaactagactttgggtgatactttggtgtttgtcacatttaatgaatttgatctcttttctgatgcttta

SEQ ID NO: 2278 - DNA, 6000 bp, Homo sapiens
tgctagaaaaaaaatcgagatatttaacataaaaaaaaaatccaggctgggcacggtggctcacacttgtaatcccagcactttggggggccgagataggaggattgcttgagctcaggagtatcaagaccagcctgggcaacatagtgagatgacatctcttaaaggaaaaaaaaaagatccagatttctggcttttcttgaaaaaaatctaaaggtctgatatgcctgtacccacatccccaaccccaccaatcagccagaggtgagtaaaggctgcctcttgggaggtggcacctgttctctggctctccaccatctccactgctcctccaggtctccctgaccctgaggccatgagtgcatcaaatacttctctcctctcctctcctctcattacatggccctcctcccatttagaaagtttgtctccactgaactagatgaggccaagggattttaaactttcaactgttttgtctaaccttacttggttttatgttattttttatttttttaaggaacacagacattgtcacaattcaaccacagagaagacttgtccagctgaggctttcaaattcaataattatttggagatatgctactagaaactttcagagaggacaaagaaaaggtatcattacagtgtaagaaggctggagtggattagcattgctcacagttgtagagagaaatacttggctgatatcaaaatacatcgttggatggtaaagtagactatgttgttgatatgaatgtgtcaaccttcacttctccccctaaacccacacactgaaggggtgagtttaagtctgggcacaggatgtcaaaagttctcaggcatggaacaagccacagaatggattaaaaaataccccaagcggaagaaagccatacactattagacattccatttttttttttttttttttgacacagagtcttgctctgtcacccaggctggagtgcagtggcacaatctcagctcactgcaacctccacctcctgggttcaagcgattctcctgccgcagcctcctgagtagctgggattacaggtgcctgccaccacacctggctattttttttttttttttttttaatgagactgagtttcactcttgttgcccaggctggaatgcaatgacgtgatcttggctcactgcaacctctgcctcccgggttcaagcaattctcctgcctcagtctcctgagtagctgatattacaggcatgtgccaccatgcccagctaacttttttgtatttttagtagaaacggggtttctccatgttggtcaggctggtctcaaactcctgacctcaggtgatccacccacctcagcctcccaaagtgctgggattacagacgtgagccactgcgcctggccctaatttttgtatttttagtagagacagggtttcactatgttgtccaggctggtctcgaactcctgacctcaggtgatctgctcacctctgcctcccaaagtgctgggattacaggcatgagtcaccacacccaaagatctgagctaataatgcatccggttccccatatcaaaggtgctggcaacactctagcctttaattaattaccctaaacctaagtgggatagttatttggcaatacatccatttttttgccaactgaagcagtccagagctgtgatgataccccacaaaatactaggtttgtaggtttcccccaccctcccatcttcctaccctacatgccctacaaaattcctgccaatgaatttcatagtgagtatgtatgttgtcattttgggatggtcccataagaggcccatctggtgaactcatccaaccagacggttttgttactggtgtcaaccttgagttatgattcagaatcttgagtatacactcagattcgaaatccctacgtagtaaggtgtaggacaaaacatctgtgcctttgagatgcaggtgcttggactggtcctcttactagctgtgtgatttgacaagtcacttcacatttaaccactctgtaggcatgagtttcctcatctgaaaaaaaaaaaaggcaaactagtaaaagctgacccctgcaaagtaactggcagatagagggcatccaataacattccagatagcctcccttcttttcatagaatgctagaagctacaggtccttagaagtcaagcagattcatctctcatttgtatagatgaggaaatcaaggccctgggaggtggtctttcaggcaaacagtggcagctcttgagatgtgggctctggtactttattcaacgttggtttttttcacatgagccagcccatgagagattctgagagcaggtggggacagtaaaaaggcagtcccataatttctaggagcctcaaactgtaggccaaagggctaggtaaacagatctgccttgttttaagtttgatacaggccttacggctctctgttgtttctcatcctctacaactaacacatcttggttggtcgctgggcctatgtatacattcaagtttggtttatccagactaactggctgagctgccctgccaatagtttggattattgatcaaccaaaggtgagggacacacaccccagctttatacaactcacacacatgcacacacaaaagcatccccaagatcacatcctaagcttggttcttggtctgcaggggaataattggcccttttaaatttcagcttgcaaagtaatagctttaccccactgcattcttatagaatagagactcagaaaaccactgacatgtacagaaaggctgagaacccctgattcccagaactactcttcaaggttgatttcagtagcctgtttcacgttaggaaagaacgtatgctttcataggaaccagagttctagatcctgaaagtgaaacttcatgctccatatagcataactgtttccttccctttctcttgggaacaacacaattctattatggttacattttaaaaacaaattatggattactgactaatatcaaatgctcatttgtgaactaaaactcacctaaaagccatttcttttgttagccgctgcgcgtttaagggaaagtaaaggggtgagaaaatggctccccagaaatcctatggggcatcccccacccctgcaatatatctcaagcatcaaatagccactctatgttaactaccaccaaaccttttccaaccactaggttgtcacctttttcacaaccctaagacaactatgcaaatactttatctaaattttgagaaactgggctgagtgaattagtaagcactatatgaggaggggttaacagcaatttattaaggttgcctgaaacaccctagtccaaacaccgattcaaactcttatttaaatatgctattttaaacctgatttgcagcagggcagcagaccaaattaaagcactcattttactgacctgagtcccaagcctgaattctctggtggattatttttaatttaaaaatgagctcttgtcctataaaataagcagcaccaaggagaaatgcaagacagcttaaatggcccaagaggcagcgcaagttacttttacaaaaaaactggaaagtattagtgacattatctccacttctaatttcagaaaatgactttacagtatacttctaggttataacgtagacaagtatgtctgtgaaactgctcctgaaggtttccacgtaatagctgcaggtaaacaaatgttataatatgaccacacaatgcaatactatgcagccatttaaaatacaatgaagtcgactaggtttcaggcatagagaaatatgtgtgataatatgaatttaagaacagcaagttgcagatgccatttttggagaaaaacttacatctatgtgtgggtattaaaaaacctccctgacatacactgacatctatgattctatatttagctgcgagggtgtatgtatatatagtttaaaaagatacacactaaacctaacaatggtgggaaaggaggggagagatcttggtctttcattttacttcttgtcttggtggcttgcatttttcgcaagggcattgaaaactttttacattaaataaaaaatgaagtgatgagctttaaacaactgtaacaacagctcttgagtgcccttgttaatttcttgattgactgttttcaccccacttagtacaacaacgcagccacaactcctcagtccttcccagtctttggaaggctaggagagaaaaaggcgtggcttgcagggttttcttctagctagaggaaaacaggctgtaggcgccctttttttagctacaatcccgagagctcccacgtgtcaggggtgcgcagacggtaggcgcggggtgcaggactccaattatcaattcagccgagcccagcgctggtaaagggggcgtttagctcgcccgtttcctccctcctcaatccccacacagtcagtttctcggtccaagttttactggtgcggcccagccctaccgagagtacccgaatacacgtctgcagaggacgcgggcattgggccgggtgagctacgatgttctaacgatcagcaaatgccaattaatctgttaattgtctattaacaattattactcggtaaatgtcaacccagacctacacccaaagtgggcttgagggagggtggacgaagtgtaaacattttttcttttttttttttaaatgagagatgccgcccgcctctccgggcctgcgagtgggctggcggataccggagtccctgaggtcaccggcggaggtacgtgggctgtccctgggcttaccttacagggaaacaggactgccgaggccaccttctccatagccaggttcctgatgctgggcgtcagggcgcccctgcacgtcgggcagcagctcaacttctggcggcattggttacacaccaggtgcccggcctggcactgcagaataggaggcaggacatagtcaaagcagaccggacactcgaagagcgaggtcagctcgtggtgctgcggggacaccgggccggccccgccgccgccgccggggcccgagatcaccgccgccgcggcgggcaccgcggacgagccggggcccgcagccgagatggtggcggcggccgggggcgcagccggggacggagtgtgctggggctgcggcggcggctgcttgctgcagggtttattagcgctggggccggtggaggacgggcggctcatcgcgctccgaaccaaccatggaactgcgggcgcctgcctgccgcggggccgcccgggtcaaggcggtgcgcgccccgcgggcagcgagctccgaggcaacgccacggcgcccagcccaggtccgggcggcggagacgctcggcgcccggcaggcggagggctggaccgcgctgatgcactccgcagcccccggcgttccgagcacgcctccgcgtcggaccccgcgcggtgccctcctcccggcggcgtcccgggccccgaaccccagcggtgcgcagagccctggcccacccgcttctggaacagccgctgacgcaagccccgggggcgcgcgcggacgtgacgcctggacacgtgtgcggccgcccaggcgcgcggggactggcagagccaccctgcgccggggcgctggctccgcccggctccagctggcagcgcagggggccgcctagcgccggcgcttcctgctcgggctgcgggccgggcctgcgccagtgagcatgcctggctcgctgcagccccgcggggttgtcttttctgggttgaggaggggggctactctcggggaagcgtcgccgaagtcctctggccacaccccggggtgcctggctgacgcgtccctcagctcaaacgagaaaggcaacttcaggcggggcgggagcgtggacggtgggtgggaccggacgcgggcgggcaggggcggggcgcgggcgcccctgcactagtcggaaaaaaccgagaggtttctcttctcagggctgagtcaccagcacgcaggagaagagggcgaagcggccacccgcgt

SEQ ID NO: 2279 - DNA, 6000 bp, Homo sapiens
caagcccagggttctcactagctgttggccagagacatcagttccttgccacgtggaccgtttagcagagctactcccaacatggtagctggcttcatccacagagagggctcagagagtgttacagactgaatacttgtgtcccctcaaaattcacatattgaaactgtactccctaatgtgatgatattagcaggcagggtctttgggaggtaatcaggattacaggaggtgctaagggtgtagccctcatggagagggttggtatccttagaagagtcctgagggagcttccttcctatctctgctacgtaaggacacagtgagaaggctgccatctacaaaccaggaagcaagccatcgctagacacctgtggcaccttgaccttggtctccccgtcctccacaactgtgagaaataaatgtttgttatttaaaccacccagtttatgatattttattatagcagctcgagctaagacagcaagcgagaggaacggagggacagtaagacagaattcatagtcttttttaacctaatctcagaagtgacattctatcactttgaccatattctgttcacttaaagcaggatcagccctcattcacaggaaaggtgttacatattgggcgacaccaggaggagggatccctgggagccttcttaatgatgacttcctacaactctcttggcctctctgtacctgttttgtcatctataaagatctaccctataaaagacattgtgagaattaagagaattaaaatatgtaaagtacttggaacactccctggtacagggtgagcactaattagctaagtgtggatacaaaaataatgcaaatacatagaactgctcttagtacacagtgctaagtccatgatggttgttcaaaaaaatgcttgaattaggagtacttgagtataggagtttgaggccagcctcggcaacacagtgagacctcttctctacaaaaactaaaaaactagcagggcgtgatggcacgtgcctgtagtcccagctactcaggaggatcctttgagcctgggaggttgaggctgcagtcagccatgatccagccactgcattaagcctaggtgacagagtgagaccctgtctcaaaaaaaaaaaaaaagatttgaattaagagacctacaattattcaaaagaagtttgagcatttggaaattaccccagaaacagatgaagttaaaagttcctactataattaccagggggccttacatcacctccagatttcccacaagcttcccctgatgaggaatttccatgcagcaagctccaatgcatacctgagtcatctctaaaaagccaaccacaatttgctctgcaaatgcacatttgcctgatggcagaagttgcctgatttgcaaaaccacacaatttgtaagttacagaaaaaagggcaagagcttgtctgcctagctggagcatttctcactgtgctcagcagtttagtgaaattaggaactcacctgtgaggtgttttttttaagactcaccctgctattttaaggaaagaaaaggctactcagtacacccctagtctttcaagcttagcatagagcagatgggttaaggagaggtgtcctgcttgacatatgcaatctgggactcagtaggtgggcgaatgagaccaacctctcatacagtagatgtggtaaatgagtcatgaatcaggagataacaaaaggctggaccctgctcccccagaccacaaagtcactcactaaacaggccaagaagcagcagcgacactccaaagggtaaataaacctcccaacaactcaactcagcacacattttgagtacacgctaaattcgacctctgagcggactgcccgctggaagaggaggctctagctcatagtgcccggtatgcaaaggtcacctttctttgtttcaaaagtcaccaaggaaggaggaagaagaaaggcgactgggaagaccagcctggtcattgatgtggctcacatagcagacctatccactctccccctgcctaccttcagcaactgcccagagtttttttgttttgcttttgtattttaattaccctggttgacttaatcaggtgtgcaatgatgtgaaggaggaagaaagaagaaatttctctataccaggggaggcatctgccagggtaagagtggatgggttcgctgtatttttagaaaaataaaccaaattctctctgcagagaattgcttttcctgttatttctttcaacacctcccaaaccaaattgttttctgaatgaccagggcctatctagctggaacacttaaagctcgtgtcaatggggcaagggtgaggactccagtctcctaatgagagctagtaagaagccgtggggatggaggtcatcacacagagaggctagaagtggaaggaaagaaaatgtgttccattaataaattccaaatgctttgattttaaattaagaatgaaaaatattacatttcctccaataacagtaaaacagtaggtgatttttgtgttatcacttatattttgtgtcataaaaaggtgaaaatgaaataaatagaacatgatttaatttttctctctagaccagctaaggaaagagtttatgtaaagtttgcccacaaaatttagtgctttattataggctgaacaactgttttctgactctgttgagtgtgctaatcttaactgtttaacaagactgtaagtaggaatcaggcataatttagaggcatacagactagtagttaagaagggctcctagcgtgttcccacattctcagctgtgtgatcttgagcaaagtaacctatgtctcggtttcctcaactgtaaaatggagataacagtagtattcatcacagagagttatgataaatacttaaaactatccatgcccaacatacagtgggcactcaattaacattagttattattttatgctccctacctatccaaaaactcaggttcagccatgttactaaagagcttccaaaaacctacaaaacctagtgttgttgtgtgttcttaaaaaaacaaacaaaaccctacagtggtttacccctatcattgaggtaaatgtcttattaagccagttgaggctccccttgtgctaacgccacacccctacactcccgttatatcccctccaagtcccaatgcaatcccagaatacatgctttcactctgtgctttttagctcctgctataatgcctgcccaccccgtggtatctgaaatccttcttctcccacgagtgcttggttattgggccttgctctcttactagaatgtaaactgcatgagaaccattctcagagctccaacagtagctgacacatgataaatgctcaggaaacatttactgaacgattgaatacacctattaagttttttcaagatttataccaaattccatcaattccatgcatgtattctttctacagaagccctttgtaagattaaactttatttcttctgggctcttacgccatatttcttggacaaattgtattcattcattttaaacatccactaatatttttaaaagataagagctaatgtttaaacagtgcttatgatgggcgaggttgttttaaaagcttgaaatatattaaactcatttactcctcactgccccacctataagataggtatttttttttccacttttacagttggagggaaccatttttcactcagtcctaacagttggtccttacctctgtgtctcctataaatttccgatttctacctaaggtaaccctttccccaattccggaatcgttggctcaagcaaagtctgcagaaaaacaattttaactcggagcacacagttacatttggacatgcggttcaccccgggcaaccgtgccctctagcgcttctgctgggcgcgcagggtggccctacgcctcgcaacaaagactcggacttcggccggctctctaccaagcggacgcagcgccttacactggagtttcacccactgtcttcagagacctcacgacccaacctacgtttctgacatttctagatgatctcgaactcttagccaacgctgcccatgagctccctcctcggcctgctatacgagccaggggcgctcaattcaacgaagcttcctcctggtccgctgggaaaggaataaagggagcttacatcctccccaccgcccccctctttactcaaccccaccgttaactgtacaaaactaggtcctgtgcccgctgcagacccaactcgagcccctcgccctgctcccacccaatgcttctcgtcctgactccgaacacagaacgcgggtggccgcttcgccctcttctcctgcgtgctggtgactcagccctgagaagagaaacctctcggttttttccgactagtgcaggggcgcccgcgccccgcccctgcccgcccgcgtccggtcccacccaccgtccacgctcccgccccgcctgaagttgcctttctcgtttgagctgagggacgcgtcagccaggcaccccggggtgtggccagaggacttcggcgacgcttccccgagagtagcccccctcctcaacccagaaaagacaaccccgcggggctgcagcgagccaggcatgctcactggcgcaggcccggcccgcagcccgagcaggaagcgccggcgctaggcggccccctgcgctgccagctggagccgggcggagccagcgccccggcgcagggtggctctgccagtccccgcgcgcctgggcggccgcacacgtgtccaggcgtcacgtccgcgcgcgcccccggggcttgcgtcagcggctgttccagaagcgggtgggccagggctctgcgcaccgctggggttcggggcccgggacgccgccgggaggagggcaccgcgcggggtccgacgcggaggcgtgctcggaacgccgggggctgcggagtgcatcagcgcggtccagccctccgcctgccgggcgccgagcgtctccgccgcccggacctgggctgggcgccgtggcgttgcctcggagctcgctgcccgcggggcgcgcaccgccttgacccgggcggccccgcggcaggcaggcgcccgcagttccatggttggttcggagcgcgatgagccgcccgtcctccaccggccccagcgctaataaaccctgcagcaagcagccgccgccgcagccccagcacactccgtccccggctgcgcccccggccgccgccaccatctcggctgcgggccccggctcgtccgcggtgcccgccgcggcggcggtgatctcgggccccggcggcggcggcggggccggcccggtgtccccgcagcaccacgagctgacctcgctcttcgagtgtccggtctgctttgactatgtcctgcctcctattctgcagtgccaggccgggcacctggtgtgtaaccaatgccgccagaagttgagctgctgcccgacgtgcaggggcgccctgacgcccagcatcaggaacctggctatggagaaggtggcctcggcagtcctgtttccctgtaaggtaagcccagggacagcccacgtacctccgccggtgacctcagggactccggtatccgccagcccactcgcaggcccggagaggcgggcggcatctctcatttaaaaaaaaaaaagaaaaaatgtttacacttcgtccaccctccctcaagcccactttgggtgtaggtctgggttgacatttaccgagtaataattgttaatagacaattaacagattaattggcatttgctgatcgttagaacatcgtagctcacccggcccaatgcccgcgtcctctgcagacgtgtattcgggtactctcggtagggctgggccgcaccagtaaaacttggaccgagaaactgactgtgtggggattgaggagggaggaaacgggcgagctaaacgccccctttaccagcgctgggctcggctgaattgataattggagtcctgcaccccgcgcctaccgtctgcgcacccctgacacgtgg

SEQ ID NO: 2280 - DNA, 6000 bp, Homo sapiens
tagaaaacaatctgcgatgaacttcattacccctatggtaacatcagagtaaaaagtcagttatcatacattttccttactttcttccatttaaaattattacagaaactggaatgcttactaaacaaaaactggcagcgctgacaagataaaagacagctgttacttaaaatggccttccctcggtttcattcctcacacctatgaggaatgaggccaccagctggcctcattgagctgctttctaatattaacgtgtaatgatgaatccattttatcaggacagtaggctacaaattgctctttggaaaataagtcaaacttaattctcatgaaaacaacctatctctctctccatatatatacatacatacatacatacatacatacatacatacatataaacatattccaaagatcttaaggtctatgatcaggttttatcatcacaggaaatttggaaaaaagtaaaaccaacttcagactctttttaacttatggctgtgttatctaatggctctccttaactgtcattaagagataaaatagctccagtgttacagctgcacacaccattttaactcttaaccccttgcaatccagacagaagacggtatcatcaaaatccctagtaaaatgtaattttatgaaaacatagttgtctcatttttctccatttgttaataaaaattatctatacctcttaagataacctgctttaagaactgccttcaaatggtgatataattcatttgttcttgcaattacactaaagaagctaaatatgtttgaattatagctactatttagtcccaaatcagacttaatgatgccattttctttgtttttgtgtcaaaatgccaatgacatcaaaatagatttaagaaaaccaaacccattatttactataattcaatatatacttaacttcttgcttaatcctgctatttattacctgcaattttcaaagttaactttgtgggtatataacctaaaaccagatacctttattttgttcagaattggttctacctcacaaatcaacggtgcacacgtaatttacaactacctggtagagattactttgtatcataaatttaaaaaatatatctccatcaatcagcagtaaacaaagtctcaaagtatacattagtaccttctgttgcaacaagcacattaaattaaggcctgctagaatttcttcctccccaatcaggtaaactttctttgccaataaagtttgaggaggtggcatttgaaaatctctttaaaaaagaagtcttcatctattcagagaaaactcaaaaataattttcattatcaacacacaaactaactcaatctctgctttaagtttctattgtccaatttttctgatttatacgagaattattttcagctttagaaaatcctggtctttggtcattagaagtttattattatggtttgttagaggagctattttcctttagcatgattatgtaattgacatataactcaacaacaacaaaaattacaaagtccaaacatggttagtttcatttatgtgttacaaagactgagaaatattggaaccaagtcttcaagagactataacagattggtagtttacaaagaggcatactgccaagcaatatacaaaaatttgtaatgcctacttaaaagtagaaacatcctttataggtatttaaacaaactgaaggccaccttgtagagccacagaattatactgtagaaaggtggtagactaaatgacatcacttaacacccttccaattcttacctatccaacttttattatctatggatacactgaaaatacattgtatttactaatgagaatggttaaaccagtctttgaaaattttaatacgctgcatctcaaaagtaaatatttggaaactagaacaatgaaaaagcaatcccccctctaaatttagctgtttattgtcaacttaaaagataattatcgaaccacaaaaaactgaaggaggaataggccaaacaatccaggttggggactaagcactggtactttttaaaaagctcctctgctaattctcaatgtgtagccaggctgaagagaccaatgacctacaagcaacatgaataatgtatctccactgtaattgtcaaagtcacactacaatttaaagttatgaataaactagattaaaacaaatagcatcattaagacaagtgatatgctttacctaaccaatgtataatactgatagtactttctaatgacattaacctatgcaaaaataaatacaaagctatagttctaataacttggacagcaaagacaaaagcttataacaagaaacaggagtttttctaaatggttcaccagtggccaacctgttagtccccgattccagtgacctattctcagagcactggcttctccttggggattttcgatacttcactcactgttgccatgacgacagcttcatctctatgtaccactccacatcacccaggctttggtaaatgtagctggtcgctgtatagtcggttgcaagggaaaaaagagttgaagttaataacatatacaagttacgtgcttgagtaaacttgtaatatgcatagaaacacttttacatcctgctttaaaaaaaggcttccatgcaattaacaactccttttaaattttgctataatcagacttctaagattgaaacaaaatcagtttctctgtaataatgacccaaaaaacaaagttacatcagacacaacaatcaggtgagattatattattttaaattccatggtttttacagttaagacctattctaacatcaacgaagtaaactagtctcacaggaaaattccacagaagataatcatgtgattacataatagttggctcaatggttcaaagaatactagaaaaccatttcctttaagcaaagagaaacctttgactaaagatagagccttgtattagtgtcattactttaaacatcctgaagaatcagccaggtatctaaatacagatttaacctcagaccataccaaagaccaatttgaaatcttcccaattcccagggactcatcaacaaactaaaagatattttagaatttaaaaagtactctatccctggacacagttaaggtgaatgagaaaagatgggggagaaaaagtatgtaggaaaactgttgcagactttttgactaggatactctttttttaaaaaagaactgtctgtagactcacagaatagactagtcatcttaaagttgctttaatatttgcttgtctgaatagttccattactgccaacttacagattcagccaataaggactactcatatagaatactaacagcactaaccaacatacccaacccccagaacaacttataatccttttaataacttcctttcaaactcagtacaatttgtctaacatcactacaattccttaaagagtgaatgcaaaaactattctacaccaaatatatcattctgcagcatgtactggaagtcacctgtagatgcaggaagtcctgcaacaaactttttggtactgcctcacaggaacacataggtccacataaaattatgttaccacaacacctaggagatactatttcagtctctgtattttcttacaacatcaaataaatggccctatctaaatgcaacccaatcaatcttacttgttaattttctaacccactcactgagactgtatctaaccaaaacaaaatacctgtttaatccctttgacttcaaacttcaaactttatcatcctgcagtcctttcagatccggtattattcgatttatcgtagttcaatgttgagaagtactctaacaaaagccaacctcaattgataaagaattaactgggacttcgagtagaaaaacataatctacacagaactttgccacaatattaacttaaactacagtgtttaaacttccagccttcagtcttccagagaggggagaggaaaaataacttacagaatacactcacacttgagccaaatgtactccctttcttgtttaatcttaagccacaggcctggcttcacagcactgttaggattgtccataaatgcaactgcctctacaaactttagataaccggttaattatgtttcttttttcaaattattttaagtatcagtgttcctatatgaactttaacacctaaattaaagtccgttttcttttgcatccgtattcacttgaaaggaaagatgttttgatttgatgactggtgcacggtacagcagtagcaagagatactatgttcaataatgccaatcttacctttttcctcttaactggcggaggtggtggaatacattaatcacatctcttattcttctaggtgcttcttcgatttttgatgcaagattaatacaagccatagcaacaatctgaaagaacccatgagccacaaaagccattgttagattaaactcactttgaagaataaaatttagaacacaattgggacaacctttagtaaaattagagaagacatctctatgccgtaagtctaccagctatgctagtactatactttttgttgtttaactcatcttaattttggttccagagtcaaactcaatcttacaggagttctgcatttggttgaaaactgtacttttcgttaagagggcacttaggctcgtgatcgattttgaaccacattctaaaggtttccacttcctggcgagtgagaagtaggtacaaaggcctaaactaaaccactccctttctggaaaagctggctgctgacactacccctactctgcccatttccggatgaagaaatcccttttacccgcctccgctgtgcttacctcgaaactgtgtttgacgaaagatttggagtagaaaaaacgatgaaacaacacctgccccgttgccatcgccacctgcagacaagagaggagaacggaagcgcaggggtcaggcgggcccgctccaggcgccgccgccattttgtgccgccgatcgcttccctttcccctcccgccgccgccgccgctgcgaacagcccgctgccaagtcctccctccgcctccgcagccccccgccccggcacgccccggccgcggctgggccccgaacgggaaagcctgaaggaaccgtccccaccctcccggggcacggtgatactgagatgcggcgtaggggacggaggagaggagaggagcgcccggccggcccggggccggagcactgacctgcggcagccggaggagaatgccggcggcctggatgagctcgcagcccaggatgcgtaagtccgtctcactgggcaggtcgagcccatcctgcatggatggggtgggcgagagcctctcctccggaatcagagagtggtcgatggtaagtgaaacttccgagtacaggcgatcgccgatcaggatccctcccgtcgtggtcgtcgtcgtggtcgtcgtcccggagctggagccgcccgcgcttggggcggccgatgaggcggctgcggcagcagtagctgtcgaatgaggcccggacgccatagtcttagcgagccgcacgcaagcccaacgcagccggaacccgaaacaagactaaccagcgttctcggcgcgacggatattcccgtgaccgccgggttctgggccgcttcacgccgcgtgcgcttccgccctgacgtcaccacgccgggcagccgcgcgccaactagtccctccaggccgcgcctccgccctcggcatctgggcctgcgaggggagtgttgggtgctgcgacagaccttgggatcctcagaggctgaggaggccttctctagccaaggccggtcgaaaccaccttgtttgtgatagccacacgaataacggagctttacaagatcccttatacccaaaatagaggtggcagcattggctagcatctctgcgccccttcgccctgcattccggcctcttcctttagcctcggcgcggcttgcgttccgcgtgtaccaagggaagtggcggccgacctgagcgcgcttt

SEQ ID NO: 2281 - DNA, 6000 bp, Homo sapiens
tggaaaagcaaccttcctcaaagtaacagaaacaaggttaacacagacaagccctgtggattactcctataatcccaacactttgggaggcctaggtggacgggtctcttgagcccagaagttccagagcaactagggctgcatagtgagacccctgtctctacaaaacaatacaaaaattagtggtggtgcacatctgtagtgccagctacttgggaggctgaggtgggaggatcacctgagcccagagaggtcgaggcaacagtgagctgtgatcatgccactgcattccagcctgagtaacagagtgaaaccctgtctcaaaaaaaggtgtgtgtgtgttgggggtgggggtggggcggcggggggaggaaaagagaaagaaaagaatttccaaagtatgatttttctggaatttgaccctgaaagaataggacagagttatcattttttaaaattattttttccttccatccacagatatagactcattttttttaaaacctccatccttacaaaaccttggggagtagagccactagccccaatgccttccatcctctggattatccatgatttttttttttttgtcacctccaattagggtatgtcatagatttttaaaaaatgaaactaaagtttaaaataacatgacagtttgaagagttaatgctaagtaaatacctatataaaatattgacccaccccctccacctttgttgaagctggagggaggaacagtaaaaacaatcatgtgttgtcaataaaatgaaaggttctgtcagaaatgagtgggaaatgggcacaaaattatggaactgccctggatggctctgctctcctggaaatgactgccagatacaggaagcagagagtagaggtccactgggaacagatctcagaagtagagaggagcactgctagagagaaagggaccttcctcccaccctcatcccccagacttctccctcctatgcttgtgaacctttactggattaaccatgaatgtagtgggtaaaaatataaagtatatcaagacatcaccaagccagcttattgcagaggcatggtggaagactctaaagaggagaaaatcttctattaacatatgtcttaaaaataagttaaattggtcggcaaagcctgagttctgtcctctcaccctcctccctggacagcatgagcttcaccactcactccgccttctacaccaactaccggtccctgggctctgtccaggcacccagctacgactcctggctggtgagcagcatggccagcgtctgtgcaggcgccgggagctctggctgccgaatctccatgtcccgctccaccagcttctggggcagcatgaggtccgggggcctgactgcggggatggccggggttctggcaggaatgggaggcatccagaccgaggagaccatgcaaaacctgacaaccacctggtctcctacctggacagagtgaggagcctggagaccgagaaccggaggctagagagcaaaatccgggagcacctggagaagcagggaccccaggtcagagactggagccattatttcaagaccattgaggacctgagggctcagatcttcacaaatattgtggacaatgcgttctgcagactgacaatgcccatcttgctgctgatgactttagagtcaagtatgagacagagctggccacgtgccagcctctgaagaacaacatccatgggaacaaaatccatgacactaatgtcactcggctgcagctggagatagattgaggctctcaaggaggagctgctcttcatgaagaagaaccacgaagaggaagtaaaaggcctacaagcccagactgccagctctgggttgactgtggaggtagatgtccccaaatctcaggacctcaccaagataatggcagacatccgggcccaatatgatgagctggcatgaagaaccaataggtgctggacaagtactggtcttaacagattgaggagagcaacacaggggtcaccacgcagtccgtcgaggttggagctgctataacgctcacggagctgagacatacagtccagtccttggagatcaacctggactccatgagaaatctgaaggccagcttggagaacagcctgagggaggtggaggcctgccacgccctgcagatggagcagctcaacgggatcctgctgcacctggagtcagagctggcacaggcctgggcagagggacagtgccaggcccaggagtacgaggccctgctgaacatcagggtcaagctagaggctgagatcgccacctaccgccgcctgctggaagatggcaaggacttcaatcttggtgatgccctggacagcagcaactccatgcaaaccatccaaaagaccactatctgctggatagtggatggcaaagtggtatctgagaccaacgacacccaagttctgagacattaagccatcagaagcagggtaccctttggggagcaggaggccaataaaaagttcagaagtcaaaaaaaaagttaaattatattactctcaagtcattacaaatataggtgatgatttcattgaagtccagtgttttaatgaagtacataatcaatgagggtttttactttttatttggaaataagacatggaagttgcaaagatagactactcctatgtattcctccaactttccccaatgataatatctcacacaaccatagattatcaaaaccagaaaactgaccaggcacagtggtgtgccacttatagtcccagctactcaggtggctgaggtgggaagatcccttgagttcaggagttcaaggccagcctgggcaacacagtgagaccctggctctataaacaaaaatggaagaaaaccagaaaactggtgtcatcaattgtgtttaaggaaaccgaggctcctttaaaagtttgttataaaattatagatatctcataaatattgaggtggaaagattccctggaagcagcctagtcagaaagtgaagacagtgacatccagataggttaatacttctgccagcaccataattacactctcttggctgtacattccaatcactcgaagacaggcaaaactgaaccactggctgggcccaccttaaatcagtgacatcaacctctgcaggcaaggctcaagtatcagtacattttaaaacaactttgcccactgaaggttcacttaatcaactgataaggccgggtgcggtggctcatgcctgtaattccagcgctttggatgcctgtaatcccagcattttgggaggccgaggcgggcggatcacctgaggtcaggagttcaagaccagcctagccaacatggcaaaaccccgtctctacaaaaatacaaaaattagctggacgtggtggtgtgtgcctgtaatcccagctactggggaggctgaggtgggagaatcgcttgaaccccggaggcggaggctgcagtgagccgagatcgcgccactgcacttcagcttgggcgacagagtgagactctatctaaaaaaaaagaaaaaaaaaatcaactgataacaggcgattaacaggagaaaagggatacataacaccggggtaaaagcaggaggatgattacccagtagcttaatggagtacagaagattttatatctttttttcataggggaaagggtagatgagaaatgtagacatttattttgaggagcagcaaatgattattaggaacaatgaatggacagaaattagtaaataattttcttttgagtaatcttgtgaaaaagtccctccaggaatggctgcatttctgagtctttttgaaataggatacgagatttcagcgaggggaggaatgcgattgattcttctacaaagaggcttctctagtcaggaaaggaaatttcagagagtacctccctgcacttgggaaaagtgggagcaacaagtcaaggttgggggacctgcattatgaggcagcttctaaagcctctgtctttggggtatcgctttctgagcgtcaagagtaaaacgtgatgcattcctttccttccaacctagattctagtagtttagatcagtatcattgtttttacttcaaggttcaggaaacgctggaaattgctagctaatatcacaggaaaaaaaacaaaaaacacgaggttgacctcaccctacccgcggtaggtaaccatgtatgaatagagactcccaggcataatcaaattacctctgtcaagtcctcgccctaagactatttttggaaactagggattttccagattactgaaagccgtggcggtgtcaaaggccgggcaggagtttcgcaagcggagctatgaaagcagccactctcgcggtcattcctatgcctccgccctacttccccatactggcaaaaacacgctccccggggagctttcatttgggaaccgatagggtccacagccctgtgttcttcaaatactgtaaagcagccctctccagattccttgagggtcactttatattacacattcgtccacacaggacaacaaagtcaccacttccacccgccaaagcgcgctcaggtcggccgccacttcccttggtacacgcggaacgcaagccgcgccgaggctaaaggaagaggccggaatgcagggcgaaggggcgcagagatgctagccaatgctgccacctctattttgggtataagggatcttgtaaagctccgttattcgtgtggctatcacaaacaaggtggtttcgaccggccttggctagagaaggcctcctcagcctctgaggatcccaaggtctgtcgcagcacccaacactcccctcgcaggcccagatgccgagggcggaggcgcggcctggagggactagttggcgcgcggctgcccggcgtggtgacgtcagggcggaagcgcacgcggcgtgaagcggcccagaacccggcggtcacgggaatatccgtcgcgccgagaacgctggttagtcttgtttcgggttccggctgcgttgggcttgcgtgcggctcgctaagactatggcgtccgggcctcattcgacagctactgctgccgcagccgcctcatcggccgccccaagcgcgggcggctccagctccgggacgacgaccacgacgacgaccacgacgggagggatcctgatcggcgatcgcctgtactcggaagtttcacttaccatcgaccactctctgattccggaggagaggctctcgcccaccccatccatgcaggatgggctcgacctgcccagtgagacggacttacgcatcctgggctgcgagctcatccaggccgccggcattctcctccggctgccgcaggtcagtgctccggccccgggccggccgggcgctcctctcctctcctccgtcccctacgccgcatctcagtatcaccgtgccccgggagggtggggacggttccttcaggctttcccgttcggggcccagccgcggccggggcgtgccggggcggggggctgcggaggcggagggaggacttggcagcgggctgttcgcagcggcggcggcggcgggaggggaaagggaagcgatcggcggcacaaaatggcggcggcgcctggagcgggcccgcctgacccctgcgcttccgttctcctctcttgtctgcaggtggcgatggcaacggggcaggtgttgtttcatcgttttttctactccaaatctttcgtcaaacacagtttcgaggtaagcacagcggaggcgggtaaaagggatttcttcatccggaaatgggcagagtaggggtagtgtcagcagccagcttttccagaaagggagtggtttagtttaggcctttgtacctacttctcactcgccaggaagtggaaacctttagaatgtggttcaaaatcgatcacgagcctaagtgccctcttaacgaaaagtacagttttcaaccaaatgcagaactcctgtaagattgagtttgactctggaaccaaaattaagatgagttaaacaacaaaaagtatagtact

SEQ ID NO: 2282 - DNA, 6000 bp, Homo sapiens
ctcacaacttgtaatcccagcactttgggacgtggaagcagcaggatcatttgagcccaggagttcaagaccagcctgggcaatgtagtgaaattctgtctgtacaaaaaataaatgtttaaaaattagctgggcttggtggcatgtgcctgtagtcccagctattggggaggctgaggtgggagagtcacttgagcctaggaggtcaaagctgtagtgagctttgatcatgtcactgcactctagcctgggcaacagagtgaggtcctgtctcagtaaataaataaataaaataaaaacaaaaaaacatgagcttcactcttccaaactttgaatcctttataattgtgactaggtcttaccctttccacttttgttttctttttctttccttttctttttttttttttttaaaggggggatggtcttactttgttgcccagactgggctcaaacttctgggctcaagcgatcctcccaccctgtcctcctaaagtgctgggattacaggtgtgagccactgcgcccagcggtctttcccaatctgcattttaatgttgatgttttgtaagtaggtacatttggaaaagcaaccttcctcaaagtaacagaaacaaggttaacacagacaagccctgtggattactcctataatcccaacactttgggaggcctaggtggacgggtctcttgagcccagaagttccagagcaactagggctgcatagtgagacccctgtctctacaaaacaatacaaaaattagtggtggtgcacatctgtagtgccagctacttgggaggctgaggtgggaggatcacctgagcccagagaggtcgaggcaacagtgagctgtgatcatgccactgcattccagcctgagtaacagagtgaaaccctgtctcaaaaaaaggtgtgtgtgtgttgggggtgggggtggggcggcggggggaggaaaagagaaagaaaagaatttccaaagtatgatttttctggaatttgaccctgaaagaataggacagagttatcattttttaaaattattttttccttccatccacagatatagactcattttttttaaaacctccatccttacaaaaccttggggagtagagccactagccccaatgccttccatcctctggattatccatgatttttttttttttgtcacctccaattagggtatgtcatagatttttaaaaaatgaaactaaagtttaaaataacatgacagtttgaagagttaatgctaagtaaatacctatataaaatattgacccaccccctccacctttgttgaagctggagggaggaacagtaaaaacaatcatgtgttgtcaataaaatgaaaggttctgtcagaaatgagtgggaaatgggcacaaaattatggaactgccctggatggctctgctctcctggaaatgactgccagatacaggaagcagagagtagaggtccactgggaacagatctcagaagtagagaggagcactgctagagagaaagggaccttcctcccaccctcatcccccagacttctccctcctatgcttgtgaacctttactggattaaccatgaatgtagtgggtaaaaatataaagtatatcaagacatcaccaagccagcttattgcagaggcatggtggaagactctaaagaggagaaaatcttctattaacatatgtcttaaaaataagttaaattggtcggcaaagcctgagttctgtcctctcaccctcctccctggacagcatgagcttcaccactcactccgccttctacaccaactaccggtccctgggctctgtccaggcacccagctacgactcctggctggtgagcagcatggccagcgtctgtgcaggcgccgggagctctggctgccgaatctccatgtcccgctccaccagcttctggggcagcatgaggtccgggggcctgactgcggggatggccggggttctggcaggaatgggaggcatccagaccgaggagaccatgcaaaacctgacaaccacctggtctcctacctggacagagtgaggagcctggagaccgagaaccggaggctagagagcaaaatccgggagcacctggagaagcagggaccccaggtcagagactggagccattatttcaagaccattgaggacctgagggctcagatcttcacaaatattgtggacaatgcgttctgcagactgacaatgcccatcttgctgctgatgactttagagtcaagtatgagacagagctggccacgtgccagcctctgaagaacaacatccatgggaacaaaatccatgacactaatgtcactcggctgcagctggagatagattgaggctctcaaggaggagctgctcttcatgaagaagaaccacgaagaggaagtaaaaggcctacaagcccagactgccagctctgggttgactgtggaggtagatgtccccaaatctcaggacctcaccaagataatggcagacatccgggcccaatatgatgagctggcatgaagaaccaataggtgctggacaagtactggtcttaacagattgaggagagcaacacaggggtcaccacgcagtccgtcgaggttggagctgctataacgctcacggagctgagacatacagtccagtccttggagatcaacctggactccatgagaaatctgaaggccagcttggagaacagcctgagggaggtggaggcctgccacgccctgcagatggagcagctcaacgggatcctgctgcacctggagtcagagctggcacaggcctgggcagagggacagtgccaggcccaggagtacgaggccctgctgaacatcagggtcaagctagaggctgagatcgccacctaccgccgcctgctggaagatggcaaggacttcaatcttggtgatgccctggacagcagcaactccatgcaaaccatccaaaagaccactatctgctggatagtggatggcaaagtggtatctgagaccaacgacacccaagttctgagacattaagccatcagaagcagggtaccctttggggagcaggaggccaataaaaagttcagaagtcaaaaaaaaagttaaattatattactctcaagtcattacaaatataggtgatgatttcattgaagtccagtgttttaatgaagtacataatcaatgagggtttttactttttatttggaaataagacatggaagttgcaaagatagactactcctatgtattcctccaactttccccaatgataatatctcacacaaccatagattatcaaaaccagaaaactgaccaggcacagtggtgtgccacttatagtcccagctactcaggtggctgaggtgggaagatcccttgagttcaggagttcaaggccagcctgggcaacacagtgagaccctggctctataaacaaaaatggaagaaaaccagaaaactggtgtcatcaattgtgtttaaggaaaccgaggctcctttaaaagtttgttataaaattatagatatctcataaatattgaggtggaaagattccctggaagcagcctagtcagaaagtgaagacagtgacatccagataggttaatacttctgccagcaccataattacactctcttggctgtacattccaatcactcgaagacaggcaaaactgaaccactggctgggcccaccttaaatcagtgacatcaacctctgcaggcaaggctcaagtatcagtacattttaaaacaactttgcccactgaaggttcacttaatcaactgataaggccgggtgcggtggctcatgcctgtaattccagcgctttggatgcctgtaatcccagcattttgggaggccgaggcgggcggatcacctgaggtcaggagttcaagaccagcctagccaacatggcaaaaccccgtctctacaaaaatacaaaaattagctggacgtggtggtgtgtgcctgtaatcccagctactggggaggctgaggtgggagaatcgcttgaaccccggaggcggaggctgcagtgagccgagatcgcgccactgcacttcagcttgggcgacagagtgagactctatctaaaaaaaaagaaaaaaaaaatcaactgataacaggcgattaacaggagaaaagggatacataacaccggggtaaaagcaggaggatgattacccagtagcttaatggagtacagaagattttatatctttttttcataggggaaagggtagatgagaaatgtagacatttattttgaggagcagcaaatgattattaggaacaatgaatggacagaaattagtaaataattttcttttgagtaatcttgtgaaaaagtccctccaggaatggctgcatttctgagtctttttgaaataggatacgagatttcagcgaggggaggaatgcgattgattcttctacaaagaggcttctctagtcaggaaaggaaatttcagagagtacctccctgcacttgggaaaagtgggagcaacaagtcaaggttgggggacctgcattatgaggcagcttctaaagcctctgtctttggggtatcgctttctgagcgtcaagagtaaaacgtgatgcattcctttccttccaacctagattctagtagtttagatcagtatcattgtttttacttcaaggttcaggaaacgctggaaattgctagctaatatcacaggaaaaaaaacaaaaaacacgaggttgacctcaccctacccgcggtaggtaaccatgtatgaatagagactcccaggcataatcaaattacctctgtcaagtcctcgccctaagactatttttggaaactagggattttccagattactgaaagccgtggcggtgtcaaaggccgggcaggagtttcgcaagcggagctatgaaagcagccactctcgcggtcattcctatgcctccgccctacttccccatactggcaaaaacacgctccccggggagctttcatttgggaaccgatagggtccacagccctgtgttcttcaaatactgtaaagcagccctctccagattccttgagggtcactttatattacacattcgtccacacaggacaacaaagtcaccacttccacccgccaaagcgcgctcaggtcggccgccacttcccttggtacacgcggaacgcaagccgcgccgaggctaaaggaagaggccggaatgcagggcgaaggggcgcagagatgctagccaatgctgccacctctattttgggtataagggatcttgtaaagctccgttattcgtgtggctatcacaaacaaggtggtttcgaccggccttggctagagaaggcctcctcagcctctgaggatcccaaggtctgtcgcagcacccaacactcccctcgcaggcccagatgccgagggcggaggcgcggcctggagggactagttggcgcgcggctgcccggcgtggtgacgtcagggcggaagcgcacgcggcgtgaagcggcccagaacccggcggtcacgggaatatccgtcgcgccgagaacgctggttagtcttgtttcgggttccggctgcgttgggcttgcgtgcggctcgctaagactatggcgtccgggcctcattcgacagctactgctgccgcagccgcctcatcggccgccccaagcgcgggcggctccagctccgggacgacgaccacgacgacgaccacgacgggagggatcctgatcggcgatcgcctgtactcggaagtttcacttaccatcgaccactctctgattccggaggagaggctctcgcccaccccatccatgcaggatgggctcgacctgcccagtgagacggacttacgcatcctgggctgcgagctcatccaggccgccggcattctcctccggctgccgcaggtcagtgctccggccccgggccggccgggcgctcctctcctctcctccgtcccctacgccgcatctcagtatcaccgtgccccgggagggtggggacg

SEQ ID NO: 2283 - DNA, 6000 bp, Homo sapiens
gttctcattaataacccaacttagcaaagaattgatacttttccatgctgttttggtccctttctcaaagatcacaaaaatcaagaagccaaaccaaccagccaacgaaaaaacccacctccaaacaagcctaaaaacgtttatgattgagaagacgtagacaagattcccaccatatccaaaacccacacaaattattaacatgttgacagattaaaaagctgcagctttttaaaatgatgattcaaagaaaaaggaaggaaggtagtaaccgggtgatacactttagtttttttgtgtgggagggtaaagagtgtgccgttaatttaaagtaaaaagaatcacaaagaaataacaactaaattcccttgattttcttttaaacagatttttaaaaaaatcaattgcaaatctactttaacactttcccttaaccttaaaagttctgtcatactgaagcaaaggcttctaaaatttagataaatcaaatgtaattaatatgcaatggaataaaatctgatttcctggcaatctattttccaacccaacttgtacaatagaaagcacaaaagaaaccaaattaaaatagatgattctgtgtaattaaagcactttgtattaaaaaaaggaaaacgaattcaaaagacaaatcacctcccaatttcattatgtaattagttttctatatttttaggttccatcgagtcatttttgaacaatcaatttcctacattattaaacagaagagaaaaagtctcaacaggtaaataatctagacattttacctctagttgtctccatttctagaaaacaaacattagcttgtccttcccccatttctaaaggacttaattacagcagtagtcaaactgaagcaaagctctttcatatcacagatactcaggggccactaacattagagttaaaatgcactgaaataatgaagatggtaaaaccggctaactgctacattttcaagtttagctaatttattctaaagcaatcaaaatataactttaaaaatgaactgaatatttatagtaaaataatgcctatttagtactcaggaccctaaaactgctcaatgcttttattccaaaaaggattactatgaactatttatacttcatttctttagctaaaaaataagtattttaacaggcaccaccactcccccaaaataaaatacggtcagagataatgaaaccaatgctttccgctgtaattacatacaaatttcttaaagccaaaaataaaatatgtaatgcatttaagtccattttccttacttgaacttgccaataacagtaaaaatcccttaccttatcaattatcttttgaaaatgaacttctactgtacaactctgaatgtccttgtgttcatcagaattatgtattaatactgagagttttttagatcttattttttgtgctcgatagccaaacacaaaaagcatagaatcaataacattggatttgccactgccatttggcccgataatacaggaaaagcgctgcattaaaaaaacaaaaacaaaacacggaaaagttcataaggtcatgctaatactactgattttaactgaaactgttagatttttttacttgcagttaaaaactgcaagtatttaaaagttctcattgctaatcacaggcatacgacttgagttttcttacatcaagttctctcttaaaagcttcaacattcaataagaatgctccaattctaacgcagacgttttagaaaactcattttatagttaaattatctaagggttccatagaaggctttaagaaaaaaaaattatccaagggaaaatactctttcaaacagaaacacacaccgactccattcaatggaaaactttgtaactagaggtaccaaagataaccagataaacaaaagataatttcagtgttaaaatcatatgaaacgtgtgtgtgtgtgtgtgagagagagagacagaaagactatcaggataaatagggagtgaatgaattttaggatagttacaaaactgaaacatcttgtaaaaacgtattaccttacaatagttatttaaaaagttataaaatagttatttccatacaaataccttatggaaaggtcccagaattttctccccagcataggatttgaagttctggtttacaatatgagttatcataagccgaggagctccagcttcattggtcattgctggaggcgggggaggaggaatgctgttcaaaatctcttctaaacttctattatcaagttcctcacttgcagtctctaagtcagtgaaaggaaaggaaaacgaaggcaaacggcgggggaaaagcctacattagtgcaattagttcggagaactaatgactgcccatctttaaagtaggggatggagggatgttatttatgaaacttaggagtctatattttccacttaaatatgttattatcttaaactcacgggggtgactaaaccttcagcttggttttactaaaaaagaaattcttgaaagaaatgccaccggtcacaaaattctatacacctatacctcttaagagtcaaaacactacatcatagagcaaatctgggaaaaccgtaacaagctatttcctgctgcctatcctaaacaggaggttaaatcctaaggctctagatgcaattctccgtaccgctgagcacctggaaccttcattttggaaactcatgaacttcagcgacactgccacgagggtttaataatgtcacccaactcctggactcacaaaagctacagtggcttcaaataaattatcgtcttctctttaacggcaatctaacaccacggaggtgaggttagggtcaaaaaacttttcatcatgctcacatagtcatattgattgtctctgggaaaaaagtccacttgctctcttgattgaccgtctcgattttagcgggaatacaataaagatattgaatttttgtttgtgacctgtaccattccacaggtcacaaacaaaaattcacaactgaacccgtttgctcgcccccatcccttccagcgccgttacaccaaaattgcacgggaatcctatctcaaagttgccaaatggctttcctgagcctctaccggaccgacaccggaccttcagatgtcaactccgcgctcaacaaccccagccagcctcgggctgggcgcgtttgcctgccagtcccacagcgcgcgttcccgccgagtcgcggcgggtcactcacctgcggcggtggctgggctctccgtgcggccggacggcggctcaggctccgcgtcgctgctggcgccgtcaggggacggcggcggcggcccttcctctctgcgccgggcagtggagggctgggtgcctttacggggcatggtcgctggggccgggggacagccgggagcaagtcagcccgcgggccgctacaccgcgcccgccccacccggggaaatctcggtccaccggcttccgagagccccgcttaacactccgcttagaggcagcgggacttcgggaagggagccatcgaaagacacgagtggcaagaaggcaggactggtttcttaacaagacctatgtaagtgggaaaatctagacgtgcctgaggatcaatcaacgattgagcaactgcttagtttgttgttgttgtttttaaggctctccacccgtccgcccatagtataagcgtataatattcgctaacgcatttctaattaaggaactcccatacgccagcatttccggacattcccacgctttcggggccagggatgcaagcgcgcaccgacgtggagaaacgagttcgtgtccgggtcaggatcccgtggctagcaactctctccagagcggtgaagactaactggcgactcgccgcccgctttcgtctgcccgccctttagctcctggcgccgttgacggcccggggcataacgaagtctccctcctctcagcggtcggaccgcgaagggcgaaggctgggactaaccactagcaacttcaagtcggacgctggcagcgcttgctaattttggagtggcaagagtttgtctctccagctccccaggcggagtcccgttggacagtaaaccatgaaaggtcaccagcgaaggctgagacccggtgactagtccgttggcagaaggaagaggggtagggggagacgcccttttccagatagagactaggattttttaaagaaaagatctgcgaggctcagggcctccccgagacatttgagtagcttggaaaagtggcgcccgggagctgcgcgcgggagcccgggccgccggggagcggccgaggggggaggggtgacagcaagagaaatctcccagcggcagcttcaagcccggacttcgccgctcgggctcaaggcctctattttccaggcgctcgcggacaaggcaggaagtaagagcgtgacaacctgaccaggaagagaagtactttacctgcaggacagtccactcagaccaaggctggagacggttgtgtagtacccacctccccgctcctaccggtgtttcggctccgggtccttcactcgaaaatggcgcctaaaatacaaactcgaacggaaattcgttacaaatgcgcgcaatgatttctgggatccactaatttgaaaaaaagtgcggcgattatcaccgccatcttattgtcgctcctgcgcatgcgcgaactcctggcgggacctacgcggtagaagtttctactaagtgaaaaggaagagcgagggattcttttctctgtggtctacagcagcagcactattattaaaaatatttggaaagacaacctggcaagttttgaaaaagatttttttaaaaacggtagggttccgctcacagtgggaggcggggctcagtggtccagaaacgcctcttcagaagagggcgggctcgccgagaggcggggtctcgggcccactcggatgacgtgccgcgtagaagtatcgcgggaagaggaagggagcgtaactcttagaagtcactatggtgacggggaggtaccaggtatttgagagcaatcgccaccgctttcctggaacttgaggtaaatcccttcacctctggacctggtgagaaaagggtttggaagttgtagccatcactggatcccatctttcctgttttgaagctgtgtgcttcgtggagcatcattttctgtctccctggcggcagcggggctccgggtgtagcttttgggatgcgaaggaggaagccctaaattttaagggagtagagagacaactggaagacctggattcgtgatagcttagtcgacatgtgaatagcgcaataatgattttcgagatcattggtgttactagtgaaaggtttaggacttttaaaataatttgactaaaaggctctttagtggaaaaaacgactcgccagtgttatggttatttttatgaggaaattatcgatcagcaaatattccctaagtagtgtttgtatacattgccctgggtaaggcataattagaattagtaagcaagtttggcgattcctgttccccgagaacttagttttagtgggtttttaacctgaggtctgtggatctggtggtaggtgattgggcttcagagttcataactcgcctgacattgtatacataattctatgtgcatttttctgggaagttagttttcctacaactttataatcagaatctcatacttgctcctaattccctatattgttaaagagccactggctcatttgactatctccagtattcatgcaacaactcttaagtacttgacattgagaactactagcctcctttttttttctttaacttttgcttacttagggtctggcatgttaaatcaccattaaatctcccttttgaatgaatttacatgatcactctaaatacattatggttcttccctggaagagcatgaagtcaggttcagtgattctcaaaaaggtgtggagagccacccccctcccaaccaattgtaagaatttggtgaggttgggagactggtgtgtattgca

SEQ ID NO: 2284 - DNA, 6000 bp, Homo sapiens
gccactacgctccagcctgggcgacagagtgatactccatctcaaaaaagaaaaaaaaaaactattttaaaaatgagatgaatttgtacatgttgatatagaaagatgtctatgttaaatgagaaaaccaaggtatacagctgtattatatgattcaattccttttgtgaaaagaaaaagtgagatatatttaagctggtggataccaaaacattttctgggaagatatgcaagacacttaataatggagacccctaaaagggtgggggcactgggatgagaaggaaagctttaaattctaattttatatgtttctgttctgtttgaagttttcaacaatgctcacagtattatttaatctatccacttatatatttaatatagaattatctgagtgaaaggattatgacctaatttttatgcatttctgcatttctataaaaccctaataaataatatttttataagatcaccattctccacacttgaatccccttcttattaaaactctcacctggcttatcttcatgaagatactatactttgtttactttcttatgtaaaatgaggctaataatacctacctgacaaattagttatgatgattaaatgagataaagtatgtaaagtgtccagtagagtacccaatacacagtaagcacttaataaatgttagtatttccagtgaaagttgttttttcaccctgcatatatatagtcactcttttcccacctaaaaagaatttctctttgcaacaaccacttcctcactgttagcccatgtggcatgaggcccagacttaagccaattagagcattccattccctttgcacagactgtttcacaggtggcccaggacttttattcaaatcaatgctggggaagagaaactctcattcccccttggattttaattttagaagatatgaggctggagttgctgtagctatcttaccacagcaaggggagagccaaaaggtgctagaggccatcatacggaacctgaaaatactgccaacacaatggagttcaaagcaaggaaagaaaccaaatccttgtgtctttgtctgaacccttaatccagttatagtcacctgactttttagttccaggagacaatatttgttttttctcaagacaatttggattgggttttctgtcacttgtaatcaacaggctcctatcctagatattactgtaattatttcttcttcttacattctaaaaatgaacatttccttaatatccttggtctggtgctagcttctctccacttacaatcttaaaaacctaacctatttttagtgatccagttattcttacagcactacccattttattttctctcttaagccatactctctacctctactgcttgttgaatatatctttccagaattccaacctacggaataaaaacatacttatctttcaaaatgatatttccaaaaaagagctgttctgccttctagcttcctgggttttcggtgataagttatgtgtgtttcggtaacattaatataccaaggtgcttatattatcaagaggaatattcacttctatctgcactgtgtctatatctaatttattaatcttgaacaatattctctaaatatttatacaatacttacataaattcatattagttaatatctaatttatctaaatatttacaattacaaatttaatcttttaaaatatttactcagaaatctaatttcagcctttctgaaatgttatgacattagaaggcaaacaaaacacatattgttaaaatgatgaaaaaaccttgcacttaaagaactgaaaatgaagattttaattctaattccaatttttctctttgaacttatttcttcctgtggggtataatttttttctaatgtaaaaagtgaggttttccttctaagactgcctgaaattgcagatagagattactgacagatcattttagactaggaagataagacccagttatagcaatactttccaaaatgactgtaacccagtcttttccaggtaggccagcttctctttgtaattaaactctgttaatttcatgagacatgtccaaaatattggcaacaatcaaccaaaagtctttatttcttgtgactctaatatcttctcaaaatttatacttattctgaatgtcttatttttgtggtatatataaatctccagatttaagtctactctgtagctgtttgttatgttttctcattatacaacctggtttatgccccttttcaaaatagttttctgagtgggcaatggttaggttcaattaaatttaaggccatcagtcagttgatttatcaaaactatattttctgtgacttatcgttcttcctataccttatcactaattcaaggatacacaaagaatagtatatgactgacttcaagggtttatactctgaaccatcacaatctacaaaagctatagatttttaccccaaaatgactccagatttttttccatcctacttaggcacttctcacttactgttatatagtaacaatcttaactaaagcctagactgatctcagtttctttcccctttaacataccccacataactactgttaattattcttcctatatttaccaagtcattccttggctcagaattgttctaaaagctgtttcctccatatcatatctaacatccttgacttggttttcaagatccttcaggagctacccttcctctaacttgatatcccattattcatccttagcatactttgataagttcaatgtcataaacacagcaaaatcaaatccttatggagcatgtgctagatgaacaatcataaacagtatgatgagacaggtattatatgctagtttcataaataaatactctcaagattgacaaactgaggaaactgtcaagcatatacctaaaaaatgatggaacttgggattctgttttctatattacatctttccactacattgtgctctgttgccccaaatacaccactcaatttggtctatacttttttttttttttttttttttgagacgcagtttcgctcttgttgcccaggctgtagtgcaacggcactatctcggctcaccgcaacctccgcctcccgggttcaagagattctcctgtctcagcctccctagtagctgggattacaggcatgcgccaccatgccctgctaattttttatttttagtagagacggggtttgtccatgttggtcaggctggtctcgaactcccaacctcaggtgatccgcatagttgatacctccccaactcaggttttgtagtgttttacaacctttggaaatgcaaaaattccagaagccctcaaagataatccttatatcttcttggtatgcttaccagccaaaaaactttttttcattaaggtttattttctgtagcttgttttatgaaaacaacaattcgtttttaacttcaaacataaagatatatcacgatattgagtctacgcttatgcaatacacaccagtctcccaacctcaccaaattcttacaattggttgggaggggggtggctctccacacctttttgagaatcactgaacctgacttcatgctcttccagggaagaaccataatgtatttagagtgatcatgtaaattcattcaaaagggagatttaatggtgatttaacatgccagaccctaagtaagcaaaagttaaagaaaaaaaaaggaggctagtagttctcaatgtcaagtacttaagagttgttgcatgaatactggagatagtcaaatgagccagtggctctttaacaatatagggaattaggagcaagtatgagattctgattataaagttgtaggaaaactaacttcccagaaaaatgcacatagaattatgtatacaatgtcaggcgagttatgaactctgaagcccaatcacctaccaccagatccacagacctcaggttaaaaacccactaaaactaagttctcggggaacaggaatcgccaaacttgcttactaattctaattatgccttacccagggcaatgtatacaaacactacttagggaatatttgctgatcgataatttcctcataaaaataaccataacactggcgagtcgttttttccactaaagagccttttagtcaaattattttaaaagtcctaaacctttcactagtaacaccaatgatctcgaaaatcattattgcgctattcacatgtcgactaagctatcacgaatccaggtcttccagttgtctctctactcccttaaaatttagggcttcctccttcgcatcccaaaagctacacccggagccccgctgccgccagggagacagaaaatgatgctccacgaagcacacagcttcaaaacaggaaagatgggatccagtgatggctacaacttccaaacccttttctcaccaggtccagaggtgaagggatttacctcaagttccaggaaagcggtggcgattgctctcaaatacctggtacctccccgtcaccatagtgacttctaagagttacgctcccttcctcttcccgcgatacttctacgcggcacgtcatccgagtgggcccgagaccccgcctctcggcgagcccgccctcttctgaagaggcgtttctggaccactgagccccgcctcccactgtgagcggaaccctaccgtttttaaaaaaatctttttcaaaacttgccaggttgtctttccaaatatttttaataatagtgctgctgctgtagaccacagagaaaagaatccctcgctcttccttttcacttagtagaaacttctaccgcgtaggtcccgccaggagttcgcgcatgcgcaggagcgacaataagatggcggtgataatcgccgcactttttttcaaattagtggatcccagaaatcattgcgcgcatttgtaacgaatttccgttcgagtttgtattttaggcgccattttcgagtgaaggacccggagccgaaacaccggtaggagcggggaggtgggtactacacaaccgtctccagccttggtctgagtggactgtcctgcaggtaaagtacttctcttcctggtcaggttgtcacgctcttacttcctgccttgtccgcgagcgcctggaaaatagaggccttgagcccgagcggcgaagtccgggcttgaagctgccgctgggagatttctcttgctgtcacccctcccccctcggccgctccccggcggcccgggctcccgcgcgcagctcccgggcgccacttttccaagctactcaaatgtctcggggaggccctgagcctcgcagatcttttctttaaaaaatcctagtctctatctggaaaagggcgtctccccctacccctcttccttctgccaacggactagtcaccgggtctcagccttcgctggtgacctttcatggtttactgtccaacgggactccgcctggggagctggagagacaaactcttgccactccaaaattagcaagcgctgccagcgtccgacttgaagttgctagtggttagtcccagccttcgcccttcgcggtccgaccgctgagaggagggagacttcgttatgccccgggccgtcaacggcgccaggagctaaagggcgggcagacgaaagcgggcggcgagtcgccagttagtcttcaccgctctggagagagttgctagccacgggatcctgacccggacacgaactcgtttctccacgtcggtgcgcgcttgcatccctggccccgaaagcgtgggaatgtccggaaatgctggcgtatgggagttccttaattagaaatgcgttagcgaatattatacgcttatactatgggcggacgggtggagagccttaaaaacaacaacaacaaactaagcagttgctcaatcgttgattgatcctcaggcacgtctagattttcccacttacataggtcttgttaagaaaccagtcctgccttcttgccactcgtgtctttcgatggctcccttcccgaagtcccgctgcctcta

SEQ ID NO: 2285 - DNA, 6000 bp, Homo sapiens
ctggggaagagaaactctcattcccccttggattttaattttagaagatatgaggctggagttgctgtagctatcttaccacagcaaggggagagccaaaaggtgctagaggccatcatacggaacctgaaaatactgccaacacaatggagttcaaagcaaggaaagaaaccaaatccttgtgtctttgtctgaacccttaatccagttatagtcacctgactttttagttccaggagacaatatttgttttttctcaagacaatttggattgggttttctgtcacttgtaatcaacaggctcctatcctagatattactgtaattatttcttcttcttacattctaaaaatgaacatttccttaatatccttggtctggtgctagcttctctccacttacaatcttaaaaacctaacctatttttagtgatccagttattcttacagcactacccattttattttctctcttaagccatactctctacctctactgcttgttgaatatatctttccagaattccaacctacggaataaaaacatacttatctttcaaaatgatatttccaaaaaagagctgttctgccttctagcttcctgggttttcggtgataagttatgtgtgtttcggtaacattaatataccaaggtgcttatattatcaagaggaatattcacttctatctgcactgtgtctatatctaatttattaatcttgaacaatattctctaaatatttatacaatacttacataaattcatattagttaatatctaatttatctaaatatttacaattacaaatttaatcttttaaaatatttactcagaaatctaatttcagcctttctgaaatgttatgacattagaaggcaaacaaaacacatattgttaaaatgatgaaaaaaccttgcacttaaagaactgaaaatgaagattttaattctaattccaatttttctctttgaacttatttcttcctgtggggtataatttttttctaatgtaaaaagtgaggttttccttctaagactgcctgaaattgcagatagagattactgacagatcattttagactaggaagataagacccagttatagcaatactttccaaaatgactgtaacccagtcttttccaggtaggccagcttctctttgtaattaaactctgttaatttcatgagacatgtccaaaatattggcaacaatcaaccaaaagtctttatttcttgtgactctaatatcttctcaaaatttatacttattctgaatgtcttatttttgtggtatatataaatctccagatttaagtctactctgtagctgtttgttatgttttctcattatacaacctggtttatgccccttttcaaaatagttttctgagtgggcaatggttaggttcaattaaatttaaggccatcagtcagttgatttatcaaaactatattttctgtgacttatcgttcttcctataccttatcactaattcaaggatacacaaagaatagtatatgactgacttcaagggtttatactctgaaccatcacaatctacaaaagctatagatttttaccccaaaatgactccagatttttttccatcctacttaggcacttctcacttactgttatatagtaacaatcttaactaaagcctagactgatctcagtttctttcccctttaacataccccacataactactgttaattattcttcctatatttaccaagtcattccttggctcagaattgttctaaaagctgtttcctccatatcatatctaacatccttgacttggttttcaagatccttcaggagctacccttcctctaacttgatatcccattattcatccttagcatactttgataagttcaatgtcataaacacagcaaaatcaaatccttatggagcatgtgctagatgaacaatcataaacagtatgatgagacaggtattatatgctagtttcataaataaatactctcaagattgacaaactgaggaaactgtcaagcatatacctaaaaaatgatggaacttgggattctgttttctatattacatctttccactacattgtgctctgttgccccaaatacaccactcaatttggtctatacttttttttttttttttttttttgagacgcagtttcgctcttgttgcccaggctgtagtgcaacggcactatctcggctcaccgcaacctccgcctcccgggttcaagagattctcctgtctcagcctccctagtagctgggattacaggcatgcgccaccatgccctgctaattttttatttttagtagagacggggtttgtccatgttggtcaggctggtctcgaactcccaacctcaggtgatccgcatagttgatacctccccaactcaggttttgtagtgttttacaacctttggaaatgcaaaaattccagaagccctcaaagataatccttatatcttcttggtatgcttaccagccaaaaaactttttttcattaaggtttattttctgtagcttgttttatgaaaacaacaattcgtttttaacttcaaacataaagatatatcacgatattgagtctacgcttatgcaatacacaccagtctcccaacctcaccaaattcttacaattggttgggaggggggtggctctccacacctttttgagaatcactgaacctgacttcatgctcttccagggaagaaccataatgtatttagagtgatcatgtaaattcattcaaaagggagatttaatggtgatttaacatgccagaccctaagtaagcaaaagttaaagaaaaaaaaaggaggctagtagttctcaatgtcaagtacttaagagttgttgcatgaatactggagatagtcaaatgagccagtggctctttaacaatatagggaattaggagcaagtatgagattctgattataaagttgtaggaaaactaacttcccagaaaaatgcacatagaattatgtatacaatgtcaggcgagttatgaactctgaagcccaatcacctaccaccagatccacagacctcaggttaaaaacccactaaaactaagttctcggggaacaggaatcgccaaacttgcttactaattctaattatgccttacccagggcaatgtatacaaacactacttagggaatatttgctgatcgataatttcctcataaaaataaccataacactggcgagtcgttttttccactaaagagccttttagtcaaattattttaaaagtcctaaacctttcactagtaacaccaatgatctcgaaaatcattattgcgctattcacatgtcgactaagctatcacgaatccaggtcttccagttgtctctctactcccttaaaatttagggcttcctccttcgcatcccaaaagctacacccggagccccgctgccgccagggagacagaaaatgatgctccacgaagcacacagcttcaaaacaggaaagatgggatccagtgatggctacaacttccaaacccttttctcaccaggtccagaggtgaagggatttacctcaagttccaggaaagcggtggcgattgctctcaaatacctggtacctccccgtcaccatagtgacttctaagagttacgctcccttcctcttcccgcgatacttctacgcggcacgtcatccgagtgggcccgagaccccgcctctcggcgagcccgccctcttctgaagaggcgtttctggaccactgagccccgcctcccactgtgagcggaaccctaccgtttttaaaaaaatctttttcaaaacttgccaggttgtctttccaaatatttttaataatagtgctgctgctgtagaccacagagaaaagaatccctcgctcttccttttcacttagtagaaacttctaccgcgtaggtcccgccaggagttcgcgcatgcgcaggagcgacaataagatggcggtgataatcgccgcactttttttcaaattagtggatcccagaaatcattgcgcgcatttgtaacgaatttccgttcgagtttgtattttaggcgccattttcgagtgaaggacccggagccgaaacaccggtaggagcggggaggtgggtactacacaaccgtctccagccttggtctgagtggactgtcctgcaggtaaagtacttctcttcctggtcaggttgtcacgctcttacttcctgccttgtccgcgagcgcctggaaaatagaggccttgagcccgagcggcgaagtccgggcttgaagctgccgctgggagatttctcttgctgtcacccctcccccctcggccgctccccggcggcccgggctcccgcgcgcagctcccgggcgccacttttccaagctactcaaatgtctcggggaggccctgagcctcgcagatcttttctttaaaaaatcctagtctctatctggaaaagggcgtctccccctacccctcttccttctgccaacggactagtcaccgggtctcagccttcgctggtgacctttcatggtttactgtccaacgggactccgcctggggagctggagagacaaactcttgccactccaaaattagcaagcgctgccagcgtccgacttgaagttgctagtggttagtcccagccttcgcccttcgcggtccgaccgctgagaggagggagacttcgttatgccccgggccgtcaacggcgccaggagctaaagggcgggcagacgaaagcgggcggcgagtcgccagttagtcttcaccgctctggagagagttgctagccacgggatcctgacccggacacgaactcgtttctccacgtcggtgcgcgcttgcatccctggccccgaaagcgtgggaatgtccggaaatgctggcgtatgggagttccttaattagaaatgcgttagcgaatattatacgcttatactatgggcggacgggtggagagccttaaaaacaacaacaacaaactaagcagttgctcaatcgttgattgatcctcaggcacgtctagattttcccacttacataggtcttgttaagaaaccagtcctgccttcttgccactcgtgtctttcgatggctcccttcccgaagtcccgctgcctctaagcggagtgttaagcggggctctcggaagccggtggaccgagatttccccgggtggggcgggcgcggtgtagcggcccgcgggctgacttgctcccggctgtcccccggccccagcgaccatgccccgtaaaggcacccagccctccactgcccggcgcagagaggaagggccgccgccgccgtcccctgacggcgccagcagcgacgcggagcctgagccgccgtccggccgcacggagagcccagccaccgccgcaggtgagtgacccgccgcgactcggcgggaacgcgcgctgtgggactggcaggcaaacgcgcccagcccgaggctggctggggttgttgagcgcggagttgacatctgaaggtccggtgtcggtccggtagaggctcaggaaagccatttggcaactttgagataggattcccgtgcaattttggtgtaacggcgctggaagggatgggggcgagcaaacgggttcagttgtgaatttttgtttgtgacctgtggaatggtacaggtcacaaacaaaaattcaatatctttattgtattcccgctaaaatcgagacggtcaatcaagagagcaagtggacttttttcccagagacaatcaatatgactatgtgagcatgatgaaaagttttttgaccctaacctcacctccgtggtgttagattgccgttaaagagaagacgataatttatttgaagccactgtagcttttgtgagtccaggagttgggtgacattattaaaccctcgtggcagtgtcgctgaagttcatgagtttccaaaatgaaggttccaggtgctcagcggtacggagaattgcatctagagccttaggatttaacctcctgtttaggataggcag

SEQ ID NO: 2286 - DNA, 6000 bp, Homo sapiens
cattcataggcttattttcaaaaaaaattgctttatcaacaatgtgtcaggcactggtgatacacaaatgaataagataggtgaggtggtgcgcctgtagtcccagctactcgggatgctgaggtgggaggattgcttaagctcaggagttcaaatccagcgtgggcaacatagcaagacctcatctcttaggaaaaaaacaaaacaaaactgatgaatgagaagtttcttcttcccttaggtgactcttcttctgttggcactttcgccttcatgagctcacctaatccttgcaacaaccgcccttttcaaatactctagtctccattttacagatctatccctaactacttcactgcagtcaaagagagctggactgaaatggaagctctgatagttttgtgagcttcagcctgttccctaaactccatgaacctcagtgtcttcacctatgaaatgagaactacagcaaaacagtggaaagagtccaatctcaattctctttattttttattcttgagatggagtctcactctgtcacccaggctggagtgcagtggtgcaacctccacctcccaggttcaagtgattctcctgcctcagcctcctgagtagctgagattacaggcgcgtgccactacgcccagataatttttgtatttttagtagaaatggggtttcaccatgttggccaggctggtctcaaactcctgacctcaagtgatccacctgcctcagcctcccaaagtgctgggattacaggcgtgagccacaacacccagcctcaatctcaattctctttaaaactcagtgctttaggctgggcgcggtggctcaaacctataatcccagagctttgagaggccgaggcgggctgatcacaaggtccagagtttgagaccagcctggccaatatggtgaaaccccatctctactaaaaatacaaaaattagctgggcgtggtggtgtgtgcctgtaatcccagctacttgggaggctgaggcagaattacttgaaccgggacctgggaggtggaggttgtagtgagctgagattgcgccactgcactccagcctgggctacagatcgagactccatctcaaaaacaaacaaaaaaacacaaaaaaaccttagtgctctccaaggtgcaagtagggatgagtttgttcagtgtggaaggggaggagtgaagctctggttatgattgctgctggtccttggccccttggtgaatggcaatagtatgtgtcccacaatctttccataaagagctgtatgtggatctctgtcatgtgacctcaaagtgctggctggccacaaaaggaagaaagtagccaactgctcagaaaggagaaaagtgtcctgaggaactccatgacccagggaaagcacagcctgagtctctaagagcatgactccagggtaaatggctgcgtgtattggaaagaggaggccatcacatctgcaggcctggtctacctccagctctgccacccttgagctgtgtgacattaggccttcaggtctcagtatcttctgcagtctgtaaaacaagtgaattggatgagacgatctttgaggagcatttctgctttaatgctctaaaaagtgaatccatgggcttagcaaattccggaacccaaagagatagtaagtgactcgtgacattcagatgagatttataatgtcagacagcataatgactgaggagacaggcttggcagataaagccttaccctttccctgacacctaatttcagaggccagcttaggattctgacaggctggccagtgggttattaaaacctcatattgcaaaaaggtcaaagtgtcaaatgatgatgatgatggctagccttaatttactgggtcactattttgcttaagcttgtgctaaacactttaaacataccttctcattaaatgcacacaatgatttgcaaggaggttctatcattgtctctattttacgaatggagaaactaagggaaaagatcacgtaacttccaatgtcagacaagacagattgcattaaagttagatttggaactcagatgcccttaatcactatcagttagtcttccaacacgacagaatttagactgaaacacacacatctgtcttctgggcaatttcatcatgcttctgagtgggaccatcaccagcaggtgcatttccatgcaacccagattccctgggcaaggcacatgtgacaaccagacagcttcaggaaacctaagcacacattgagctgaaatcaagccagggaacacctgtttgttgaacactctgcaggtgcttggttccagaggcaagccaaggtgaacatcaggtaagagatgtaacctttacccttagtagccctgtcaggctgagtatgcgtatgtgatatgctctggtgtgtccaggcagaaggggaaataagggatggtgctcctcggtggacacagggaagcaattataggtaaagtgctaggccatcccttatgcagtcccattggtaagtctaactaattcccatccacaataagctaacatatgccaagaagtatgatttcacacccttgatagcactttggaaatgtccgggtggaagagagtccctcataaaaataagcacagttttctgcaggattggaggtcctattttttttttttaattaaaaaaagcaggctgggcgcagtggctcatgcctgtaatcccagcacttcgggaggctgaggtgggtggatcactatgtcaggagttcaagaccagcaggagaatcgcttgaacccgggaggcggaggttgcagtgagccgagatcgtgccactacactccaggctgggcgacagtgggagactccatctcaaaaaaaaaaaaaaaaaaaaaaaaaaaaaaaaaaaaagcagttttagtgggtctatcatgatttacaaatggagaaacctcatgattttccagtgcctagttctggcctccaaagacagctcccagtgggttgttattatacacaaagatggcctgaagatgaatgcaaagccattcattcattcattcattccgcatgcatgcattctgcaaatatttatcaaggctcactacaagccaggcgctaggctggaggctaggagcataaagatgaataagacacagttccaggccgggcgcagtggctcatgcctgtaattccagcactttgggaggccaaggcaggcagataacttgaggtcaggagttcaagaccagcctggccaacatggtgaatccccgtctcgactaaaaatacaaacattagcggggtgtggtggtgcatgcctgtagtcccagttacttgggaggctgaagcaggaaaatcacctgaacccgggaggcagaggttgcagcaagctgagatcatgccactgcactccagcctggacgacagagcgagactccgtctggaaaaaaaaaaaaaaaagaagaaggaagtcatggataaagaggagttttagaaaaaaatccctctacagatgactgaagaaagcatgaaaatgtatggacaccgtgaagccagagatagaataggcagaacagttatggactgttgaatttttgtctgcagaccagcgctgggggagtcattggcaatggcaatggaaggtcatgcctagaatccaagcactgagtggaaaagagcaacaggtatttaaaatggattcagacctttacttccgtatctacacaaacatttacccaacattcactctgtgatatgttgtactaggtgtctttttcttcaatgtgtcagaacccataaaataagattgctagaagactcctgagtgttcccactaggtgaaagggagaagagatacttccttttttctcaccttacacgcacacacacacacacacagctgaagaagaaactctggggtttgcctaaaacagtcaagggctttgaagactgaaagactgagctttaaattttgattccgccgggcgcggtggctcacgcttgtaatcccagaactttgggaggccgaggcgggcggatcacctgaggtcgggagttggagaccagcctgaccaacatggagaaaccccgtctctactaaaaatacaaaaattagccgggcgtggtggcacaaaaattcaacagtccataactgttctgcctattctatctctggcttcacggtgtccatacattttcatgctttcttcagtcatctgtagagggatttttttctaaaactcctctttatccagctactcgggaggctgaggcaggagaatcacttgcacccgggaggcgaaggttgtggtgagccgagattgcgccattgcactccagcctgggcaacaggagagaaacactatctcaaaacaaataaataaaataaaaaataaatcctcattttactacttgatatgatcttctctgtaaaatggacctaaccctaccaatctcaaaagattgtaagaagtgcatggaatcactcgaaagcagtcctgacataagcgcgtcagtcacacgcctctaaggcttcacagggaaagacgagaagatagaggacgaagaccttgtcttgttctgcttttagctccagaacttggcggggagcacagggctttattgatcgatgtcaactccacctggctccccaaagtatttaaaatggtagccacgggaatagcagagtactctctttcaactggggaggaatatcaaatgaggttaataggccgggcgcggtggttcacacctgtaattacagctctttgggaggctgaggcgggcagatcacttgaggtcaggagttcgagaccagcctggccaacatagtgaaacccccgtctctactaaaaaatacaaaaattagctgggcgtggtggcgggcgcctgtaatcccagctactcgggaggttgaggcacgagaatcacttgaacctggtaggcggagtttgcagtgagccgagatcgcgccactgcactccagcctgggcgagagagcgagcctccttctcaaaagcaacaacaacaacaaaaccaaatgaggttaatattccacagtggtgtggggctagacacagttacacagactttatacaggcggcaatcaagcgtcctggacgtcaagaaatctagtttgtctgtcgcgccacgcagtcaactggagtgtcactgtgggttctatttacaccgttatgagaaaaacctgtggcggagtaaaactcggtaactccgctcgcagaccgcccatctacagcagtgagcgaacccaaaccccacacggccaagtcccgcgggtttcaggaaactccgaagaggtcgggggccaggggcgactatggcgcgggggaggctgggaattgtagtctccacctgcctccgagggcggggtccgagggcggggctctcaggccgagggggtgggtgggtcgccgagcgccccggctcgccccggcgtttccggtcgcaggcgggctctggaggaggaggggcgccgcgaccgacgcgcgcgagttggtctgggaaaaagggcggtgcgagcgggtgcgcgcgcagcgggccggcagtggcggcggagatggaggagggaggccgggacaaggcgccggtgcagccccagcagtctccagcggcggcccccggcggcacggacgagaagccgagcggcaaggagcggcgggatgccggggacaaggacaaagaacaggagctggtgaggcgcgaccccgagagtcggcgaaggaggctgcggggctgagtcacggcggctccgcaggcctcaggcccgacacccaactaccccaccgcgccagggagagggcggttggggcgaccctcgggactcccggcaccttgcctctctgctcctcattctccgttccgcgctgtcacctccgccgtccccaccaaccctcaccaccgccgcgtgaagtggactcgggcaggtcattgtcacctccgtttcctagagtggcattcaagtagagcctgattcagaacccaggctgatttctcaccag

SEQ ID NO: 2287 - DNA, 6000 bp, Homo sapiens
aacctccacctcccaggttcaagtgattctcctgcctcagcctcctgagtagctgagattacaggcgcgtgccactacgcccagataatttttgtatttttagtagaaatggggtttcaccatgttggccaggctggtctcaaactcctgacctcaagtgatccacctgcctcagcctcccaaagtgctgggattacaggcgtgagccacaacacccagcctcaatctcaattctctttaaaactcagtgctttaggctgggcgcggtggctcaaacctataatcccagagctttgagaggccgaggcgggctgatcacaaggtccagagtttgagaccagcctggccaatatggtgaaaccccatctctactaaaaatacaaaaattagctgggcgtggtggtgtgtgcctgtaatcccagctacttgggaggctgaggcagaattacttgaaccgggacctgggaggtggaggttgtagtgagctgagattgcgccactgcactccagcctgggctacagatcgagactccatctcaaaaacaaacaaaaaaacacaaaaaaaccttagtgctctccaaggtgcaagtagggatgagtttgttcagtgtggaaggggaggagtgaagctctggttatgattgctgctggtccttggccccttggtgaatggcaatagtatgtgtcccacaatctttccataaagagctgtatgtggatctctgtcatgtgacctcaaagtgctggctggccacaaaaggaagaaagtagccaactgctcagaaaggagaaaagtgtcctgaggaactccatgacccagggaaagcacagcctgagtctctaagagcatgactccagggtaaatggctgcgtgtattggaaagaggaggccatcacatctgcaggcctggtctacctccagctctgccacccttgagctgtgtgacattaggccttcaggtctcagtatcttctgcagtctgtaaaacaagtgaattggatgagacgatctttgaggagcatttctgctttaatgctctaaaaagtgaatccatgggcttagcaaattccggaacccaaagagatagtaagtgactcgtgacattcagatgagatttataatgtcagacagcataatgactgaggagacaggcttggcagataaagccttaccctttccctgacacctaatttcagaggccagcttaggattctgacaggctggccagtgggttattaaaacctcatattgcaaaaaggtcaaagtgtcaaatgatgatgatgatggctagccttaatttactgggtcactattttgcttaagcttgtgctaaacactttaaacataccttctcattaaatgcacacaatgatttgcaaggaggttctatcattgtctctattttacgaatggagaaactaagggaaaagatcacgtaacttccaatgtcagacaagacagattgcattaaagttagatttggaactcagatgcccttaatcactatcagttagtcttccaacacgacagaatttagactgaaacacacacatctgtcttctgggcaatttcatcatgcttctgagtgggaccatcaccagcaggtgcatttccatgcaacccagattccctgggcaaggcacatgtgacaaccagacagcttcaggaaacctaagcacacattgagctgaaatcaagccagggaacacctgtttgttgaacactctgcaggtgcttggttccagaggcaagccaaggtgaacatcaggtaagagatgtaacctttacccttagtagccctgtcaggctgagtatgcgtatgtgatatgctctggtgtgtccaggcagaaggggaaataagggatggtgctcctcggtggacacagggaagcaattataggtaaagtgctaggccatcccttatgcagtcccattggtaagtctaactaattcccatccacaataagctaacatatgccaagaagtatgatttcacacccttgatagcactttggaaatgtccgggtggaagagagtccctcataaaaataagcacagttttctgcaggattggaggtcctattttttttttttaattaaaaaaagcaggctgggcgcagtggctcatgcctgtaatcccagcacttcgggaggctgaggtgggtggatcactatgtcaggagttcaagaccagcaggagaatcgcttgaacccgggaggcggaggttgcagtgagccgagatcgtgccactacactccaggctgggcgacagtgggagactccatctcaaaaaaaaaaaaaaaaaaaaaaaaaaaaaaaaaaaaagcagttttagtgggtctatcatgatttacaaatggagaaacctcatgattttccagtgcctagttctggcctccaaagacagctcccagtgggttgttattatacacaaagatggcctgaagatgaatgcaaagccattcattcattcattcattccgcatgcatgcattctgcaaatatttatcaaggctcactacaagccaggcgctaggctggaggctaggagcataaagatgaataagacacagttccaggccgggcgcagtggctcatgcctgtaattccagcactttgggaggccaaggcaggcagataacttgaggtcaggagttcaagaccagcctggccaacatggtgaatccccgtctcgactaaaaatacaaacattagcggggtgtggtggtgcatgcctgtagtcccagttacttgggaggctgaagcaggaaaatcacctgaacccgggaggcagaggttgcagcaagctgagatcatgccactgcactccagcctggacgacagagcgagactccgtctggaaaaaaaaaaaaaaaagaagaaggaagtcatggataaagaggagttttagaaaaaaatccctctacagatgactgaagaaagcatgaaaatgtatggacaccgtgaagccagagatagaataggcagaacagttatggactgttgaatttttgtctgcagaccagcgctgggggagtcattggcaatggcaatggaaggtcatgcctagaatccaagcactgagtggaaaagagcaacaggtatttaaaatggattcagacctttacttccgtatctacacaaacatttacccaacattcactctgtgatatgttgtactaggtgtctttttcttcaatgtgtcagaacccataaaataagattgctagaagactcctgagtgttcccactaggtgaaagggagaagagatacttccttttttctcaccttacacgcacacacacacacacacagctgaagaagaaactctggggtttgcctaaaacagtcaagggctttgaagactgaaagactgagctttaaattttgattccgccgggcgcggtggctcacgcttgtaatcccagaactttgggaggccgaggcgggcggatcacctgaggtcgggagttggagaccagcctgaccaacatggagaaaccccgtctctactaaaaatacaaaaattagccgggcgtggtggcacaaaaattcaacagtccataactgttctgcctattctatctctggcttcacggtgtccatacattttcatgctttcttcagtcatctgtagagggatttttttctaaaactcctctttatccagctactcgggaggctgaggcaggagaatcacttgcacccgggaggcgaaggttgtggtgagccgagattgcgccattgcactccagcctgggcaacaggagagaaacactatctcaaaacaaataaataaaataaaaaataaatcctcattttactacttgatatgatcttctctgtaaaatggacctaaccctaccaatctcaaaagattgtaagaagtgcatggaatcactcgaaagcagtcctgacataagcgcgtcagtcacacgcctctaaggcttcacagggaaagacgagaagatagaggacgaagaccttgtcttgttctgcttttagctccagaacttggcggggagcacagggctttattgatcgatgtcaactccacctggctccccaaagtatttaaaatggtagccacgggaatagcagagtactctctttcaactggggaggaatatcaaatgaggttaataggccgggcgcggtggttcacacctgtaattacagctctttgggaggctgaggcgggcagatcacttgaggtcaggagttcgagaccagcctggccaacatagtgaaacccccgtctctactaaaaaatacaaaaattagctgggcgtggtggcgggcgcctgtaatcccagctactcgggaggttgaggcacgagaatcacttgaacctggtaggcggagtttgcagtgagccgagatcgcgccactgcactccagcctgggcgagagagcgagcctccttctcaaaagcaacaacaacaacaaaaccaaatgaggttaatattccacagtggtgtggggctagacacagttacacagactttatacaggcggcaatcaagcgtcctggacgtcaagaaatctagtttgtctgtcgcgccacgcagtcaactggagtgtcactgtgggttctatttacaccgttatgagaaaaacctgtggcggagtaaaactcggtaactccgctcgcagaccgcccatctacagcagtgagcgaacccaaaccccacacggccaagtcccgcgggtttcaggaaactccgaagaggtcgggggccaggggcgactatggcgcgggggaggctgggaattgtagtctccacctgcctccgagggcggggtccgagggcggggctctcaggccgagggggtgggtgggtcgccgagcgccccggctcgccccggcgtttccggtcgcaggcgggctctggaggaggaggggcgccgcgaccgacgcgcgcgagttggtctgggaaaaagggcggtgcgagcgggtgcgcgcgcagcgggccggcagtggcggcggagatggaggagggaggccgggacaaggcgccggtgcagccccagcagtctccagcggcggcccccggcggcacggacgagaagccgagcggcaaggagcggcgggatgccggggacaaggacaaagaacaggagctggtgaggcgcgaccccgagagtcggcgaaggaggctgcggggctgagtcacggcggctccgcaggcctcaggcccgacacccaactaccccaccgcgccagggagagggcggttggggcgaccctcgggactcccggcaccttgcctctctgctcctcattctccgttccgcgctgtcacctccgccgtccccaccaaccctcaccaccgccgcgtgaagtggactcgggcaggtcattgtcacctccgtttcctagagtggcattcaagtagagcctgattcagaacccaggctgatttctcaccagggcttcccattcccactcggtttccttgtccacctggcccctcctaaggaggcaggcttattcttcacctgccccgggtaagtgggaggaggacgtctttgggattccttctcttcatgagctgcttctcccaaccctccagtctgaagaggataaacagcttcaagatgaactggagatgctcgtggaacgactaggggtgagtcacgatgttaacatgattcggtgcatgtttggatctttcccacttgttttattcttttttgaggcaactgctatgtacggtggactgtattttagggtcagtgttatgatgatgttgggaggcaggagagttacaaagggtatttgtacagttttgcagctttctcttgtgggagaagcagagttcttacctcttaacttgggtcatttgtttttgtgccaggcagggtgcagggagttgaggaatcacagatgaatgaataagacacagcatttccttggaggagttgttaagttaaatatctctgtattatgacttgaaggggtgtgactcctttttgtctgagccctgtcgtctc

SEQ ID NO: 2288 - DNA, 6000 bp, Homo sapiens
gaagcaggaaaatcacctgaacccgggaggcagaggttgcagcaagctgagatcatgccactgcactccagcctggacgacagagcgagactccgtctggaaaaaaaaaaaaaaaagaagaaggaagtcatggataaagaggagttttagaaaaaaatccctctacagatgactgaagaaagcatgaaaatgtatggacaccgtgaagccagagatagaataggcagaacagttatggactgttgaatttttgtctgcagaccagcgctgggggagtcattggcaatggcaatggaaggtcatgcctagaatccaagcactgagtggaaaagagcaacaggtatttaaaatggattcagacctttacttccgtatctacacaaacatttacccaacattcactctgtgatatgttgtactaggtgtctttttcttcaatgtgtcagaacccataaaataagattgctagaagactcctgagtgttcccactaggtgaaagggagaagagatacttccttttttctcaccttacacgcacacacacacacacacagctgaagaagaaactctggggtttgcctaaaacagtcaagggctttgaagactgaaagactgagctttaaattttgattccgccgggcgcggtggctcacgcttgtaatcccagaactttgggaggccgaggcgggcggatcacctgaggtcgggagttggagaccagcctgaccaacatggagaaaccccgtctctactaaaaatacaaaaattagccgggcgtggtggcacaaaaattcaacagtccataactgttctgcctattctatctctggcttcacggtgtccatacattttcatgctttcttcagtcatctgtagagggatttttttctaaaactcctctttatccagctactcgggaggctgaggcaggagaatcacttgcacccgggaggcgaaggttgtggtgagccgagattgcgccattgcactccagcctgggcaacaggagagaaacactatctcaaaacaaataaataaaataaaaaataaatcctcattttactacttgatatgatcttctctgtaaaatggacctaaccctaccaatctcaaaagattgtaagaagtgcatggaatcactcgaaagcagtcctgacataagcgcgtcagtcacacgcctctaaggcttcacagggaaagacgagaagatagaggacgaagaccttgtcttgttctgcttttagctccagaacttggcggggagcacagggctttattgatcgatgtcaactccacctggctccccaaagtatttaaaatggtagccacgggaatagcagagtactctctttcaactggggaggaatatcaaatgaggttaataggccgggcgcggtggttcacacctgtaattacagctctttgggaggctgaggcgggcagatcacttgaggtcaggagttcgagaccagcctggccaacatagtgaaacccccgtctctactaaaaaatacaaaaattagctgggcgtggtggcgggcgcctgtaatcccagctactcgggaggttgaggcacgagaatcacttgaacctggtaggcggagtttgcagtgagccgagatcgcgccactgcactccagcctgggcgagagagcgagcctccttctcaaaagcaacaacaacaacaaaaccaaatgaggttaatattccacagtggtgtggggctagacacagttacacagactttatacaggcggcaatcaagcgtcctggacgtcaagaaatctagtttgtctgtcgcgccacgcagtcaactggagtgtcactgtgggttctatttacaccgttatgagaaaaacctgtggcggagtaaaactcggtaactccgctcgcagaccgcccatctacagcagtgagcgaacccaaaccccacacggccaagtcccgcgggtttcaggaaactccgaagaggtcgggggccaggggcgactatggcgcgggggaggctgggaattgtagtctccacctgcctccgagggcggggtccgagggcggggctctcaggccgagggggtgggtgggtcgccgagcgccccggctcgccccggcgtttccggtcgcaggcgggctctggaggaggaggggcgccgcgaccgacgcgcgcgagttggtctgggaaaaagggcggtgcgagcgggtgcgcgcgcagcgggccggcagtggcggcggagatggaggagggaggccgggacaaggcgccggtgcagccccagcagtctccagcggcggcccccggcggcacggacgagaagccgagcggcaaggagcggcgggatgccggggacaaggacaaagaacaggagctggtgaggcgcgaccccgagagtcggcgaaggaggctgcggggctgagtcacggcggctccgcaggcctcaggcccgacacccaactaccccaccgcgccagggagagggcggttggggcgaccctcgggactcccggcaccttgcctctctgctcctcattctccgttccgcgctgtcacctccgccgtccccaccaaccctcaccaccgccgcgtgaagtggactcgggcaggtcattgtcacctccgtttcctagagtggcattcaagtagagcctgattcagaacccaggctgatttctcaccagggcttcccattcccactcggtttccttgtccacctggcccctcctaaggaggcaggcttattcttcacctgccccgggtaagtgggaggaggacgtctttgggattccttctcttcatgagctgcttctcccaaccctccagtctgaagaggataaacagcttcaagatgaactggagatgctcgtggaacgactaggggtgagtcacgatgttaacatgattcggtgcatgtttggatctttcccacttgttttattcttttttgaggcaactgctatgtacggtggactgtattttagggtcagtgttatgatgatgttgggaggcaggagagttacaaagggtatttgtacagttttgcagctttctcttgtgggagaagcagagttcttacctcttaacttgggtcatttgtttttgtgccaggcagggtgcagggagttgaggaatcacagatgaatgaataagacacagcatttccttggaggagttgttaagttaaatatctctgtattatgacttgaaggggtgtgactcctttttgtctgagccctgtcgtctcttgatcaggagaaggatacatccctgtatcgaccagcgctggaggaattgcgaaggcagattcgttcttctacaacttccatgacttcagtgcccaagcctctcaaatttctgcgtccacactatggcaaactgaaggaaatctatgagaacatggcccctggggagaataaggtaaaactgtttcaaacctggtggaggcctagtttaggaattcctttttacccagatcatggggggactcattgtgagtcacaggaagcctgatagacctaagccgtgatctatttgagcagagttcatcacagtcaaaatatctacagaagagctgaaaggaaggtcagcttctcagaagacactgtttctgtcatgtgtattggactttggggtttcattagcatggtctacttttaacgtatgtttaaccttgatttttctcttttcttctatcccatatacattcatttatctctaaaatatgttccacattcagtcacttctctgcctgctggtacaaccctaatcctggaaatgttcagtttttgcatgggttattgcagcacctcttaactgatgttgttgcttttgtgctttgttcctacacagtctgtctctcatgtagcagctatcgtgatctttctcggttataggtcttttctgcttaagaccttttaatagtttataattgcaattaaagtaaaattgagagcctccatttttttccactttatccctcatttatcacccttcagctgtgttagtttaaaaggaagacagtggctgggtgtggtggctcacacctgtaaccctagcactttgggaggccgaggggtggatcacctgaggtcaggagttttagaccatcctggccaacatggtgaaaccccgtctctactaaaaattaaaaaaaaaaaaattagctgggtgtggtggtgggcgcctgtaatcccagctacttaggaagctgaggcaggagaatcacttgaaccccggaggcagaggttgcagtgaaccgagagcacaccattgcactccagcctgggcagcaagagcgaaactgagtctcaaaaaaaaaaaaaaaaggagatagcaacaacaccaaccttggtttttgtgaggtttagcttacataacatgttaaatttctagtacagagattggtatgtagttagttcagtttcggagacaatgatcttgattccacaatgcatgctccctttatgctggactgctgggtttgacttcaaagaactcttttctttatagcgttttgctgctgacatcatctccgttttggccatgaccatgagtggggagcgtgagtgcctcaagtatcggctagtgggctcccaggaggaattggcatcatggggtcatgagtatgtcaggtaagatctttcttcttgggaatccgaagggggctctgaggctctgagataattcagaattttcttgtggagtacaatctgtcttggagcatcagtgtattgaatttcccagacgctggattccttgacccacagagaagtgcttcccctgaagctgtgctctcttaatcgtctgggactatctgtaggcatctggcaggagaagtggctaaggagtggcaggagctggatgacgcagagaaggtccagcgggagcctctgctcactctggtgaaggaaatcgtcccctataacatggcccacaatgcagagcatgaggcttgcgacctgcttatggaaattgagcaggtggacatgctggagaaggacattgatgaaaatgcatatgcaaaggtctgcctttatctcaccaggtgagtgaacatggtagggaagggtggcaggcatgccctcctcagcacctctctctcaattgcgcctcctctattttcccagagcatttgctcaagcatagcatcacgctgtagttaatcttttgatgtgtgtgagtttcttgaggacagagactttgtgtcttcttagtagttctaacatctagcacagtgcctggtgtatatagtagatatttattatttattttgggtaagtgaattcatggggaaaatgagtgcctgggactttctgaattctttgttacttttacttttgtagttgtgtgaattacgtgcctgagcctgagaactcagccctactgcgttgtgccctgggtgtgttccgaaagtttagccgcttccctgaagctctgagattggcattgatgctcaatgacatggagttggtagaagacatcttcacctcctgcaaggatgtgtatgtagggaagaagctggcaaagagataagcttacgaataggacacttgcataaagagctgggacttgtagtttctggttagggcttgaggggttttcctgtgcccttagtggacagtgatgagcagatgtacgggctctctccacagggtagtacagaaacagatggcattcatgctaggccggcatggggtgttcctggagctgagtgaagatgtcgaggagtatgaggacctgacagagatcatgtccaatgtacagctcaacagcaacttcttggccttagctcgggaggtgagactgcccttttttcatcaaggccttttcgtcataattctacctgccatttcacctccctgactctacctctgactagactctccttgattagaattgccattcagtgggatagcagaagggacagctgggggagttctagggaagcaattgtgaccctctgacttctcttcagctggacatcatggagcccaaggtgcctgatgac

SEQ ID NO: 2289 - DNA, 6000 bp, Homo sapiens
gctctgtaagatatatgtacctgtaatggtcttggaactgtctcttactgtagcaccaattttatgcattactgacaactattttctttgattatctttttattgcttgctctctggggactaccctctacaggagatccctgacgacatgggatcaaaaggcctgagtaagtgatcaaaatactcccaagttattttttaacctccatctgcagacctaccttattcagatacattttgagattcatggtagtgcctttctggcataaggaggtgtatgatttagattgcttttagaattttcatgtttatcacatgcttgggactttatttctgtaatacataactttttgtttttatttttcacatgtcatttgaaaaattctcttgctcgtaactatattttcctttttgtaatttttacgacagttacttttgctaggaacttttaaaatataaaaacttttaagatttttttaaatgtaccctcattattagaatgtagaaatatgcttccttggagttttatgttccccttttttttgttaaaataatttaaaataattttgattatgtgttagaaaagcattactataaaagtataaagcacaatagaatactacgcaagtagcagtttattgaggggataggttgtgtatctcttttttttttttttttttttttttgagaaagttataagttaccacaagagtataagaactattttgtttttcctttagctaagatgttgcctttgtttttggtttttgttgctgctgttcttgtttaattttctagctagttacttaatcttcatgtaaagcttcacacagggtctagtatgtagaagacattcaataaatgttggcatgaatgaatgaagcaagaagccattttagcaaataaaatttttaatttgcatgttttcaaattgcttaactgaaaatttaccaaacattactgagtaactttaggtgacagtgagtgatagaagtaatcttttaatctaatattttctaaatggttctttctatttagattattaaatattttgaaaacttctttgtcattcattgatcattaagcctatagccagtatcttttaactttctaagacctacattaataaacattaaattttacataagacatttttctgatttatgcttttatgctgaaattttaatctaaactgcaggtacttttatttcaaccatagtgatttaagtttgtattagattgaagacagtatgtttatttacaactctttctgttagacacactttgttatttttgcatgtgcctttataggatttagtaagggccacagatttcctatcactagtgacacccttacatttggggaaaattatcaatgaaaacctctaaaattggaccatactaccacagtttatgtatgctatagaatttattttgagattgataacatactttagaggtggtatggatcaacaaatggacccacagatttttcttatatgttaagtgaacagagacataggaaactcatagaaaaagaaactaaatgaagaatttggttcccatattgatgttataatagatgatcattataccttgaccctctttctctggttctgattgaagattgagactttggaagagaaataatatgaaaaatggtaactgattatcagacgacgttattcagaaaaagattttattttctggagagtgacctaagatctcttgaataatagatttctgtgcttcatctcacaggaattaaaagaatttattcacctggtaacttgatcatcagatcaagattttattcacaaaatgttggagaagacagaaaaatatcagtaaaattctaaaactggatatgatggaggttatcacataaaatagatgatataaggcagttgacaaggtgcccatgattatgtagtagtaaatactgggaagaaggatgtgttcaaggacgttacttgtggcctcagttacttacattctgaagttaagaatgtagggaataaactaagcaaaatcttgagagactttaatataagaaaataagtgcaacttaatgtaggtagtcatcaggccttattggaacaaaactcaaaaagaacccaaaaaagaaggttaagttattccagagaaccgaacctattgaagagaaatggaataacactgaatatcaagaaaaaaaaaatgtatatctgctgtaaattcacacaacctatgaaaaatggggtatttaattgaagagcagacagagaaacagaagtgataccatagaacgctttgtgtagacctgaattcatttgttctttattctgagaagaagagagtcaaataaattattgatttccctgttaacagtagagaaaacagtgagagaaatcgtcttatcaaacctaattttgctaaacagaactaatgagagtacaatggaagtttgggagaatgcagctaagtcatcatttgcgaaaagctagaaataaaaacccgtgccgctttcatgctttaagggaggtaattttgaaaaagctcaagggactaaaactaggtaagattcctttaacagagactgaaaggaaacataactcaataaaagatacataaggtgctcagaagtaaaattatgacataagatttgagacaaggtttgttcttattacatgtaggctttccatttttacaactttccatgttgtacaacacctcaaaaatttcctcaggcacgtaggtttcctgttacatatgtcttttctttcttctcactttaaagacgtacgcatagttgtgcagagcttctaaatgccaaaaacagacttattttcatttgcattacgaataagatgtaagagtagtttcattgcttcagattgatgatgtagtattagaggagagcagaagagaaacatgatgtactgtatcaggaagaagcatttgagtacaatgataaaacttggttagagagatttgagatagatctgttcatcaaacatcataaacaggctgggcgcggtgactcacgcctgtaatcccagcactttgggaggctgaggccagcagatcacctcaggtcaggaattcgagaccagcctggccaacatggcaaaaccccgtctctactaaaagtacaaaaattagcaaggcatggtggtgcacacctgtaatccaagctactcgggagggaggctgaggcaggagaatcacttgaacccgggaggtgaaggttgcagtaagccgagatcacgccactgctctccagcctgggtgacagagcaagactcaggttttttttttgtttttttgttttttttttttttaagacaatcataaacaaaaataaaaacttgaagaatttatttgtaccatgtatgtcacaaggataatatctttataagtttttaacaggtaataagaaataagctaactctccattagaaaactgggcaagagtgctcagaagataagcaaatgaaataagcatataaaaaatgtttaatttccctagtagtgataagcaaaatgttttacctgtcactttggcagacttttgtttaaaaagaaaacccatgacggagagagtgctgctaaatgcctgcttttaatgtattacaagtaaataatgtattacaagtaaatgtatgggagtgtaaattggcacagccttcctgaaaaagcacatcttttgacccactaaatcctcttcaaagaatttatcctaaggatgtaattagagatggagacaaagccttatatatcagaatgcttattataatattattgagtaataacagcaaaaataaaaaaaaccgtggtaaaatgtcttacagttgggaagtgcctaatgaagtatgatttatccatactatgtaatattacataaccatcaaaaatcatatttaaagataatgacatggggaaatgcttactatctatgaaaaaagtaaaatatgaaactgcatatattgtctcagtcttatatgtttggagctattttaaatagtgttgctttgaacattcttatacatgtcttgtggtaagcatatatatgcctttctgttggggaaatatctaggaaaggaattgctgggtcgtatagatacacatttgtccagccttagtagctattgccaattagttttctagttttaccagtttgcccattcctagcgcatgaactcccattgctgcatatcattatcgatgcttgacatgtctgttttgtgttttcattttagccattctggtggatggcagagacactctttgtggttataatttgcatttccctgacaagtaattaacttgaacacttttctatatgtttattggttatttgactgtcttctttggtaaaatgctttgaagaggaacattttcaattatcagaagaaaaacattttatttttctaataacattccaaacaattatgatgacgctattctaaggaccatactttgagtagtgaggctttattgtagaagagctaagtgaaatgatatttgaaagaacctgcagaatttgattgtggcgtagcttttggcagtcttagagggtttgaggtgagtaggagaaatctcaaaaaaaaaaaaaaaagacagtgaagagattttggtaacttaaactttttattatataaatatcagatatattcaatagtagaaaagtagtaaaaataaaccctgcaggtatttgtttatccagctttcataattgtcaactgaacatttgccaattctgtttcttctgtactcccacttacactcccctcccttcaccccattgcaataactaatttttctttagtttacaaactagagattgcagagggtaataccaatactaatgtaaacagaataactctttttttaatgtggcgtgtttctgggtatgaaatttaaggaaataggacagaaagttaaaaggtatatataaatgaagacattcataattgttgatacttgtgaaaaacagtttaaagcaaataaaaatatctaataaatagcgaggtaaataatgtatcaatctaatagaatattatacaccaattttaaattattgctgtcaagcccatgtggtgacatggaaagaaatattttaatatgagcttttaaaaaacctaccatttggccaggtgcggtggctcacacctgtaatcccagcactttgggaggccaaggcagacagatcacgtgagctcagaggttcaatatcagcctggccaacatggtgaaaccagtctctactaaaaatagaaaaattagttgggcatggtgctatatacctgcagtgccaggtagtcaggtgtctgagacacaagaatagaatcgcttaaacctaggaggcagaggttgcagtgagctgagatcgtgccactgcactccagcctgggcaacaaagggagactatctcaaaaaaaaaaaaaaaaaaaaaatgaaatttccagctgggtgtggtgattcacacctgtaatcccagcactttgggaagctgagatgggaggatcccttgaggccaggagtttgagaccagtgtgggcaacatagttgagacttgtctcttttattaaaaaaaaaaaacaaaattttagcagggcatggtggtacatacctgtagtcccagccactctgggctaagatgggaggatcacagaagcccaggagaggagggcgaggctgcagtgagctatagtcataccacctcactcccacctgagcaacagagtgaggccctgtccctttaattaaaaaaaaaaaaaaaagttaaaataaaaattcagatttccctgtctcattgaaagttttatttttattttttaaaaataaaagtattagtctttgtttaattgaagggagatatttattgagagaaaacttgagatgacatttacatggatgagaagagtgcctatggttttaccaaacaataaagtcgtgaaatggagtcacttttaaggagggccaggcagtttctggctgggtgtgtttgttctcatt

SEQ ID NO: 2290 - DNA, 6000 bp, Homo sapiens
gtttgatgactgcagctccctggagacttctgtttttccaatgaaatggccctagattgtacagttgtttcctgattgctgtggttactctcttctttccacatgctggtttgttcagattcctttaaaagcgtgctgctaagcaatgccccctaggctctcatggaggtctgaccaatatgtccactttcaacatacttgacactgttcctcttcctgcagcctaagctggcataagcttttttgacagcattaaatcctttccttttagtgattgccttggcacaggcagcatgctgctaccctgctggagtgaaagcaaaagatgcagcggagtctggcaggacctggacaccttcatagatttataagctggggcctagatggaggagaagacaaagacagagatgtgaagctgcaaaggtggcttgggcaggatggttgggaagggaagggttggaacttagagacagtatctttgacattgactctctgacatttcaataaaagaatgggaaatctgagcctttccccatggtctttgactccgaagccttttaagctcttcaaaaggcaagttaacttggagctggaaagtgaacagctttacctgctagtattttgttgaagtaacttcttctattcgtctatctaactatcgatagacagacagataggacagatatagatagatagatagatagatagatagatagatagatagatagatgatagatagatagatagatatagtgtgtgtgtatatatatatatatttaatgaggaagttggaaaattagatccaatattgtgtcctattcaatggcagctgctcactgcacaaagtaaggaaaactttgaggaaataaaagttgcttagaaaaatccagatgtcagggctgggtgcagtggctcacacctgtaatcccagcactttgggaggctgaggcgggtggatcacgaggtcaggagatcgagaccatcctggccaacatggtgaaaccccgtcactactaaaatacaaaaaattagctgggcgtggtggcacatgcctgtagtcccaacaacccaggaggctgaggcaggagaatagcttgaacccgggaggcagaggttgcagtgagccgagatcgtaccactgcactccagcctggcaacagagcaagactcggtctaaaaaaaaaaaaaaagaaaagaaaaatccagatgtcattgctttgtatgttgtgatgatgtggtagccagctccaagaagatggcctccagtgagtcttactttctggtattcatatccttgaggctgatctaagtaactgatcggatattatggagtatgctatggtctgaatgtttgtgtccttcttaaattaatacgttgaaatcttcaccttcaaagtgatcatattaagagatgaggcttttgggaggtgattaggtcttgaaagtggagctcttctaaatgggattagagcctttataaaagatgccagatagagcttgttagtcccttgcaccatgggaagatgtagcaagaaggctccattcatgaggaatggggctattaccagacactgaatctcttggtgtttttttttttttttttttttttttttttttttttttttttaagacagagtcttgctctgtcgcccaggctggagtgcagtggcgcgatctcggctcactgcaacctccgcctcccggattcaagcaattctctgtctcagcctcctgaatagttgattacaggtgcctgctaccatgcctggctaatttttatatttttagtagagacggggtttcacaatcttggccaggctggtcttgaactcctgacctcgtgatccacctgccttggcctcccaaagtgctggatattacaggcatgagccaccgcgcctggccatttttttttttttaatttttattctcatgactgttagatcacatctgatggtgttttgatcttggactacttagtctctagagctgtaatacattcctgttgtttataaatcacccagtctaaggtattttgttatagcagcccaaacagactatgacagagtgtcacttttgagactaagtgatgaaaggcattgtggcttcttctgtctcgccatcttgaatcacttgctctgttggacgtcagccgctacgtcatgaagacactcaagcagccctatagaaaggtcttcatggtgagaaattgaagcctccgcccaatagccagcatcaacttactagctatgtgaatgatccatgctgaaagagcctcccgtagtccccctgaagccttcagatgactgcagccctggcaggcttcttgactgcaacatcataatgccctgagccaaaaccacccaactatgccgctcctgaattcctgacacacagaaactgagataatatttatcgctgtttaacttactaagctaataagttttaaacccttaagctttgaggaactttttttttatccagcaataagtaactaataaagatgggtagaaaggaggaatgaagagtaaagagcctttattcattgttcatatatgttcatttgctaggcacttgctgccggcaccttaggctaagggtagaacaagtgctgggttcactgctgcttttgtacaccgctgacaaccaaatagggctgtcacacagaatgacaagaaaaaaggacacgtcctctttcctccccttcctcctttttgcttttaggggaaggctaggatgacattgagaactcacacaaattttgtttttgactcctcagtgtcccctgggaaaaggtgcattggcctttgtgtacttgctacaaggctgtgtatccttgagagcaggactcggatcttatttatttctatccccgtttcctagcaagtgaacatatatgaacaataaatgttatcaagggagagggcaaatttccctccctgtttcttctgaattctgaagagattccattgttagaatggtttcttactgcaaccatcccattcacagtccatcagcgaagtcttgagagtatgatgcctgtcatgagccactttcactactaaataaattccgtccctctgttaagttcccggctgttaggacacctctgccttcagcaccgtttgacccttctatcccattttctctatgcaatgttgctttaactgttgttcaagatcccaggatgcttgatccgggaaagcacagaggtctgctgccaacataccaacatacctctctgtcaagttgtccaaaatcacaagagaaagagccctggactagagctaggagacctgagttctcggctgctctgttactgattagcgtctatgtccttggacaagttgcttccctttttccggacctcggttccttgtcctagataggttctaaagtcggtgggtccttacagtaagttaggattctaaggtgcaatccaaaagtaaaaccagtggtcagtatacctctgagtagctgttaaggttacaatacgaggttcctcggccttccctttggtagccaatggatacggcctcagtcagaggccgtcaggtttactgggaagagccttccggttttgaaagacaggatctccgggtttccagttctgtcactcactcggggtaactttgggcaaattctctctggacctcctaatagggaggtcctcgtcaccccgaggaagttcgaagacgtgggcagtgacttggaaagcttcccgagattccccttctataacctgggtggctcagaccgggagcggggtcccagccggccggtaattccgcccggaggtgcgcacgaaacaaacctgcagcgctggccgagggcggctcagcttcggagggcgcgactccgggtgagttcttaaagggaccgtcagagtttgggtaacacctgcgatgctgaccgggcggggacgcaggcttgagggaaatgaatgaatgaatgaatgagcgaatgaatgaacaaaccttctctgcccacccttaagtataccatactcggaattaatcagttaggcttaaaaatcttgtactataaccctcaaactcttgccaagttaaccagtgtctctatttcatatgtccttctgtaatgaaacccctccccccaagcctattactaagggacgaagagtaacttaacaatcagcctggagtggaaggcaatgcagagttggcacccctccccgaactcctccctctccctctcccaggccccgccctccccgccccctgggaggtgcagttggctcctccttaaggcggcttttccccggtggggatctacccccggggtcgccaggcgctgtctctgccgcggagttggaaacggcactgctgagtgaggttgaggggtgtctcggtatgtgcgccttggatctggtgtaggcgaggtcacgcctctcttcagacagcccgagccttcccggcctggcgcgtttagttcggaactgcgggacgcgccggtgggctagggcaaggtaaaggcgggctcctccagggccaccccgggccacctgtggagtccgagtgttaactcctttgttctcagagccacttcagcggccgcccttttaagcgaagaggttcccttaggatgctccccgggtaccccttccgttcccctgccctcccccgacccgcctcccccttccaacccgaaggtagcagcgcggggagcccggggctcggcgcgagccgcctcctcacttcccattggctgagagcgccgggaaagcggtcacgtgggagcgcggcaggccagctcgggggccgccatcttggcggaaagtttcgggggagagcggttgggggcgcggaaggaggcgaggttccgggggtggggcgtgcggcagcaactgggcgagcgggccggggggccgcggcgagcgaggaggcggcgcggccgagaaggaggacgaggccgcgggggtgcggcggcccaggggagctcctcccccgtcccttcgccccctccgctcggctccgcgggccccgggcggggcgggggtacgtggagcggggccgggctggggagctgctccgagtctggccggggcgcaccccagttccgagcgcacgccgctcaccggaactttgtggcggcgccgcaggtgtgggggcccgcggaggtgtgcatgcggggcgcgagggcgtcgcggagagcggccgctgccctgtccggcccccgctggagcagcccggaggcagcgagcaaggagaaaggcaagcgagaggagggggcccgagcagggcgggcggccagtcccgctggtcccctctcagcgctctgcggccgctgctggctcaggggccaagggtcggagcgcttcacccgcccgtacccagtagcaggtggggagtgtggatacttgtgcgggggaagaggcggcctcaggtctaggctctttggggaggggacgctttcgaggagagtttggaagccgacttctgtctgttcttaatttggaggggtacccactccaaggaaaagctttccacgttgacagacaactgctgcgttttgagactctttctttgacttggtaaaactttggaacgtggggttttcaaataggctgcgagggttttctatttcgataggggaaaatgctagtttaacatgattctatcctttttcctttccgttgtgtgttttaaaggtgtgtgccctcttcctgattctggagaaaaatgccggtccggaagcaaggtgagagtttattccgtaactctgttgtcgatgtcacttgcttttccgtgtgtcagttttttgattgccgttttagaatcgtttgtgtaactttgatgagacagcacggtcctagctttattgcttagggaatctaagcctcatatcatttcagaagatggaaacacgaaaatgtttgttaaactttcttaacatttctctagtgattaagagaggcagttagcccccccccaacagatgtccttaataaccctgaattggtgttttagtatttcactc

SEQ ID NO: 2291 - DNA, 6000 bp, Homo sapiens
atacaactttaaatatttagctctaaagaaacaatacatcagctgaaattcaaaattagtaaaaacttttctgctttcaataatttttaaatctttaagccatccttcaaagatactaccaagtatctatcagcactagaccaatgatttctatattacattgcgagtatcaattataaaatgcactatttcatgtgtcagaacacagaaacactgtcaattaaaaatgacatataccagatattgaaatatttaacagttggtattttagaacaaatataatacagtacgtacatgcttgtccctctgaataatccaaaagtacaggaacctaatctatgtatcaactacagggggggacaccaaacccctagagactcaaacttttttaaatgcatgaaaagtcaatataaactaccagttcaaagaatcaatcaataaatgatcaatgcagactgaaaatccaaagacacttggcaccccaaacagataactagataactcactgcggcctaaacaagtgatttccaaattaaggaagtgaaaaatctaagcactcaatgactccaaacagctcaggtggccaagacccctgttctcctttaatccagtggtccacaggtaccaactcagaagacagagtgccacttactgagagaaaaaacctttcagtaagtggcactctgtcttctgagtcggatttttctgcaaacactatggacacaatgaactggtttagcttagggcagtttacaagcttaaagtacatttatgacactgtttcaaaacaatggtagagttgcaaaatacaaagaaaatcttatcagactaaacattttcagactaagtattaaaagttattcaggaaacacaagagaatgtatttattccgtagtatcaacaattatagcatggaaacacacagaacctctattaaacgttatctatttcaaaactcctaaaatctattacttgtcttacaccaaaatgtgatatagtaccacatcctatagaacattaaatataagtaaatttaaatgtcaaagtaaattcacaaccaatgaaattagaagattcacaaatataaacttagtaattaggaagctaactctaggccagacgcggtggctcacgcctgtaatcccaacattttgggaggccgaggtgggtggatcacgaggtcaggagatcgagaccatcctggcttacacagtgaaaccccgtctttactaaaaatacaatacaaaaaataaaaaattagccggacgtggtggtgggcacctttggtcccagctactcaggaggctgaggcaggagaatggcgtgaacctggcaggcggagcttgcagtgagcggagatctcgccactgcactccagcctgggtgacagagtgagactctgcctcaaaaaaaaaaaaaaaaaaaaagagaagaaagctaactctatcaaagttcaattgtacgtaagaatagacacattcaaaacaggcaaggcagaataggtcaaaaatgtctctgaacacagcaaacccatccccaatctagacagaaatataaatgtagattctgttatttcactaacgatttaattttcttaagttacagccatcacacaaagaaaagtctgcagtctatctatctgcctatctatacatatatgtatatatatatctctatactgttgcgaaaaaacatactttttttgcaacagtaactgcaccaaattactaggctcaatgttgatttagaaaacaaataactaaaaaatgctttttgctgtttttccagaggaatccaatttgatcatccattcggaccttaaacctcagaaattcaaatgtgtaaaaaatgtccatcaatgtaaacaaaaatggcaaaatgtgaatttctggagctgggtaacagttaaaaggcagttcattacactgtgctatgtatccttatgtttttaaaagtctattaaaatgttacatttttcaaaattgttcaggtgcatcaagtggtctttacaaaaatctttcattctaaaaccgtagagagcatccatttatcaataatgtacctgacaggacacactgacttgaaagtagtcttcaaatcacaccaacaattattctatcaacagatagatgtaaggccatatctgactggaagttactgaagaaataaatgtaatataattaagtatatgtcttcttatgttaaaatgttatatagttgataactaaaacaaaaaaaaaaaacttcattcttagaattggaagagacaaactttctagttcggtggtttgcaaactttttgaggtacctggacaaaagagccagacaagtcaccttgttttatacataggagattatacacaaaatatgagatgatgcttttaaaaatgatttatctacttaaaaaaggctttaaacccattctgtcatttcaacagctacattctacagctaatatggtggcatagaaaagattaaatgacttgggatatatcattcaattagtggcaaaagaactcaggactcttatttttccagttctttcaaacaatgcaccacttcaaattaagttacaattaagaataaaactttccattttcttgcctgtaaaatacggttactagacaagatcatctctaagattattttccaggtctaaaattctgactccatgaatgccaagctcaaacagaaatctacattaagggaatgaatgttcttcaacacagcagaacccttcacacgctttcaatgacttcagagacatgccagtcaaatacagaaacaagctcacagtaactcagtcataccttttaggtccttaaacatctgtgcaacatcttttaatagttaatgctattaagatgtgaaacaatgttctcaaaagccactgaaataatcctgaaagttttttggttactagttattttaagaaaggacactggcctatgaaaaacacacaactcactgaagatgttcaagttaccgaatgcctcagagaattaagtacatcattttcttaagtttaaaataaatgaattgagaggagcataaagcctagctggcataatagttacgaagttttaattcccacctattaaagcctgaaagaggttgctctgaaatatgttaataacccgttctatggaacttctgagctgtctgtcttcagtttggcttagttttgaacgatattcctccaaaaggtgcaatgctctctgggtatctgagaagaaaaagcagagcctgattaaaactctctatttacaaaaaaagtatcacatactagtgcaaataattctgcatgacatctaaatagttccgcaaatccttcaggtcaattgatgtcactatgttcatgtacacatattccttagaatgaccaaaaaataaaaaaaaaaattaaagaaatacaagaaaaatttaaacatatatcacattagaaaacggaggagagtgagcagtttggaataaatgtgtactggtagtttgccaaagtaaaagatcaaagtattagcaacagtttcagattacctgataatgcaaaagcagattatctacaatttgtcatcataatccaaatttttaacatttcaaaatacaaattcttagtatcccacagttgcttacagaatagtgcttagtaagaatgatagagtgaaatactaaaacaccaattcagggttattaaggacatctgttgggggggggctaactgcctctcttaatcactagagaaatgttaagaaagtttaacaaacattttcgtgtttccatcttctgaaatgatatgaggcttagattccctaagcaataaagctaggaccgtgctgtctcatcaaagttacacaaacgattctaaaacggcaatcaaaaaactgacacacggaaaagcaagtgacatcgacaacagagttacggaataaactctcaccttgcttccggaccggcatttttctccagaatcaggaagagggcacacacctttaaaacacacaacggaaaggaaaaaggatagaatcatgttaaactagcattttcccctatcgaaatagaaaaccctcgcagcctatttgaaaaccccacgttccaaagttttaccaagtcaaagaaagagtctcaaaacgcagcagttgtctgtcaacgtggaaagcttttccttggagtgggtacccctccaaattaagaacagacagaagtcggcttccaaactctcctcgaaagcgtcccctccccaaagagcctagacctgaggccgcctcttcccccgcacaagtatccacactccccacctgctactgggtacgggcgggtgaagcgctccgacccttggcccctgagccagcagcggccgcagagcgctgagaggggaccagcgggactggccgcccgccctgctcgggccccctcctctcgcttgcctttctccttgctcgctgcctccgggctgctccagcgggggccggacagggcagcggccgctctccgcgacgccctcgcgccccgcatgcacacctccgcgggcccccacacctgcggcgccgccacaaagttccggtgagcggcgtgcgctcggaactggggtgcgccccggccagactcggagcagctccccagcccggccccgctccacgtacccccgccccgcccggggcccgcggagccgagcggagggggcgaagggacgggggaggagctcccctgggccgccgcacccccgcggcctcgtcctccttctcggccgcgccgcctcctcgctcgccgcggccccccggcccgctcgcccagttgctgccgcacgccccacccccggaacctcgcctccttccgcgcccccaaccgctctcccccgaaactttccgccaagatggcggcccccgagctggcctgccgcgctcccacgtgaccgctttcccggcgctctcagccaatgggaagtgaggaggcggctcgcgccgagccccgggctccccgcgctgctaccttcgggttggaagggggaggcgggtcgggggagggcaggggaacggaaggggtacccggggagcatcctaagggaacctcttcgcttaaaagggcggccgctgaagtggctctgagaacaaaggagttaacactcggactccacaggtggcccggggtggccctggaggagcccgcctttaccttgccctagcccaccggcgcgtcccgcagttccgaactaaacgcgccaggccgggaaggctcgggctgtctgaagagaggcgtgacctcgcctacaccagatccaaggcgcacataccgagacacccctcaacctcactcagcagtgccgtttccaactccgcggcagagacagcgcctggcgaccccgggggtagatccccaccggggaaaagccgccttaaggaggagccaactgcacctcccagggggcggggagggcggggcctgggagagggagagggaggagttcggggaggggtgccaactctgcattgccttccactccaggctgattgttaagttactcttcgtcccttagtaataggcttggggggaggggtttcattacagaaggacatatgaaatagagacactggttaacttggcaagagtttgagggttatagtacaagatttttaagcctaactgattaattccgagtatggtatacttaagggtgggcagagaaggtttgttcattcattcgctcattcattcattcattcatttccctcaagcctgcgtccccgcccggtcagcatcgcaggtgttacccaaactctgacggtccctttaagaactcacccggagtcgcgccctccgaagctgagccgccctcggccagcgctgcaggtttgtttcgtgcgcacctccgggcggaattaccggccggctgggaccccgctcccggtctgagccacccaggttatagaaggggaatctcgggaagctttccaagtcactgcccacgtcttcgaacttcctcggggtgacgaggacctccctattagg

SEQ ID NO: 2292 - DNA, 6000 bp, Homo sapiens
caacgagtttatcttatcggttgctgtggacctgcagtgagttaaatctgcctttgaacactgtatgagaggctataccactctccggatagaccagtttacacgggaggcagttattagtcctatgctgatttagtactccattataccacactccaggaatcttagggtggctcttccattaaaaagcattaattcagtgcctaactacctatcatggagatggtcaactgtccacattttaaagggaattggtttcaacctgtagcttttattctgttaagaattatctatgagaaagagatcagtcttggtaccaccaaaactgggtagaacgaattcttgatgtagactaaagggtgctaataccatttcagtattcagcagggactgaggtttcaacagcttagaactgtggtctcagaggtcacgtggttcaaccttatgtcctgggtatctaccaccctctgacacagaatccttgctggcttcattcagcaccttcctgattaaaaaaaaaaaaaaatttccactaccttgaggcagctctttggaattttggacagtttctgacaactcatgttaaggaaaaacttcctgtgtttgtccattggttgaattttcatccattgactgtacttgcccactgggtacacagaataagcctgtttgatgactgcagctccctggagacttctgtttttccaatgaaatggccctagattgtacagttgtttcctgattgctgtggttactctcttctttccacatgctggtttgttcagattcctttaaaagcgtgctgctaagcaatgccccctaggctctcatggaggtctgaccaatatgtccactttcaacatacttgacactgttcctcttcctgcagcctaagctggcataagcttttttgacagcattaaatcctttccttttagtgattgccttggcacaggcagcatgctgctaccctgctggagtgaaagcaaaagatgcagcggagtctggcaggacctggacaccttcatagatttataagctggggcctagatggaggagaagacaaagacagagatgtgaagctgcaaaggtggcttgggcaggatggttgggaagggaagggttggaacttagagacagtatctttgacattgactctctgacatttcaataaaagaatgggaaatctgagcctttccccatggtctttgactccgaagccttttaagctcttcaaaaggcaagttaacttggagctggaaagtgaacagctttacctgctagtattttgttgaagtaacttcttctattcgtctatctaactatcgatagacagacagataggacagatatagatagatagatagatagatagatagatagatagatagatagatgatagatagatagatagatatagtgtgtgtgtatatatatatatatttaatgaggaagttggaaaattagatccaatattgtgtcctattcaatggcagctgctcactgcacaaagtaaggaaaactttgaggaaataaaagttgcttagaaaaatccagatgtcagggctgggtgcagtggctcacacctgtaatcccagcactttgggaggctgaggcgggtggatcacgaggtcaggagatcgagaccatcctggccaacatggtgaaaccccgtcactactaaaatacaaaaaattagctgggcgtggtggcacatgcctgtagtcccaacaacccaggaggctgaggcaggagaatagcttgaacccgggaggcagaggttgcagtgagccgagatcgtaccactgcactccagcctggcaacagagcaagactcggtctaaaaaaaaaaaaaaagaaaagaaaaatccagatgtcattgctttgtatgttgtgatgatgtggtagccagctccaagaagatggcctccagtgagtcttactttctggtattcatatccttgaggctgatctaagtaactgatcggatattatggagtatgctatggtctgaatgtttgtgtccttcttaaattaatacgttgaaatcttcaccttcaaagtgatcatattaagagatgaggcttttgggaggtgattaggtcttgaaagtggagctcttctaaatgggattagagcctttataaaagatgccagatagagcttgttagtcccttgcaccatgggaagatgtagcaagaaggctccattcatgaggaatggggctattaccagacactgaatctcttggtgtttttttttttttttttttttttttttttttttttttttttaagacagagtcttgctctgtcgcccaggctggagtgcagtggcgcgatctcggctcactgcaacctccgcctcccggattcaagcaattctctgtctcagcctcctgaatagttgattacaggtgcctgctaccatgcctggctaatttttatatttttagtagagacggggtttcacaatcttggccaggctggtcttgaactcctgacctcgtgatccacctgccttggcctcccaaagtgctggatattacaggcatgagccaccgcgcctggccatttttttttttttaatttttattctcatgactgttagatcacatctgatggtgttttgatcttggactacttagtctctagagctgtaatacattcctgttgtttataaatcacccagtctaaggtattttgttatagcagcccaaacagactatgacagagtgtcacttttgagactaagtgatgaaaggcattgtggcttcttctgtctcgccatcttgaatcacttgctctgttggacgtcagccgctacgtcatgaagacactcaagcagccctatagaaaggtcttcatggtgagaaattgaagcctccgcccaatagccagcatcaacttactagctatgtgaatgatccatgctgaaagagcctcccgtagtccccctgaagccttcagatgactgcagccctggcaggcttcttgactgcaacatcataatgccctgagccaaaaccacccaactatgccgctcctgaattcctgacacacagaaactgagataatatttatcgctgtttaacttactaagctaataagttttaaacccttaagctttgaggaactttttttttatccagcaataagtaactaataaagatgggtagaaaggaggaatgaagagtaaagagcctttattcattgttcatatatgttcatttgctaggcacttgctgccggcaccttaggctaagggtagaacaagtgctgggttcactgctgcttttgtacaccgctgacaaccaaatagggctgtcacacagaatgacaagaaaaaaggacacgtcctctttcctccccttcctcctttttgcttttaggggaaggctaggatgacattgagaactcacacaaattttgtttttgactcctcagtgtcccctgggaaaaggtgcattggcctttgtgtacttgctacaaggctgtgtatccttgagagcaggactcggatcttatttatttctatccccgtttcctagcaagtgaacatatatgaacaataaatgttatcaagggagagggcaaatttccctccctgtttcttctgaattctgaagagattccattgttagaatggtttcttactgcaaccatcccattcacagtccatcagcgaagtcttgagagtatgatgcctgtcatgagccactttcactactaaataaattccgtccctctgttaagttcccggctgttaggacacctctgccttcagcaccgtttgacccttctatcccattttctctatgcaatgttgctttaactgttgttcaagatcccaggatgcttgatccgggaaagcacagaggtctgctgccaacataccaacatacctctctgtcaagttgtccaaaatcacaagagaaagagccctggactagagctaggagacctgagttctcggctgctctgttactgattagcgtctatgtccttggacaagttgcttccctttttccggacctcggttccttgtcctagataggttctaaagtcggtgggtccttacagtaagttaggattctaaggtgcaatccaaaagtaaaaccagtggtcagtatacctctgagtagctgttaaggttacaatacgaggttcctcggccttccctttggtagccaatggatacggcctcagtcagaggccgtcaggtttactgggaagagccttccggttttgaaagacaggatctccgggtttccagttctgtcactcactcggggtaactttgggcaaattctctctggacctcctaatagggaggtcctcgtcaccccgaggaagttcgaagacgtgggcagtgacttggaaagcttcccgagattccccttctataacctgggtggctcagaccgggagcggggtcccagccggccggtaattccgcccggaggtgcgcacgaaacaaacctgcagcgctggccgagggcggctcagcttcggagggcgcgactccgggtgagttcttaaagggaccgtcagagtttgggtaacacctgcgatgctgaccgggcggggacgcaggcttgagggaaatgaatgaatgaatgaatgagcgaatgaatgaacaaaccttctctgcccacccttaagtataccatactcggaattaatcagttaggcttaaaaatcttgtactataaccctcaaactcttgccaagttaaccagtgtctctatttcatatgtccttctgtaatgaaacccctccccccaagcctattactaagggacgaagagtaacttaacaatcagcctggagtggaaggcaatgcagagttggcacccctccccgaactcctccctctccctctcccaggccccgccctccccgccccctgggaggtgcagttggctcctccttaaggcggcttttccccggtggggatctacccccggggtcgccaggcgctgtctctgccgcggagttggaaacggcactgctgagtgaggttgaggggtgtctcggtatgtgcgccttggatctggtgtaggcgaggtcacgcctctcttcagacagcccgagccttcccggcctggcgcgtttagttcggaactgcgggacgcgccggtgggctagggcaaggtaaaggcgggctcctccagggccaccccgggccacctgtggagtccgagtgttaactcctttgttctcagagccacttcagcggccgcccttttaagcgaagaggttcccttaggatgctccccgggtaccccttccgttcccctgccctcccccgacccgcctcccccttccaacccgaaggtagcagcgcggggagcccggggctcggcgcgagccgcctcctcacttcccattggctgagagcgccgggaaagcggtcacgtgggagcgcggcaggccagctcgggggccgccatcttggcggaaagtttcgggggagagcggttgggggcgcggaaggaggcgaggttccgggggtggggcgtgcggcagcaactgggcgagcgggccggggggccgcggcgagcgaggaggcggcgcggccgagaaggaggacgaggccgcgggggtgcggcggcccaggggagctcctcccccgtcccttcgccccctccgctcggctccgcgggccccgggcggggcgggggtacgtggagcggggccgggctggggagctgctccgagtctggccggggcgcaccccagttccgagcgcacgccgctcaccggaactttgtggcggcgccgcaggtgtgggggcccgcggaggtgtgcatgcggggcgcgagggcgtcgcggagagcggccgctgccctgtccggcccccgctggagcagcccggaggcagcgagcaaggagaaaggcaagcgagaggagggggcccgagcagggcgggcggccagtcccgctggtcccctctcagcgctctgcggccgctgctggctcaggggccaagggtcgg

SEQ ID NO: 2293 - DNA, 6000 bp, Homo sapiens
cgtttctcctgtccttccctgagtgcctcaaattcctgtgagcaggtgtcggcgttggatctctagggctggcttcgagtcctcactctctcccgggctggctttgagtcctcactctgctcttgcgagctcacatctgaagtgccttctgttctgtcatgaagtcccaagagttttttcgtctttgaatgttctttttatgtttcaggtggttttggggatttactatgtcttgaggacatccatgagcgtttctgtcggtgtggttttgtattttatttccctttgtggcctctgtcttgtgttgtctgagagcacggtggggttgcgagggccgtgccctcgggaggagacctgcgtgtgccttgactgccctgggcagccggcactggggcagaaggagtggactcccagggatccccgccgtttgtgtcccagacacagccccagccctccgcctgctggctcggtgggcggcctgaaaccatcctgccttctaggaagacagcaattctggaagagcaaagccgatacaactgaaggaaaaaatagacaaacccaaatcatagctggcgacgtcagcactgctgtcccgacacatgacggagcagctgtactgaaggctgcaaggatgtagaagggcagaggcgccagccagcagggcccaccagctgcaggcacggacctttccatgcaccgtgggagcctcctccacacaggccctgtcctcagagaactaggattctgcagcatgccgtctgaccacaatgaaatagaacggaagaatcttcacacttgggaacaaaacagcacactttcaaacgacacctgggccagagaggaggtctcaagggagacgatgcgtggagctgagtgaagatgcaagtgcagcctaggaaagcccagggccccatcaggcagtgtggagacacccgcagccgtgggggcttgctgtggaaaagctggaatgccccagcagtaacctgagctctctgcacaagacatttggggggaaaaaaagggagcgaaataagcctacagcaagcggaaggaaagaaagaatgaggagccacgggcagtgcagtggaacacagggacagaggccagttctgaagcccacagacctctcccggggctgctgggaagagtgacccaggtcatcgatatgggggatggtgcaggaggcaccactgcagaccccgcaggctctacgagggtcacgggtgcaggcgcctctgtgcagtatgcttgacgacttacgtgaaattgataaattcctcaaaaccagttcctgccacaacttacccaatatcaagtagatcctttgaaaaattctataaatacaaagaaaataaattcataattaaaaacttcccaaaaaggaaacctgcggacccacctgggccactggagaatttcaccgaatgttgaaagagaatgccaattccaccctctcacaggaagcaggagagacggagcactttctaattgattttacgaagctcatactatcaccctgataccaaaatcagacagaaacagcaccggaaagggaaactgggactatattccccatgaatatacacacagatcctcaaccaaacttcagcaaataggatttatcggtatataaagagaattctacaccaagatcaagtaagatttattccaggaatccaaggctgacatttcagaattgttaacaaaatctatttaggttgctgcgaaagtaattgtggttttgccattgaaagtaatcacaaaaaccgtaattacttttgcactaatctgatatcatattaactggctgaagagtcatgtggtcacatcaacaaggcagaaaaggcatttaacaaaattcagaaagtcagcaccttttatggcagcactgtcagccagtcatgagcagaacgtcgtcagcttggtaacaagcatgtctagagacccacagccaggccaggcggagtggctcacaccgtaaccccagtgctctgggaggccaacgtgggaggatttcctgaacccaggagtttgaaaccagcttgagcaatatagtgagacccctgtaagaattagccagctgtggtggtgagcagctgtggtgagcagctgtggtggtgagcaaatgtgggcagctgtggtgagcaggtgtgagcagctgtggtgagctatggtgagcaggtgtgagcagctgtggtgagcaggtgtgagcacctgtggtgagcagctgtgagcacctgtggtggtgagcagctgtggtgagcagctgtggtggtgagcaggtgtgagcagctgtggtggtgagcaggtgtgagcagctgtggtggtgagtaggtgtgagcagctgtggtggtgagcagctgtggtgagcagctgtagtgagcagctgtggtgagcaggtgtgagcagctgtggtgagcagctgtggtggtgagcaggtgtgagcagctgtggtgagcagctgtggtgagcaggtgtgagcaggtgtgagcagctgtggtgagcaggtgtgagcagctgtggtgagcaggggtgagcagctgtggtgaggtgtgagcagttgtgagcagctgtggtgagcaggtgtgagcagctgtggtggtgagcagctgtggtgagcaggtgtgagcagctgtggtgagcaggtgtgagcagctgtggtggtgagcaggtgtggtgagcagctgtggtgagcaggtgtggtcccagctactcagcaagctgaggtgggaagatcacttggatcgcttgagcccaggaggtcaaggctggcctgagctattattgcatcactgcactccagtctgggcagcagagcaagaccctgtctccagaaacctgcagccaacatcttttttttgtttgtttgttttgagacaagagtcttgctctgttgccctggctggagtgcagtggcataatcttggctcactgcaacctccacctcccagtttcaagcaattctcccgcctcagcctcctgagtagctgggattacaggcatgcaccaccatgcccagctaatttttgtatttttagtagagacatggtttcaccatgttggccaggctggtctcaaactcctgatctcaagtgacctcccaaagtgctgggattacaggtatgagccaccctgcctggccaagccaatatcatttttaaccatcctcctaaaatcaggaacagggcaggagtgtcttttctccacttgtacttgtcggaagtcccagctgctgccatttggcaagaaaaggagatcaaagttacacgcactacaaagggagaaataaaattactcctgtctgcagatgacacgattgtctgcgcagggactctgaagcaatctacaaagatcttttagaactatgagttcagtaaggtcgcaggataccaggtcaacacacaaaaatctgtcctatttctgtttacttgcaattatataaggaagccaacatttaaaacagtaccatttacaatcaccttttttttttttagaaaaaataaacatttaggtataaatctgaccagacatgtctagggcttgtgtggtgggactacaaaaccaaccgtggcgaaagagaccagaggagatgcgagtgaagggacggacgctgcactcacggcctggaggctcccgagtaaggtggccgttctcctgtgtgcatctgtagcctaacgcagttcctaccaacgcctcagcagggattttcctagatacaaatgagcttactgtacagtgtatttgaaagacagatggactagatgcctggaatagtttatttttttgagatggagcctcgctctgtcgcccaggctggagtgcagtggcctgatctcggctcactgcaagttcccttaccgggttcacgccattctcctgcctcagcctcctgagtagctgggactacaggcacccgccaccacgcccagctaattttttgtatttttagtagagatggggtttcaccgtgttagtcaggatggtcttgatctcctgacctcgtgatccgcccgcctcggcctcccaaagtgctgggattacaggcgtgagccaccgcacccagccatgcctggaatatttttgtaatggaaaaatgaaatgggagaagtcactgttcctggctttgaggcttactctgaagccacaaatcaacattgcggcgatggcagacagacgcgtctgtggagagaagagaggactcaggccacacaagagagaccagcggagctttgacagaggcagaaaacccgttcatcagatggtctggagcacctgggcagcggtaggcaaagccctaagccctcgttctacagaacagctcatcagaatgcagggcctttaggtgaaaacctttgtggcctggggctgggcagagttcgtagactcgccacccaaaccacacccataagaggacaggtggacccaacttcagagctctgagcatctgagctgcggactgggagaagatatttccaaaccacctatttgacaaaggactcatctacagaatataaaaatacagtcaaaaacaaactgaaagcaatccagttagaaaatgggcgagagcgcagggtcctctgcctacgaaaaccagagacctttgttcacttgtttatctgctgaccttccctccactattgtcctgtgaccctgccaaatccccctctgcgagaaacacccaagaatgatcaattaaaaaaaaaaaaaaaagaaagaaaatgggcgagagacggccgggcatggtggctcatgcctgtaatcccagcactttgggaggctgaggcaggcggatcacctgaggtcgggagttcgcgaccagcctgaccaacatggagaaaccctgtctctactaaaaatacaaaaattagctggacgtggtggcacaggcctgtaatcccagctactcgggaggttgaggcaggagaatcgctggaacccgggaggcggaggttgcgtcagccgagatcttgccactgcactccagcctgggcgacagagcaagactctgtctcaaaaaaaaaaaaagaaaatgggcaagagacatgaagagacctccagcacattgacatccgatggccaggaagcacaggctgagacacccagcatcaccgaatgctggcgcggaggaggccggagcgcggaggaggcccgaacacggaggaggctggagcgtgtgtctcacgcattgcccggggggcgagccgcgtgcctcatgccttgccggggggacttgccgggggacgagccgcgtgcctcacgccttgccggggggacgagccgcgtgtctcgcgcattgccccgggggcgagctgtgtctcatgcattgccagggttgagccgtgtctctcaggcattcccagggagtgacaagtggcagggccgctctggagaacaggtggtcggtttcctacgaagctaaacacacagctactgagctaccgtgggacatttatcccagagaaacggaaactctcattcacacacaagtccgtaacaggcgttcagagacgtgtctgttgtagccaaacagtggcatcaacccaggtgtcctacaggtgaacggttcaataggtggtctgcacaccacgagatggcccttggcagggagggggagtggcggatgccccgagccctagtgaagagtgccagtccagaggctgcagctgttggtccccttctagaacataactaagatgacagtctgggcatggtggctcacacctaccatcccagccctgtgggaggtgaggccagcgggtctcttaagcctaggagtttgagaccagccatagtgagaccatctccaaaaaaaaaaaaagatgacagaactgtagtgaagcattcaggtcgtgattgctgtggtgctgagaggaatccgtggtgcggtcagtggcgcggccccgcactcacacacacgagtccagctggccacgtctggtgcatctgtaggtggcgcggctgcccgggctcagtgcttctctgaggttatgagagacgccc

SEQ ID NO: 2294 - DNA, 6000 bp, Homo sapiens
aggacctgtcggggacttaaatgctggaggcaggaggcagggactttggtaactgattgattattcaagaaagtcgggggaatgatgggaatttcaccagagatctggaacataaaaaggagacagatgtgaattctagaactgaaaaatattacagccgaaatgaaggcttcagtacatgattaacagtggaataggcacagcagaacagactctgaattggtagaaaagatcttctgacagcagcgcagagaagaaaggatggaagaagacacgtacagagagggtcacgagagagactgtggcactgcaggggcctggcatgcttttacttgaagttctaggagaagagagagagtggaacagaaataatacttgaaaaatcattggccaaaaattttcctaaactgatggaggacgtcagaaccacgaaatcaagctctgcagacgccaaagaggatactttttttttttttaacaaaaagaagaaaagaggttcagtacctcagagcatcctggttgaattgctggaacccgaagagaacaatctccagcccgaggacaggacggggtgggaatgcatgacctgcagagtgacacccgaaggcagctgaggcgcgccgtctctaaagtgctgagagaaaaatacgggaattctatatccagtgaaattatccttgaaatatgaaagccagttaaggatgtcttcagccaagcaaaggatgagagagttgattgttggcagaactgctccatttcagcaagtatccaaggcaagcctgcaaagcctgcagcctagggaaggaagggcagggaggctggaatgcatgactctgtggtgaaatgacaccagcaccagctgcttaaaacaccaatactaacgtcctgtgggttttaaaacctgtttggtagtaacatatctgacagcaggagcaccagcgcgtgcgcacacacagacagcaggagcaccaacacacgtgtgcatgtacacacacacaagcaccagcgcgcacacacacacacagccgaggaggggattaaccgagtgaatgtgtttcaggagctccatcaccaggaagcagagaatgtaccaatccctagggcagattaaagatgcaatcaagaagaaaaatggaacaaaaaatatgtgatgaattcgccagaacaacgtagagataaacaaacaaacccaggtgggatatagatagaaaacagccagctggtagaccgacgccctgctgtgcctgtcagtcatcccattgaaggtggatagaagacacactccagttaatcgggctggattaaaaaccaagctcacacaaaactcaagtctatactgcttacaggagccatacttcaaaacccttgcacacgaagacctagcaaggctgaagtggaataattggaaattgcttaccatgcagaccataacaggaagaaggctggtgtcactgtccatatcaggtgggatagaccaaggcaggaggtgacgggtgacgttgcaggggcgagggcagtgacatggcttcagtacaggcagcacaaagggcagaaggaggggtgaagttgacaggcccacgctgatggccgcctctctccccaggcagtggaacaggtagacaagaacaggatatagtttttttttttttacaaggtttaaccaacttgacctgagttttgcaaacttcagcgaatacttggagaaatggcatctgttcaagtgggcgtttattaaagtggactccacgttgggtcatacagcaagtctcaaggcatctcaacagtggattaaagtgggaatcagtgacaggaaaacacccagagaccgtatgctcgttaagtgacctgtgtgccaaaaaggaaatcactgttgaaatgagaaaatattttaaacacattgataatcaaaataccacttaccagatgtgtggggtgcatctgaagcagggtttagaggaaatgtgtaacttcaaatgcatacattaaaaggaagaaaggttggttgcgcacagtggcttacagctgtaattccaacactttgggaggcaggaggattgcttgaacctgcgagatcaaggctgcgctgtgggcgagaggcgtgttccctgcgtggtgagcctgcgccgtgcctgggcgagaggcgtgttccctgcgtggtgagcctgcgccgtgcctgggcgagaggcgtgttccctgcgtggtgagcctgcgccgtgcctgggcgagaggagcacagggttgcagccatggcacagatgtaacagctgagcctgtcaggagtccgctctgccctgttggagctagtctggcaggagcctgcgggcagtgtcctctgcagtccagggctctcgggagtggccagccctgctcacagacctcattgtgccctcagcgccaggctgggtgagccgagcctgcaggcccagtgcccagggccatctcaaggggcagctgggggagggaggctgggcatgagcggcactccctctggggctgcccaagttcggtctgtcccaggacccaagcccgtctggccgacctggctccctgcacactccctccctccgtgcccctcccactgtgcctctccgccctcggtcgtggccggtctgagcctccgctgcggtggccgtcggattctctgctggtgcctgcaggctcctctgcagacgttgcctcctccacatctccacgccagctgtgccaccgctgtgcagtccctgccacccctgacgacagacagcggcacgcaaagaggctcgggcgcagggggaagctcgtgttggccccggctggagtgcacatcagtcccggcttcggccgtggccacctccgcccagagccttgagtgggcattgagggggcgctgctctgcgtgaggttggccacccctcagggcgggcacagggtgctctcccctcgtgcagggagaggatgttttagagggtgagcaggaaggggtgaactagaggcctttcacacatcacaggcatgtgtggagctcagagaagtgacagttaaaaccagccgtggctctgacccacacaggccgccgggcccgtctccctgccctccctcggcggatcccactctgctctgggtgttcctggccctgcagacactggcagcctgggtttcccaggaactggccgccactcttttgtgtttcttctttattttcttaggtgtataacattcaacatgtagagattttaggtggcgtaaaataagacaggcatggggagcctgctgcccgctggagagcccaggcttatcagtgcagtttatgacagtgggatcagagatgatcataggaaatgtgtgaaatagcctggaattccttagagagctgtggggctgggaaatggtcagtgtcaggtcacacctgcctccccgtgcggccaacaccccaaggcgggccctgctgacccctgcccctgctccccacccacatggccgacaccccaaggtgggccctgctgacccctgccctgctccccacccgcacggccgacaccccaaggcaggccctgctgacctctgccctgctccccacagctcagcctgggctgcctccccagccccacagtgaacacagctttgtttcccccggaatcatgttcccaattccctggcagccggattctagaggtcttggttttatgggcatctgttgacagttgtggatttttgtcagggcggacgtcgtcatttttatggaaaacacatttagtatcccagagtgcgtgctctgagctgccgggtggctgcagtctgtgtgtgctgggtagtgagggccagcgcctgccttggaaccctggggtcccacctcagagctgcctgcctgggtgccggagtctccagctgtgggatgttgtcccgtctgctctgagcacgtggcctcccctggagttgcaggaaacatggcggccccgcccggtgcccctctgccttgaacacagtcgcgggcatccccactgtgacgtccgaggagcgagtgaaatgatgctcttctggggccgtgaccgggggtgctggtgccctgtgggttcctgggacagctgctgggtcagctcacagggctccagcttccgcaggcgggggtggccggctgccctggttgttctcgccccgctgcctgcagctgccacctgtttccatgcacgtttctttagtgaatgtccaaggacttacagactacttgggtggccttcctaagtggtgtctacttgtaaccgcaggtatgacctggacgcgtgtgacattcaagaaaaatacccggatttatttcaagtgaacctggaagtggaggtggagcccagggacaggccgagccgggaagccccaccatgggagaactcgagcatgagggggctgaaccccaaaatcctgttttccagccgggaggagcagcaagacattctgtctaagtttggtaagatcccgcaggtgaattaggtgaaccctgttctggtgagtgtctctgtggagagagacacctttggctgagctctggcagggctgggccccacgcctgctgctgcacccaggccctgagcagcttgggctgcaggaggttttggaaactccgtcgtggatgttggacaccaccaccagctacaccagagaaggactcgcaggctgcaatttctgaggcccatgggcagggacggaggcagagggaggaaaacccaggctcctggagcgaagcggggttttgtcccaggcgtgtgtctgggtcagatttttgtcatgtgtgctggacacacgtccactctcactgtgagcctcaggcctgctggcagcatgtggaacagaaccctcgctcctgtcgctcttcacttccgagcagtttcgaaacggcagcccaggaagtgctggcaggtgggcccagggccgtccactgctcatgccacgcttgttctcggctcttggtttgcagtgtttgctttttctttctgagcatcttcagcgtccctgaaagaggctgtatgtgtgacctgtgcgtgctgtgtatgtgtccgtgggtggtgtgtgccgtgtgtgtgtgtgcacgagtggtgtgtgcattcatgtgtactgtgtatctgtgtgctgtgtgcattcgtgtgtacagtgcatctgtgtgtgctgtgtgtgcgttcgtgtgtaccatgcatcggtatgtgctgtgtgtgcgttcgtgtgtaccgtccatttgtgtgtgtgcatgcatgtgtactgtgcatccgagtgtgtgcatgtgtgtgtaccgtgcatctgtgtgcgtgcattcatgtgtaccctgcatctatgtgtgctgtgtgcattcatgtgtactgtgcctgtgtgtgtgcatttgtgtgtaccatgcatctctgctgtgtgtgcattcgtgtgtactgtgcatctgtgtgtactgtgtgcattcatgtgtactgtgcatctgtgtgtgctgtgtgtgcattcatgtgtaccctgcatgtgtgtatgtgctgtgtgtgcattcgtgtgtactgtgcatctgtgtgtgtgcattcatgtgtaccctgcatgtgtgtatgtgctgtgtgtgcattcgtgtgtactgtgcatctgtgtgtgtgcattcatgtgtaccctgcatgtgtgtatgtgctgtgtgtgcattcgtgtgtactgtgcatctgtgtgtgtgcattcctgtgtaccatgcatctgtgtgtgctgtgtgtgcattcctgtgtactgtgcatttgtgctgtgtgtgcattcatgtgtaccgtgcatctgtgtgtgctttgcattcgtgtgtaccctgcatgtgtgtatgtgctgtgtgtgcattcgtgtgtactgtgcatctgtgtgctgtgtgtgcattcatgtgtactgtgcatctgtgtgtgtgctgtgtgtgcattcatgtgtaccctgcatctgtgtgtgtgctgtctgtgcatccgtgtgtaccatgcatctgtgtgtgcattcatgtgtactgtgcatctgtgtgtgctgtgtgtattcatgtgtaccctg

SEQ ID NO: 2295 - DNA, 6000 bp, Homo sapiens
gcccatcacaccccacagcaagcccatcctggtgagggccgtggtcatgacacccgtgccgctgttcagcaagcagaggagcggctgcaggcccttctgcgaggtctacgtgggggacgagcgtgtggccagcacctcccaggagtacgacaagatgcggtgagtgcagctgcagccccacgctgtgctccctcctcctcacccctccggaaaaccgttaaagaggaaccctggccttgccggggacaggcgcttgctgaggcggacgtgtttggaactgtggcgtctgtggcaggtcacttgggatcctggtcagcagcaggaggtcacagggatccgagtgtccaggagacttgagaatgggatcctggtcagcagcaggaggtcacagggatccgagtgcccaggagactttagaattcttgtgaggctcttcatgggggttattctttattggttattacacattttagctaagtggacaatttctcattctgttttttgttgtttttgtttggttggttttgggggtttttaaaatttttctcttgtcattctgtccttagggactttaagattgaagatggcaaagcggtgattcccctgggcgtcacggtgcaaggagacgtgctcatcgtcatctatcacgcccggtccactctgggcggccggctgcaggccaaggtgagagagcctgtggcttgcccggtgctccccactcacgcctaggctcatggggggctgggggccacagtgcgctcacttctcaccgagggtccagggtgctcgctgtttggtgagtgccgtgggctctcatgtggcgactgccccacagcgccccctgcttgccccgtgcacttgacgcggcaggatctcaacctgaaaagcctggcgtttccatcgagactgagtttgagggtccacttggggcagcccccacggcagtcccgtgaagcagcttgtgggcccatgcgttctcctcagggttacctgccacacacagaccctctcccgcttcccccacaacatgtggcacgggggcgccgtccatgcctccagcaccatgagccgctctcagatctcgcccattgggaaaaattggcctgtggccccaggatctggattcaccctccacgtggggtgtcgtgtttgctctctttgcagatggcatccatgaagatgttccagattcagttccacacggggtttgtgcctcggaacgccaccactgtgaaatttgccaagtacgttggtaccgcttgtgctcggtggggagggacaggtgccctgtgccgcagcacctgcatgtgggccggtcgtgggagccccagggggagtggcgggctgtgtgactgctgcttggtggctctgggcctgttcctgggccatcctggagctgcgcgtgtgtaggctgctggggtggacccggtggctgctgctctgcccccccgttggtgtgtgtgtctgttagaatttagccctcacacccgggcgtggcgtaagcaggtgagcgggtggcggctgcatcttagcaaacgttcctgagcctgctgtgtgcagagtgccctgccaggcggaggctggagatgatgcggggcagtcctgtctggaagctcacactctgttgttagctccctctgtaaacaagcgcagccacgggatggcccccacccctgccatgcccagcacctgttagctctctgtcctcttgacgttggtgcccaacagcgcataccctgccctctgcaggctcaggtgcagatgcggtgagcagcagagcaggctctcacacccgggcgtcctgattctaactggaggtctgtctttttttttgagacagagtctcgctctaacgcccaggccggagtgcaatggcgcaatctcggctcactgcaactccacccaccaggctcaagcgattctctcgcctcagcctcctgagtagctgggattacagatctgcaccaccacgcatggctaagttttgtatttttagtagagatgggtttcactatgttggccaggctggtcttgaattcctgacctcaagtgatccacctgcctcggcctcccatttaactggagatctttctactcaatcacaggcaggcttatctgccaagacacagtggaacaaacattgttccaggagtcagagggggcacccacgggggctcccaagacagaggctgtggctgcagggcctgctgtgttccaggctctgtgctcttggttcctacccagtaaacaaagggaagccttgggccagccccacggggatgctggcggactctgcaccttgggaggggtgctggcctggcctgggtgagctcaggaagagctggcgcctgctgctgtcagggacggcctgcaccgggagaccggggtgtcttcttgtgtttttctgtctctgtgattctttttttacatctcttgtctttgttgtgtcttacgcttttctttttttaactcacatattcgcaactttaataattttgtttcttttttcctcctttggaggaagaaaaacacccagtgctcttagagttttcagccacggtggaggcggtgcttaaaatagtgttttaaagaccaaggtactgatgatgaagaggaaaatgtcggtgaaggacctgtcggggacttaaatgctggaggcaggaggcagggactttggtaactgattgattattcaagaaagtcgggggaatgatgggaatttcaccagagatctggaacataaaaaggagacagatgtgaattctagaactgaaaaatattacagccgaaatgaaggcttcagtacatgattaacagtggaataggcacagcagaacagactctgaattggtagaaaagatcttctgacagcagcgcagagaagaaaggatggaagaagacacgtacagagagggtcacgagagagactgtggcactgcaggggcctggcatgcttttacttgaagttctaggagaagagagagagtggaacagaaataatacttgaaaaatcattggccaaaaattttcctaaactgatggaggacgtcagaaccacgaaatcaagctctgcagacgccaaagaggatactttttttttttttaacaaaaagaagaaaagaggttcagtacctcagagcatcctggttgaattgctggaacccgaagagaacaatctccagcccgaggacaggacggggtgggaatgcatgacctgcagagtgacacccgaaggcagctgaggcgcgccgtctctaaagtgctgagagaaaaatacgggaattctatatccagtgaaattatccttgaaatatgaaagccagttaaggatgtcttcagccaagcaaaggatgagagagttgattgttggcagaactgctccatttcagcaagtatccaaggcaagcctgcaaagcctgcagcctagggaaggaagggcagggaggctggaatgcatgactctgtggtgaaatgacaccagcaccagctgcttaaaacaccaatactaacgtcctgtgggttttaaaacctgtttggtagtaacatatctgacagcaggagcaccagcgcgtgcgcacacacagacagcaggagcaccaacacacgtgtgcatgtacacacacacaagcaccagcgcgcacacacacacacagccgaggaggggattaaccgagtgaatgtgtttcaggagctccatcaccaggaagcagagaatgtaccaatccctagggcagattaaagatgcaatcaagaagaaaaatggaacaaaaaatatgtgatgaattcgccagaacaacgtagagataaacaaacaaacccaggtgggatatagatagaaaacagccagctggtagaccgacgccctgctgtgcctgtcagtcatcccattgaaggtggatagaagacacactccagttaatcgggctggattaaaaaccaagctcacacaaaactcaagtctatactgcttacaggagccatacttcaaaacccttgcacacgaagacctagcaaggctgaagtggaataattggaaattgcttaccatgcagaccataacaggaagaaggctggtgtcactgtccatatcaggtgggatagaccaaggcaggaggtgacgggtgacgttgcaggggcgagggcagtgacatggcttcagtacaggcagcacaaagggcagaaggaggggtgaagttgacaggcccacgctgatggccgcctctctccccaggcagtggaacaggtagacaagaacaggatatagtttttttttttttacaaggtttaaccaacttgacctgagttttgcaaacttcagcgaatacttggagaaatggcatctgttcaagtgggcgtttattaaagtggactccacgttgggtcatacagcaagtctcaaggcatctcaacagtggattaaagtgggaatcagtgacaggaaaacacccagagaccgtatgctcgttaagtgacctgtgtgccaaaaaggaaatcactgttgaaatgagaaaatattttaaacacattgataatcaaaataccacttaccagatgtgtggggtgcatctgaagcagggtttagaggaaatgtgtaacttcaaatgcatacattaaaaggaagaaaggttggttgcgcacagtggcttacagctgtaattccaacactttgggaggcaggaggattgcttgaacctgcgagatcaaggctgcgctgtgggcgagaggcgtgttccctgcgtggtgagcctgcgccgtgcctgggcgagaggcgtgttccctgcgtggtgagcctgcgccgtgcctgggcgagaggcgtgttccctgcgtggtgagcctgcgccgtgcctgggcgagaggagcacagggttgcagccatggcacagatgtaacagctgagcctgtcaggagtccgctctgccctgttggagctagtctggcaggagcctgcgggcagtgtcctctgcagtccagggctctcgggagtggccagccctgctcacagacctcattgtgccctcagcgccaggctgggtgagccgagcctgcaggcccagtgcccagggccatctcaaggggcagctgggggagggaggctgggcatgagcggcactccctctggggctgcccaagttcggtctgtcccaggacccaagcccgtctggccgacctggctccctgcacactccctccctccgtgcccctcccactgtgcctctccgccctcggtcgtggccggtctgagcctccgctgcggtggccgtcggattctctgctggtgcctgcaggctcctctgcagacgttgcctcctccacatctccacgccagctgtgccaccgctgtgcagtccctgccacccctgacgacagacagcggcacgcaaagaggctcgggcgcagggggaagctcgtgttggccccggctggagtgcacatcagtcccggcttcggccgtggccacctccgcccagagccttgagtgggcattgagggggcgctgctctgcgtgaggttggccacccctcagggcgggcacagggtgctctcccctcgtgcagggagaggatgttttagagggtgagcaggaaggggtgaactagaggcctttcacacatcacaggcatgtgtggagctcagagaagtgacagttaaaaccagccgtggctctgacccacacaggccgccgggcccgtctccctgccctccctcggcggatcccactctgctctgggtgttcctggccctgcagacactggcagcctgggtttcccaggaactggccgccactcttttgtgtttcttctttattttcttaggtgtataacattcaacatgtagagattttaggtggcgtaaaataagacaggcatggggagcctgctgcccgctggagagcccaggcttatcagtgcagtttatgacagtgggatcagagatgatcataggaaatgtgtgaaatagcctggaattccttagagagctgtggggctgggaaatggtcag

SEQ ID NO: 2296 - DNA, 6000 bp, Homo sapiens
ttaaaaaatttacatttttaatttttataggtatatagtaggtgtatatattcatggggtacatgttctgatacaagcatgcaatgtgtaataatcatatcatgaagaatggggtatccatcccctcaaaaaaaaaagatggttagataacacaaagtatgttgcaatgccttaattgtatgcatgtcagggcctctttcatcctttcatacaacacaatttctctttttttttttgagacagagtcctactgtgtcgctagactggagtgccgtggctcaatctcggctcactgcaacctccgactctctggttcaagcgattctcctgcctcagcctcccaagtagctgggatttcaggcacatgccaccatgcgcagctaatttttgtatcttttttagtagagatggggtttcaccatgttggccaggatggtcttgatctcctgaccttgtgatccacctgccttggcctcccaaagtgctgggattacaggcgtgagccaccgcgccgggcccaacacaatttcttcttaaatgagcttaagtggtttgtgctttccaggaatttgttcgtttagtgtaagctgctgaatttgttggcctaaagtccttaataatagtccccgattatcctttccgtagtgatgtcatttctcattcctgatattggtaatttgtgtcttgcctttttcttgttcaatctggccagagatttttcaattttattaatctcaaagaatcagcttttggtttccctgattttctctattgcttttgttatctatttttttgaattccactctgatacttattatctgccttcttatattcactttgggtttcatttcctcttacttttctagtttccttttttttttttttgtgacagagtctcagctcactgcaatctccacctcccgggttcaagcaattctcttgcctcaggctcccaagtagccggaactacaggcgtgcacaggcatgcactgctacacccagctaatttttgtatttttagtagagatggggtttcaccatgttggccagggtggtcttaaacttccgacctcaagtgatctgcccacctcagcctgccaaagtgagctaccgtgcccagccaacttttctagtttcataaggtgattgctgaggtcactgatttgagacttaacatttaatactgttttagctgcatcccaccagttttaaatgctgcattttcattttcattctgttcaaaatactttctaatttcctttttgatttcttctttgacccatgagttatttaaaagtgagttgaaaaaatatacaaaaaacaaaagtgagttattcagtttccaaatattgaaaggattttccaatctgttactgatttctactttaatattcaatatcattctggtcagataacatacttgtttaatagaacagaatatgatcaggcttaatgttttaatgcacttgaaaaattgtgtattctgctgttattgtggggagtgttccataaacattcattaggtcaagttggctgacagtcatgttcaagtcgcctatatcctcagtgattttctgggtatctatcctatcgtttattgagaaagaatattctccaactacaattgtgatttttctctctccttgcagctattagtttatgctttgtgtattttagagctttgttattaggtgcataaatgtttaggattatcaagtcttttcgatgaattcaccccttcttcattacaaaatgatcctcttaatctcttgcaatactctttgctatgaaatttaggaaatcagttatagggattaagactataacttcagttttggatatatacatgtttatacatgtagcagtatctaagaacaaacatctgagagttcagatgagatatggagatagatatttgggttaagatggtgttactatagcatctacttcaatgccaataaataaaggtgctccagaaatattcgtaagataagtagtctgactctggtttccaaagtgattacaaggtttagaaatgtccagctgatcccaggtcatgccagtataagttcatggcctccagatgagtgcttaaacgctctcatgctttccagtgagttatttgctaggtttctcataatagctattttagatctttttgacactgcttaaatcttgggtttcctacttcccctctcactttcagttgatgtttttctttcctcattcacaatgaaaacagaagtcattagagaattccttcaccttcattccaataaatacataaggtcacctacaactgcagcccatttttcttcctgagtgtttttcctatgtccaaagcaaatatctctacctatgctcttgatgtcattcccctcctatgttctaagagatagaagatatctcattaagatagaattatcttattattcctcttttttctgtaccagcaaaccttctctcccttccatccgctttaggctgctcaagaatctctcatcttaaaacatctcaatactacatcacccttgtagctccctggagctaagggtgccgaatttgttggcctgaagttgttcatattctcttccacagacaaacattttgagttatctccacttgccatctctacctcatcatctcttcatccctctacggtaatatgtagcttccacctcattactccaatgaagctattcttggtgaggtcaccaatgatcccttgtgaataaatccaacacatatcttccatttctttttctacttgacttttaagtggcattcgacactcttagctgcactctctgccccgaacatcctcgttccttggctctgttacgacactctcttggttttcttcctccttcactgactgctctttctccacaaactgtctattctctgaagattctaacctctttatgtctagtacaccatctctgttggtcctctcttcagctcctagagccaactgccacctctatgctgaggatgcccagatatctgtctctagcagggattctttcctgagctctctatccttctattccacagtcgaccagacaaacgcactggctggaaaagccatgacttgcgttgaattgcagttgtatcacttgttggccctggccgaataatggcattgttgagcatattttctcatcccaaaataaagggggttaattatactgtgctttcttcacaaagatgttttcactacaatgaactattacagaaaagggtgttgtaagcaataaatcagtgcctaaactaagctattgctactgttatttttgttatatatatttttaaagatgtcatttggcttcatgcaatacttcattccataacatagataagtgttccaacgagctgaggctattatcttttaatgataaagataacagatgttagcttctgggacggctaagaggctgatgtgagctttagaatccatttttgagttggagaacaaataactctgttgaaggggttgcaaccttaaatgactataggaaccaggcaggtaacatacatgagcccatctggtcaggcaaatgactgtgtcttacctcaagggaccactctaggtaattggtaacacacatcattttgggtccaatattgacaggtttgatttttccacagaagctggaaaactaggtttttaacatttaggcctttcaattattattattattattatttattttttgaggcggagtctcaggctagggtacagtggcgcccgcctcccgggttcaagcgattctcctgcctcagcctcccgagtagctgggattacaggcacccgccaccacgctcggctaatttttgtatttttagtagagacggggtttcaccatgttgaccaggctggtctggaactcctgacctcaggtgatccgcctgcctcggcctcccaaagcactgggattacaggtgtaagccaccgcgcctggcatcagtctttaaatgatagcaactaattcacctcctgctacccactcccaacccccaaatactgtgtgggccaaaaactaaaaatgcattgtctgtgagccatttccttattatcctataaggaaagtcaccatttcatctccaaatagttgggcattacgaacccttccaagtggttcatgaggatttgcttttgccttggaaaatgtcagggtgagaacgaaccttgagggtcacagggcagtctctgcagtgttgtggttgcccaggacgaaggtttttctagcccacggctcccactactggtcactgccccaggccagaccctggccctctcctcggaagacagagcaatgcagcagcgtttcccctgcaaactgcctgcctggctgctgggagggggctgccaaccttactcactaagcgtcacaggaaactccgacctccatgagacgaaaaccaagtatttactgaaagcttaacgcacgctaactccttgctccttagccaactgagagaaaaattcgcgaacccattcgcaaacgcggcgctaacagcaaacgggaggctgactccacccagaggatggcgaagcgcttaaaccggagacacctgagaaggagcctcccacaaaacagaccatgtggggaacggtaccgggagctggactggggcgctgaactacctgggcgggaatcgcctcggcgactgttccgcgcgcctccgcttgagtcagcccggccgggagcttgacagccggaagttcatcgcaagcccggcgacgccgcgcacgcgctgtctccgtcagacctccgcgcctgcgcgcgcagccaggaagtgaggccgcggcggaggggacggggctaggccgggtcgccgcctgacgcgacgcgtcctcacgggcgcctacgtcacggcgtcgaggcggaagatggtgcacctccgggccggcggttgctgagctgacccggacggcgagggagcgggagcccgagcccgaccactccggctgccgcggggtgcggcgcagccaccgccatgtcgctgctgcagtcggcgctcgacttcttggcgggtccaggctccctgggcggtgcttccggccgcgaccagagtgacttcgtggggcagacggtggaactgggcgagctgcggctgcgggtgcggcgggtcctggccgaaggtgaggccccgggtcggcagcgcgggtgcggccgcggagtgttgtctccgggacgctgggggcagcgtcagcccggagtggaagggcgtgggttagggctggggagggtcccagcgggatcgtgggtcagggtcggccaggggagggtctctgccgagggcgtgggtcagggccaggcgaaggtcatagcgcgggcgtaggtgagtgcctgctggcggtgattgcggagggcgaggctgggaccgggtcggggtactttcttgtcataagagtagggtcaagtcggagcaaggcctggggcttggggaaccccctcagggtgggtgggggaagatgttacggtgaggtgggggatggtggcaggcagggagcttgggtggggacccacagcggagactgagggacggtgcctagaaggccgacagctggagtcaggaggtgagcggtgcaggaggtgggtttaagccttggccttttgccggacatctggggttattgagcaggcagggacaggactggactttggaggttagggctggttcttctacagtccagggaacttgagagttggtgggtgcacacgtgttgcaggtagttgcggttgtagcctggggggtgggggggttggccgagggtagactgggctgtgtctcgtgatcccccttcgtctttcaacacctcagtgtttctcttcccggtgaacatctactcgtgtgattccgtgtgtagtacaggaagcagagccagtggttgtgacctatatagaacttgcagagtggacaggtcactcggcttaagtcctcttgagtcagtcttgagtcagttttgtctctgcatgctatttctagctc

SEQ ID NO: 2297 - DNA, 6000 bp, Homo sapiens
acccctccccgctcacctgcggtccgcactgccccgcacccctcccggctcacctgcagtccgcactgccccgcacccctcccggctcacctgcagtccgcactgccccgcacccctcccggctcacctgcagtccgcactgccccgcacccctccccgctcacctgtagtccgcactgccccgcacccctccccgctcacctgccctccgcactgccccgcacccctccctgcttacctgcgctctgcactgccccgcacccctccctgcttacctgcgctctgcactgccccgcacccctccctgggtgagcgcaggccccgcacccctccctgggtgagcgcagccaccgcacttcaggctctgggtccaggagaggtacaaagaagcaaggatgacagaaccctggtggctaagagaacagcacagagctgcagaggctggtgccctcagtcacatggccaagagaacagcacggagcttcagaggctggtgccctcagtcacaagtcctatgtgggaagagggtcggctacaaggctggctcgccacagcaacctaagggtctacttttttttgagatagagtctcgctctgtcgtccaggctggagtgcagtggtgcaatcttagctcactgcagcctccacctcccaggttcaagtgattctcctgcctcagcctcctgagcagctgggattacaggcacgcgccaccatgcccagctagtttttgtattttcagtagagatggggttttgccatgttggtcaggctggtttcgaactcctgacttcgggtgatctgcccacctcggcctcccaaagtgctgggattacaggcgtgagccgtcgtgcccggcccggtctacttttaagatcagtctaaggctgggcacattatctcatgcctgtcgtcccagcactctgggaggcctaggccagggggatcacgtaggcccaggagttcaaggctgcagtgagtcgtgatcgctccactgcactcaacatgggcgacagagccagactcttttcaataaaagaaaatgatctcaagtgtaccctgcggaggacacatggggccagcatgcggcctcccctgccactgagcccaccttggagacatggggccttcctgccactgagcccacctgggagggtttctgaaacttgcaaccaagagtcttgcttgtaccacatgattctgcaactgtcagtcagtaccaaatattcacagtgccctcacccagtccagaacattcttttttcttttcttttttttttggtgagacggagatttactcttgttgcccaggctggagtgcaatggcgtgatcttggctcaccgcatcctccacctcccaggttcaagcgattctcctgcctcagcctcctgagtagctgggactacaggcatgtgtcaccacacccggctaattttgtatttttagtagagacgggtttccccgtgttgcccaggctgatctcgaactcccgatctcaggtaatccacccgcctcggcctcccaaagtgctgggatcacaggcgtgagccactgcgcccggcccagaacattctaagtaagtgaagggaggaagcctccaaaagccatgtcaaggaggaagaagggtggagagtcaggaccacacacaagtggccctgggggtgggagtaggctgtgccctccccattccttaggccagagcttgacccccaaggctcctgagcgggcccagccactcagctaacactgcgcatggcacacaagggctgcgggctggctcaaattacatacaacacccaaccaaacgcacgaggcgggttacgcttaaaccatacgacggctgtgcggcatcgttttcttttctgcctcaatttatctcactagcagtaaccccgagttcaagtcagccacacagggaaggtggatttccctgcagtcagggcaccacaggctccacttcagaagcaacggcacgcagaacccaaaacaaagaacacacagcatacacctgccctgggcatctctgacatggttggtgctcctgataatctgccttttaaaaaagtgaagactagctaggtgcagcagcacatgcctgtaagcccagctactcgggaggccgaggcaggaagatccagagcccagttcaaatccatcctgagtaacagcaagacctcgtctcttaaattaaaaaaaaaaaaaggaagatgacagaacaaatttgaagaaattagaaagctatctggttccacagttctacctaaaaacccattcacaccacaagtccaaattcctaaaagctatgaaaaccattttttcctaactcacttgacagcaaatcctggtctatcataataacctcatttgggataaaacctgacatgaactgatatggggttaattacagactttaattatcccacagtgagaatatttattcatttaattacagaaatattaatgtattcaattacagaatactttcccaagtcttctgggagtatcccacgatatacaggttatatgctgcaatgaccattctgaaacctgaaaaattctggaagtgtaaacatctgtactcaagggttcagattaccagccatcaccatgtttacacaagacagcctaaactcccatagcctatgttctaaggttgctgttcagacaaaacttaattaagtatgtttatataaaatacttaattcagctttcacactctgtttcagttcaaagaggcttcaaagtacttaggaggctgcaggccacctattaagtttacaaggaggaaatctacagctcctaattgcattggttatttttatctcctgacttgcctagatagcaaagggaaacaagttcttttgcacaacctcagcagctgcccacatttccttgttcttcttcctgggtgctaagtgacccacaagcttctttctttatacgaatcttcctctccgggccccagtgagggtgcattctccatccctcccaccaagatccgtgccatcttctgcttggccccttcccaaagctcacactgtctgtaccacccctaaggatctgtccctgtgctgcctctgtctctccaccccttgagcacaagtctgaagttccagaaagcaagtcctgtccacaataaacttcttaaagaatgaagataaccacctagtattttcagaataaatgatttgatctgagagaaatcttccaactgatgtgaaagaatatcacacttcagcccccacttctgaaagaagagcttagactttctgaccaaatcatacccaaaatctgtttggttttgaccacaatggagacaaagtgtgtgataatgctacagtcaaaatgtctccgcaggccttttgtgataatcagaattctgggatagtctcctgtctggtcacagagcaggcacctggacaggctaaccctccagccctgagaggtaccagggagctggtgagggtgagggcttttgtgtcgcttcactccctctccctgtgccaatacagcagaatagagttacgcttccgcacccaagtcaactgtgtttagcccataaacttcacagccagtgaaatatgacacacctccaggcaccactggacaaaaaatgtaaggaaaatccacaagagagaatgggacccactggcactggtgatcgattccgtgtgaacggagaggacatccagggagctagaaatagcatgcagagacaaaactgactcaagactgactcaagaggacttaagccgagtgacctgtccactctgcaagttctatataggtcacaaccactggctctgcttcctgtactacacacggaatcacacgagtagatgttcaccgggaagagaaacactgaggtgttgaaagacgaagggggatcacgagacacagcccagtctaccctcggccaacccccccaccccccaggctacaaccgcaactacctgcaacacgtgtgcacccaccaactctcaagttccctggactgtagaagaaccagccctaacctccaaagtccagtcctgtccctgcctgctcaataaccccagatgtccggcaaaaggccaaggcttaaacccacctcctgcaccgctcacctcctgactccagctgtcggccttctaggcaccgtccctcagtctccgctgtgggtccccacccaagctccctgcctgccaccatcccccacctcaccgtaacatcttcccccacccaccctgagggggttccccaagccccaggccttgctccgacttgaccctactcttatgacaagaaagtaccccgacccggtcccagcctcgccctccgcaatcaccgccagcaggcactcacctacgcccgcgctatgaccttcgcctggccctgacccacgccctcggcagagaccctcccctggccgaccctgacccacgatcccgctgggaccctccccagccctaacccacgcccttccactccgggctgacgctgcccccagcgtcccggagacaacactccgcggccgcacccgcgctgccgacccggggcctcaccttcggccaggacccgccgcacccgcagccgcagctcgcccagttccaccgtctgccccacgaagtcactctggtcgcggccggaagcaccgcccagggagcctggacccgccaagaagtcgagcgccgactgcagcagcgacatggcggtggctgcgccgcaccccgcggcagccggagtggtcgggctcgggctcccgctccctcgccgtccgggtcagctcagcaaccgccggcccggaggtgcaccatcttccgcctcgacgccgtgacgtaggcgcccgtgaggacgcgtcgcgtcaggcggcgacccggcctagccccgtcccctccgccgcggcctcacttcctggctgcgcgcgcaggcgcggaggtctgacggagacagcgcgtgcgcggcgtcgccgggcttgcgatgaacttccggctgtcaagctcccggccgggctgactcaagcggaggcgcgcggaacagtcgccgaggcgattcccgcccaggtagttcagcgccccagtccagctcccggtaccgttccccacatggtctgttttgtgggaggctccttctcaggtgtctccggtttaagcgcttcgccatcctctgggtggagtcagcctcccgtttgctgttagcgccgcgtttgcgaatgggttcgcgaatttttctctcagttggctaaggagcaaggagttagcgtgcgttaagctttcagtaaatacttggttttcgtctcatggaggtcggagtttcctgtgacgcttagtgagtaaggttggcagccccctcccagcagccaggcaggcagtttgcaggggaaacgctgctgcattgctctgtcttccgaggagagggccagggtctggcctggggcagtgaccagtagtgggagccgtgggctagaaaaaccttcgtcctgggcaaccacaacactgcagagactgccctgtgaccctcaaggttcgttctcaccctgacattttccaaggcaaaagcaaatcctcatgaaccacttggaagggttcgtaatgcccaactatttggagatgaaatggtgactttccttataggataataaggaaatggctcacagacaatgcatttttagtttttggcccacacagtatttgggggttgggagtgggtagcaggaggtgaattagttgctatcatttaaagactgatgccaggcgcggtggcttacacctgtaatcccagtgctttgggaggccgaggcaggcggatcacctgaggtcaggagttccagaccagcctggtcaacatggtgaaaccccgtctctactaaaaatacaaaaattagccgagcgtggtggcgggtgcctgtaatcccagctactcgggaggctgaggcaggagaatcgcttgaacccgggaggcgggcgccactgtaccctagcctgagactccgcctcaaaaaataaataataataataata

SEQ ID NO: 2298 - DNA, 6000 bp, Homo sapiens
attaaccagacatggtgatgttcacctgtaatcccagctgctcaggaggctgaggcaggagaatcgcttgaaactagaaggcagaggttgcagtgagccaagattgcaccacagcactccagtctgggtgatagagtgagactctgtctcaaaaatatatatatatcaaaatctttagccctgtgttttctatataatacatcaagataaatttcaccaggttcatgggactggcaggcttacttgacctgatttgacactcgtttcttaaaccttgttaagtctgacctcaaaatctactaaagttttgtatatataaagttgtttatcttacctgatctgtcattaagaccttgttgaaggagcattactctctgagcaatggacatagctctcatatgaaccttttcagctaaaaccttaaaaataatttataaagatggtcattaacctcaacacaatttatagatttcataagaatatcaccatcttagaaaattacccagaatctccaaaagaaattaatacctggtaacatacttaatacagtaagattctacctaaattacctgtgttctccataaaacctcaactgaagaaattattacatgccaagtatttttcaaaggcactttaagaaaatggctccttgtcctttaagaatatgccaacacaagacattgaacttatttacctgataagccagctttctgacagcctctttcacatccttggtgcgccctacaatttttggcaaagtctttgctgatggtgcaatacatgataacactgcccgtctaacttctggatttgaatcattttcaatcaaagtagcatatgctaaaaataaagcaatacattttagtactgatgaaattatttatttaactacagtcataaaataacacacattttgatattttaaaatgcctttaatgtgataaagataggctgggcatgatggctactgcctataaccagcactttgggaggccaaggtaggtggagagcttgaagccaagagttcaagaccagcctgagcaatatagaaagacccctgtctctacaaaataattttaaaataaaaaattagctaggcatggtagtggcgcttccagttacttaggaggctgaggtggaaggatcacttaagcccaggagtttgaggccacacctctgcaatccagcccgagtgagaacccatctgtaatagaaagtaatgtcatttttttagtctcacatattttagttgaagtttttttcccaccaacttccttctttttcttttttttggagacaaggtctcactatgttgcccaggttggagccaaagtgctgagattacaggcctgagtcactgctgcgcaggccaccaacttcccttctaaagacacaagggggaattagtcaacggactggctcttaggccaaaagtgaaaacaaatagccctaaaagtcacagaaaattcatcattaagattatgtctgtgctactcctcaatatttaagagaaagcttactatagcagacagtttattttaaactgatatggctttataagggcccattattttggtttttaatgagacctaaaaggaaatattttttggttttattcattgaaacaaacccatttcttatatttaaatatatttatctgtacttctcacatctttcctacctcaattattaagtacaggttgactatcaaatacctatgttttacacaatattattatgggtatcttttaacaccaaaaaaaataccaactactatagtgataaatataccagtgattataaaactggtaatagggacaaaaaggacagaagagtgcctaaaacatacctaggcatatatggaaaaatgaaatacaactacctttatgaccccataggtaagaaaaagttccttaaaaaagagattaaaaaatacgaatcataatggcagagatttatatttttgacataagaatttctgttcaaaaaaaagataccccaaagggagtgaaacaatgataccccaatgagccacctaaaacaggaagagatctacaattcatataacccaaggatttcttttcaaaatatataaagaatgcaaatgaattttttaaaatagtattttaaattaaaaacccaatgaaaaaatgggcaaaacacagtaacaggtattatatagaaatataattggctgctaaatatatacatacagcatgatttacacaaaatgacaggaaaacattaagatagacatatgtgatttatgcaaaaaaattttttttaatttaagcaagagactaattaaccccaaactgaggatttaatagttacttctgagggacagggatgcaactgggataggatgcaagtactgacttttttttttaagctgggtggttgctacttaggttttttttgtttaatcggaatcatatattaattacctatactcttcaaatgtatagaccataataaaaaatttcaaatactgagaatttaacaaaatcaacaaatctgaaaaaagatttaggaaactacacacaccattaaccactgggcattcatcatccttgggatcctgaagtcgtgaaagcgccagaactgcctgtattctcacatttggaatcttatctttcaatctaataagcatggctttattaattttatcaaacacatcatcatcaatctgagcattttctggcatacttcccaaaagcttgtttatgagcaggcacactctaaatctcactgcattgctgtttgcttcatgagactaaaacagaaacaaatcaaaatttattcatagtcacataccactcccaaataatcaatattatctgaactctatacattcggaatgcaagaagttacaacaacaattcatttcctgaagagaacctataatgctaccttggtccatatgtatagcaaatatatatattttatacagtctcaaaatgaacagtctgaaagaagtctttgctaagttacatagtcctctttgtagaggcttctaaaatacagaactcatttaaaataaacaaaggagaactggtttaaagaggtcattaaaaatttaatgctggagttaaagtccactttttaatcataatgataattctaatatttcctatgaaaggtagactcattcaggttttttcaatcactagatatttcattgtcaaaaacatacaaactcccacgactcttttaaagtggcaaaattttctaaaatccctccccaaagctatcattttcatagtacctttaagagaaaagtaaacaaataatttaaaaggccaccatcttcctcttcctcatcatcttccatatctgattggtgaaatgaggtaacaaactttgctgcaaattctattaccctctccacagctggttcacgtttatagaccaccataacatatttaaggtaatgaatgaactcctcatgaaaaactgtcttatcatccatctgaaagacaaaagaaacccttcataaactgcaccgataaaaatcctttattcccaacatcaccctaagactgatgaaagcactagccataataatgcagacaaattaaaatatttatttagtaaactcttaattatccaaaccagccaaagggcaatcaatttgcatgaatttctctccaggctataatgggagtacacaagcttgacttttgacagtgaaaagattcctttgatatatttttttcaatatctttgattctcaataagcctttagtaccagtacgttacaaatacgcttcttcaacaacccaaaatcaatactggcttttatatttctcatattcaggccttcctatcaccagcagtttctttatgagataacttgcacatcctatctcatatcctcaaagccctgtgatgtttactcacaatttttcttggacctcaagataattcatcttccccaaattaattgttctattcttctcaaggttccactcaaaacaaacaaatagtatgtacataaataagaatggccaggccctaaaaataatttggtatttggtgattggattcaacgtaaccgtaggacaagggtagaatcatttgatgttcggcggggagcgatgaccccaggggcaacgaccactgaacccccgcattcaggatccactctgcggttcaatatttgatgtctgatcgcctcggtggtcgtaaatgtttctctccacgttcacgatcggactaaggaataacggtccacgccgcccagaagctgggggtgtcggctcagaaaagccaaggcggggcccgtgtgaacgacgcccaggcttcggaggctttctggcctgggcccaggcgacctcgggtaagtccctgacttctccgaacctcagatccctatgaagtgagtcgcgaaggtgaacaaggctggagtcacggtgcgccgagcccgagggccacggagggcccctgagggagggtgggccggggcgggcgagaggcggcggccggggccgggagcgcttaccgtgcggtaggtgcggctcagcgccaccaccagcttcgcctggttctggtgcggctgctgcgccagccgaaaggcctccttaatcgacagcagcctcctttccgctcccatggctctggaaccctgccgggacgagtcctgcccgcgctcggctacagcctgccagcccgccaacccagaggcagcgctctccgagtagtcttctatgacagccccagggagtatttaccgctcgaacgttcaaataattcccgcgagagggggaaatcccgcgagactgccgtaagcgctttgggagaagagagcgggaagcgatgggtccacccacctcgcaccccgcgctttgggcgcatgcgtctaggttcaaccttgtccagccgttttcacggagggaagtggcgtttctaagggggaggggccttgactcggccggaagtagcgtcggcgcgggagctgagcggagtggccttgccaccggaggggaagggctgctggcgttaggcctggctgggtcgtgcggctgagcgtgaggctagaaagaaaaagcgatcctccaagagtgagaacgggagatctgccgaggataacaacctcccttgtggccgaagggcgggggatccccacacgagggctccgcttcgagagacggcgacaaaggaaagttcgtagcgcgttccggaggcccggccacctctgagaagggagacgacgctgctgggtccgctgagcggggcgacccgaggttagtggagacggatgctgtcttttgaaggccttagtccctgccctggtgaagccgactgcgaggttccacagggcgtgcaggcagtccggggatcgttgcgaaggggggtgcgggctaacttagctgctgccgtttctagatgtgcagctgtgtaggccctgtttacaagtgtgcataaggacagtgtattaagggagaactcaagagaatggaaaggtctttcgggtagtggttaaaataaagaagagtaggaactaggtttttaaattttaaatgaaattatatcagacagaacttctgttggatctcaggatgcaccatccaaaaataggactgtaggagaccaaaatatgccaccctacaatatacttctagagtatattttgagctggtattctgataaaatgcagacacaggagtcgctctgaaaatctgtcctgttgtaaaagaaattgacatctacagaggaaatatacatcagtaaaggatctgtatcagaaagagggcagctctgcgataatttttgttacctgggagatcttatctgcataccaagacaacttttattcaccgtatatttcctcccctcacctttccacaactttgtggccaccatcccccagaaagccgcaagcccccatttcttgagtagcgtaggatgctgtataatattcaatcatctgaccatggtgggactcctctgcgtatgtaattaagtacgggttttttttcttgttaatgtctatgtcag

SEQ ID NO: 2299 - DNA, 6000 bp, Homo sapiens
tgatactgtctgacacagtactgaaagttctaatcaacatttttctctttttggaaaaagatacgttaagaattggaagagataaaactattagcttacagatgatatcatccaatttaaaaaaccatacaaactattagagttcaacaatgttcctgatctgaaattaacctatgaatattcattaatttaattactcatataacactatttgccatgtactactctagtaactgcacaaatgttaactattttaaaattcttctaacaaccctaaaagttggtacttttattgtccccatcttacctgtggattaagttacgtgatcaaagccattcatctagtaagtcacggggccagtgtttcaactcaggcactgttaacttttataccagcaatactaacttttataccagcaatactaactagaccatatataaagacatttcacagaaggaaaaacaaacaacaaaaacctaatcctataaagaacctaggaactaatcatgaatatgtaagacctaataaacaatatagatgataatttaaaatacagacattccatgctcttggatggaacaaatatcataaagatatcaactttctccctattaatttatacaattccaatcaaatttttaaggaactctataaacaaaccttaaagtttatatagaaagaataaaattccacatatagccaaatgaactgtttaaacagtaagggagttcctattcttcaaggtatgtcctatgactaaagtcacagacattaaaataaggtaggattagcataagaacagacaatagtccaatagagcagaatagagcttagaaacagagctatatataatttgggaatgtaatataaaataaggttggcacataaactaagggtgaatggatatgtttagtacatattattggtacaactggctcattatatgaaaaaaagtaaaactgtattggaataagaattaagaaaaaattaagaacaaggttaagaaaaaaatgaaaagtaaaaccatttaatacatatacatataatgacatgtataagggaggattcatgatggattaaagacctaaatggggatggtaaaactatatagttagttaaatataatacagaatatctttgtgaaatgaggccagggaaagacttcttaaacaaaaaagcataaagcaccagaccaaaaaatgaatttaatcacatcacaattaatcatttctggactgaactaaagataccaaggacaaagttaaatcaatttttaagaaagcaacttcaataaagaaatgagcaatggacaaagatatccaaattatagaagagaaaatcccaaggcatgaacaatatgatcacattatgctatcagtttggtagaataagaaagctggataacaccaagtgtcagtgagttcttttttggaactggcactgctggtgggattgcagagtggagtaactgttcggaagaacagtccggcagcactacttaggcaaactatttgcacatctcatgatctagcaatcctacttttgggcatagatagcaaagaaattcccgtatgaacaacatgtatgaagatataccctgaagctacatctgtgatgacaggaattagaagcattctaggttcctatcgctggagaagcggactggtaaaatgtggaaacacattccaagtatatacagcaacatgggtggcctttaaaggcatagctttaaatgagaaaagagacaatatcaatgtctcgtttatgctactctgtaggggggatttccaaaatcaaagtcagtgaacattttcattatcgaatacactgagttgtgctaataaggtcatatggtatggcttcaggtcagcaattttcctctaatgagtatttctctggctttcacacactcctagcacagtgtctggcatatatgagtggctcagtaaataaaagagtcagagaatggcaaaggcctgcagtaagtaactaccacaagcatgttctattttactccagggagagaacagttccaagttatatcttggtgatttggtaatgttagacaaagacaaatgagataatttttttaaggcaggatcaacatatatgatgctactacagcaatataaaggaaactgcttataactttaagaagaaacaatgtaatacttctaagtttagattatagtactattaccttgttcaatctgaaaaagagtattcattctttgtcgtggaccgtaagtctttattaactgagacaggagaagctgttggcttttaattgtgctgtcctctaatatttttactattttcacttcaaccagattgcacctgtgagattactaattggctatacttcagttattatgttactcagaaaatttttaaaaaggctcttactttcccataattgtttttgttctgtttcacagtacaaaagtcaggaaaaatgtaagctttaaggcagtatactatgttgtttaaatttaatctagcacctttgaaaaaatattttcagattataatatcaaaaaatactgaaccaatacccccatggctttaaccattaaaacaaaacaaaacaaaaaaaaaaactaaccgaaatatagttaggctgacctctggcggccagatgtctcattcttctgtaactgacaaaatggtgtgatgtctctgttggtgagacagccaaatagaatatagtaaagaaatactagccgggcgcggtggctcacgcctgtaatcccaacagtttgggaggcaaaggcgggtggatcacctgaggtcaggagttcgagaccagcctggccaacatggcgaaaccccgtctctattaagaatacaaaagattagccaggtgtggtggtgcatgcctgtaacccagctacttgggagactgaggcgggagaatcgcttcaacccgggaggcagaggttgcagtgagccgagatcgcgccattgcactccagcctgggcgacagagcaagactctgtctcaaaataaaaataaaaaaatatatattagaaacgtcacaaagcaaaattatgggcaacacaaatgttaccacattcttaactagcagctgaatatctacaaagtttgaggaattaagcaggagaatggataaggtatggcatattaatacaatggagtactatagcaacctgtctgtgccgtagtttcctcatcttaaaagaagatcaaagttatcctacagggtttgtgagcagtaaacgaagtaaagtgcttagcatggtgtctggcacataataaaggttaattaagtgcaagttactattatgaacatatcaatatgaaccacagcaatattgattgaaaaaagccagatgcacatataattattcatttaacggttaaaacatgcaaaatagtacaatatcctcattcagggatttattcatgtcattaatatattaaaatatgtcattaagatatagaaagctgcatggtaaaagttaacagtaaattcagaaaatccattacttcttcggagggcaggtaattcaaaaggagaaagatgtacaggtggctttagtaatgttctatttcttcagctggcagtaggttactgaggtgtaggagagggaaaaacggcttccctccatcctcctaggttctttggctgggttacaaattaacctgacatagacattaacaagaaaaaaaacccgtacttaattacatacgcagaggagtcccaccatggtcagatgattgaatattatacagcatcctacgctactcaagaaatgggggcttgcggctttctgggggatggtggccacaaagttgtggaaaggtgaggggaggaaatatacggtgaataaaagttgtcttggtatgcagataagatctcccaggtaacaaaaattatcgcagagctgccctctttctgatacagatcctttactgatgtatatttcctctgtagatgtcaatttcttttacaacaggacagattttcagagcgactcctgtgtctgcattttatcagaataccagctcaaaatatactctagaagtatattgtagggtggcatattttggtctcctacagtcctatttttggatggtgcatcctgagatccaacagaagttctgtctgatataatttcatttaaaatttaaaaacctagttcctactcttctttattttaaccactacccgaaagacctttccattctcttgagttctcccttaatacactgtccttatgcacacttgtaaacagggcctacacagctgcacatctagaaacggcagcagctaagttagcccgcaccccccttcgcaacgatccccggactgcctgcacgccctgtggaacctcgcagtcggcttcaccagggcagggactaaggccttcaaaagacagcatccgtctccactaacctcgggtcgccccgctcagcggacccagcagcgtcgtctcccttctcagaggtggccgggcctccggaacgcgctacgaactttcctttgtcgccgtctctcgaagcggagccctcgtgtggggatcccccgcccttcggccacaagggaggttgttatcctcggcagatctcccgttctcactcttggaggatcgctttttctttctagcctcacgctcagccgcacgacccagccaggcctaacgccagcagcccttcccctccggtggcaaggccactccgctcagctcccgcgccgacgctacttccggccgagtcaaggcccctcccccttagaaacgccacttccctccgtgaaaacggctggacaaggttgaacctagacgcatgcgcccaaagcgcggggtgcgaggtgggtggacccatcgcttcccgctctcttctcccaaagcgcttacggcagtctcgcgggatttccccctctcgcgggaattatttgaacgttcgagcggtaaatactccctggggctgtcatagaagactactcggagagcgctgcctctgggttggcgggctggcaggctgtagccgagcgcgggcaggactcgtcccggcagggttccagagccatgggagcggaaaggaggctgctgtcgattaaggaggcctttcggctggcgcagcagccgcaccagaaccaggcgaagctggtggtggcgctgagccgcacctaccgcacggtaagcgctcccggccccggccgccgcctctcgcccgccccggcccaccctccctcaggggccctccgtggccctcgggctcggcgcaccgtgactccagccttgttcaccttcgcgactcacttcatagggatctgaggttcggagaagtcagggacttacccgaggtcgcctgggcccaggccagaaagcctccgaagcctgggcgtcgttcacacgggccccgccttggcttttctgagccgacacccccagcttctgggcggcgtggaccgttattccttagtccgatcgtgaacgtggagagaaacatttacgaccaccgaggcgatcagacatcaaatattgaaccgcagagtggatcctgaatgcgggggttcagtggtcgttgcccctggggtcatcgctccccgccgaacatcaaatgattctacccttgtcctacggttacgttgaatccaatcaccaaataccaaattatttttagggcctggccattcttatttatgtacatactatttgtttgttttgagtggaaccttgagaagaatagaacaattaatttggggaagatgaattatcttgaggtccaagaaaaattgtgagtaaacatcacagggctttgaggatatgagataggatgtgcaagttatctcataaagaaactgctggtgataggaaggcctgaatatgagaaatataaaagccagtattgattttgggttgttgaagaagcgtatttgtaacgtactggtactaaaggcttattgagaatcaaagatattgaaaaaaatatatcaaaggaatcttttcactgtcaaaagtcaagcttgtgt

SEQ ID NO: 2300 - DNA, 6000 bp, Homo sapiens
tcttctagggactgaaaagggaaacagatttgtattaggaggcacttagagtcaatatgaggaccaccctaactgaagttttaaatgtggggatgtgctgcgtgaagattagtagccttgtagcaggatgagccgtggacaaaaccccacagacaccaagatagtgaaggaagtagcttttaatcagttggaagcatcgacagtctagtgtcttaaaatccgagtttgttgagtgcacaatttctgtcccttttaagggctcacaacactaaagattttacatgacagggccgtgatcgattgagcaatctagggggtatgtgacaggggctgcatgcaccggtaatcagagtgaaacaacagaacgagaagtttcacaatgtccttccatacaatgtctggaatctacggataacatcggttgctaggtcatgggttgaattttaactatcaggctaaggtcaggcaggcccaggcctggttttgggtctggtgcctggcacccggctgcctgcctttggttttgcttccttgtttcttaaaacaggtactgagcataaaacaatatagaacaatacggggggggatctctttctctcttctctcagctttatctgcaagaccccttcaaagtaatctgcaaaatactaggcatctgggagaagtttgactaatcttgaaatataaaatcacaacctacaaagggtcctggtcagctgccactgccttcacaatgtccctgttggtctctccactggagtagtacatctgttgccagagaaataaaaatgtcagtttgtgtgttgtttttatacttcttttatggtacttaaatcatgccttgtataagaatgactttatatacttgtttagccctgtacagattagaagctcgttgatggcagtgcctgtggacatcattgtgtttgcttactaggcacatgccttttctacggcgatagagatgaccagccgcatcacctgtgacctcagttaatgggaagcaggcagccaggctaacacatttcttcaccatctaggtagtaggtgctcataaataccaactgagtgaacggaaatgccatttaatataccgctttatgcctcacaccttaactatactatggaagaagcagatacacttcgagctctctaggtaggacagcttccacaaaatctaaaggaaaatccagtttcacttatttgatgtgattttagttggaccatgaggacctgggctgaaattaagggtcaactaagaaggtcattgcaataaagtaaagataagatctctgctatttgatttcaggcaatttagtataaatgttaactcagcaagatgaggctataatagcaccaacattgagcaacaagatctcagagccctgagaggctgagttttatcccagttgtctttggtggaacagttagttacaagatccctggtttaactgcttcataccactggatactagaagaggtgaaacagccggtaatctctaagatggtaggcctgaatagatgggtcagtttcttcatctgcaagtgtggagaggaggagtgggagaacactagaggaagtcagcccaaatattccacatgcttaaagaagacaggccaggtgcggtggctcacacctgtaatcccagcactttgggaggccaagggttgggggggggtgtgaagggtgtggatcacctgaggtcaggagttcgagaccagcgtggccaacatggtgaaaccccgtttctactaaaaatacaaagccggggatggtggcgggtgcctgtaatcccagttagttactcggggcaggataatcacttgaacccgggaggcagaggttgcagtgagccgagatcacgccattgcactccagcctgggctacaagagtgagactgtctcaaacaaacaaaaaaaaaacagaggaaaacaaaggttgctgcctgttaactttacagttaatacatgagccaggtaaatcaaggaaaaataaaagcatctctaaccctaccacccagagataatcactattataacttccctgtctactgttccaaagataggttcttgcataaataggcttacagacacatgcaaaaatttccctcaagaaaatggaattttaagtacatactgttttatgacccatgctttttcataagtatactgtgaacatcgatttatgtctgcataatattcttcaggatagatatattttttaaaaatctatgatgggacatctaggttgtttgcattttttcactttcgtaaataaccttataatgaacatgcttaagtaaatatttatttctcctgcccttgcctccttaaaaagcactgatagccgatccctgagccttcttccctttttctctttattctgcagtattttcctaaggatgggggaggcaaaaaacggagtaggtagagctaaaatctttatggggcagtgggaaaaagaaaaggctggaaacacgatgtgttaatatttcttgtcttacggctactttggatcatttccaagaacaattcctgccccttactgcctaccaacacacatgagggtctatagcaagcttgtctaactcgcagcctgtggcccaggagggctttgaatgcagcccaacacaaattcataaactttcttaaaacattgtgagattttttttgtgattttttttttttagctcatcagctgtcattactgttaatgtatttaatgtgtagcccaagacgattctaatgtgggaagacaaaagattggacacccctggtctatagcagcataaaactctgctgtttcctgcccacatctggaactccacacttaggctgtttcctttgctgtaaggcttagaaaatttatattctgtgaagacttaatgtgcaggtggttatactctgtcctttgcagtacggtgtttatgcctctgggaacagtgattttcacgtgctgtatgggtgtttgtattcaggtaagttccaggaaaatggacattcaatttccgtaagaaggttaatgtgcatagatactagacccccaccaggtgatccattataactgccccaaaacactaacacctgaaaatgcattttgtgaaaaacaaaggcaaatgcatttttaccttagaaatgttgattctggaagagttgggggcacttggtaagttgtttgtggcaaaggcaagggctgcaaagcccgtgacaggaagcagggtaggtataaagtcaaggattaagaacagtacttggcacaaaatagttacttgatgctgaatgaattagtctccctccgtcatctacttcccaggggctagatccagacagaggtcaagaagatggggcctgttgaaagttaaaggacctgccgtctgtttcttctttgaacaagtgaaaggtagtaaaaagtagatggctttctaccataggttttaagtttaagaaccctaggatggtactgtcacattctcttagggaggtcatagctgtgggaactgtcaacaggttgactcatttaaatgtgtcctacataaagcaacatcagatgagttctgatttacaagtctgccaggctggcctgtgagcctctgggcagagttcccgtcccatgcattgctgtagcctcagttcctccacatagtaaatgcccaagtacctatagaagaaatcgtgtgtgagcccacactctttttttatattttagagacggagtctggctctgttgcccaggctggagtgcagtggcacaatctcggctcactgcaagctccgcctcactgcaagccccgcctcactgcaagctccgcctcactgcaagctccgcctcccgggttcacgccattctcctgcctcagcctccccagtagatgggactacaggtgcccgccaccatgcctggctacttttttgtattttttagtagagacggggtttcaccatgttagccaggatgggctctatctcctgtccttgtgatccgtccgccacggcctcccaaagtgctgggattacaggcgtgagccaccgcgcccggccctgagcccacactctttattcgttatgacggtgctgcaactaccaataagttgtgagggttaaatgggatgagatgtcacagtattatttgcctgttagggaggttttagggcacgcgcctcttctctccaaattggaatcacccaaagagttttagtaaatactgggcccatccagggttaattttcttctaattggtttggggtgctgcttggacagggggacttttaaaattctatactgacccaccaggactgacatgagaactactcgcttagtaactgttagaggaggcgccagctgatcaggacctaaagttcatattctttttcatctccccgttgtcgctgaagcctaccccataaacccctaccgtccctttgcccacagcagagaatttccgggaaaacgggaaaggtatgcaagcatgcccacacacgtgcacacacgggttcccaaaagacctgcgtgtggccgcaggggcctgccccgcccttctcgggccctttcaggtcccggcgcccagcgatcccaccagcacctgggtccggcgcgcggctccctccctctccgcgcccctcggggctccctgccccgcccgcgtgccccacccttcctagctctgccccatcgctgctccctgccccgcccacgggccccatcctacccccacctcgatccgcccctcgctcctccctgccccgcccaccgcgccccgtccctgtccgccccttctggctctcagcacccccaagaccggtgcgcgccccgcccctcctcctcctctcgcgaggcagtcccgacgccggaagtgcctggagcgcgcgacagcggcggggcggggcggcctggaggctgtggcgcgcggccggcagagggaggggagaggccactggggccgtgttagtctgccggtggggactcttgcaggtacaggcgcggtcggggctcctcgtggagagccgggggctcctgccggcctctgactggggtgtcgttgcagggccgtccccatgttgcgttttccgacctgtttcccatccttccgggtggtgggagagaagcagctcccgcaggagattattttcctggtctggtcgcccaagcgggatctcattgctttggccaacacagctggcgaggtgagtgagccggcgggagcccgcctgtgctgggtctgctcccggggggcccaagaacaccgagcccgagcctgttcattcgggccacaggcggccggagcctcagtttccccttctgcagacatggctggccacctgctaccccttccctgcctcccaggacggcagtaaactttaagtatatatgcgaaaggtgatgtctgtgctattttcggtacttttatggctaaagtaacagttttcacacagcttaacaccgtcacgcaatcctgcttccccaagtcttcttcactcattggtttattagttaaatgaactttttaaaaaagcccactatgtgctgctcatgagctagacataatggtagatgcagggaccctgccctaagtttgcttacagttttaatagcagtaggaagagttattgtcaaacttcagctgcaaatgtgcctgcatgtagctgccacacaggatatatttaagaacctggcttctcttgtccacgttttatagtacgggttggataaccaccctccactaaaaatacctctaaattggacaaggaaggcatgcattggattccagacagaacgtgcatgggtgttatcagcatttcttgttcacataaaacttcatcgagtataaaccagttgtacccaactttctgctgagagttattacctgccagccattttgtaaggaaaccttcacctgtgcatctttccgcctctggcttgagagttatctggccatgtgagagttgtatagagccaaatttggaaactaggtgataaggaaatcttagcaccctgcagactgt

SEQ ID NO: 2301 - DNA, 6000 bp, Homo sapiens
gtccagcctaatagaaaacagctggattctcatatctgctgctacattcagtctgtttcgatatgttgtttctatagtatcagtgtatatgaaaaaagtctggcctcacacaggtgtgtatatgaaaagggagaaatattctattagctttttcagataattgtgactttgctttattatatcaaatgtggacaagtgatagtatcttaaaggtttgtttcagtgtggaatctaaaattgcatcagtgaacgttttttacattaaaattcattcatcttcttgcactttgaacggatcttttgtccacgcataattttgtaacatcctgctttggtcatttgggaagtattggttccctgagtcatccagctgttctaaatgccgccaccttttatcaaactataagctagatttcattaatagcaccaccaatttaatcagaaaagtctttgtgttgtgaagcacacaggggcagatgcaggttttccaaaaaaaaaaaaaatttttttttttttgagacaagatatttcctctgagtagtacagtggtgcaatcacagcttactgcagcctccacctctcggactcgcctcttgtagctggggctacaagcacacaccaccatgcctggctaatttttgtctttattttgtggagacctgccatgttgcccaggctggtcttgagctcctgggctcaagtgatacgcctgccatggcctcctaaagtgcggggattacaggcatgaaccaccgtgcccagcctatttttgcttttaacataagtgcttttcctcaagataaccatcatactttgtgtagcaaaagttcctatgtataactctcaattctgtcacacagaatattaaagattcgtactcaagggttgaaaataaagttaataatttaatgacttcattaaagataaatgaaactatgagtatgtggcagaaaaagaatacagtgactgctggtatgatttgggactactaccttgactcttggctgagacacttacagctttccccaccatcagtacaaatgttagcatagtgtaaagggcaggtgacagctacattattataaaactagtattgactttgtggatccccaaaagcatcttggggattcccaggggcttgtggatctcacttgaagaacaactgccatagagtatattgacagtacattgacaatggatacttatgaaactaatttataacttgcatatgttaaattaaaatatgctcatgaaaaagaaacacaatttaagttcgatttgtgatctctacatctacaacataataatcttttaatactttgtggtttgtttagttgcttgactaaacaaactaccaactgttcagcagtttctttaatttttaagatagtagctagctaacatttatggagggcttaattctgccacatacacatagcagattttggctacctcacttagaatgatagtaatgcactttcagaggacttggcaataaaacaaagtaacttattaagttaaaaaagtgttaaaaataaaccgattttaggccctaagtctttgatttactaaacttaacttttttttgtcttttactttttttctttttccattttcccttccaggtatgaataaacttaaatttctaattctgtatttctagtacttgaaagatgaagatgatgatcttgtgtcaccccctaacacagaaggaaaccagtggtatgactttcttcaaaatagcagccaccttaaaggtacttcatgaaccaaccagattttggccatttttgtttttatttaagactaggtcttgaatagttctgctaacagttttgctgaaaacttgctgaacacttacctaagtttattagacttatatttatttgattataggaacagcaaaataaccaatagtgtatgacatcaccatgatagatagaagacactctgaagttaactacgctgtaggaagattgcttattcctaagtgttctcatataagtgttttgcaccctgtaaaaaataggattttgagggaaactatagagccaaatagtgagaaaagtcttttttgccaattccaatttattatcttctgaaagcacagggatgctcaactgtattctcctcgggttgtagttggtgtgtgtgtgtgtgcatgtgtacttgttatacctttcattttctagaatgtcagaatgttaataccgtaaagctatccagcattattagggatgcagcacataatagcaaccattaaatatgccagcacatcttaccattttagatgaaaatattttaaagctcgtatttctttgatgtctgaaagaataatctgaccagatttagcaattgcttagatctttaaggtagtgggtgcttagtctaactaaacatttatggggtgcttagtctgccatatacacacaatacctgctttaatcctcacaagattctatgggtaggtacttggtatcaccatttactaatgaggaaacagaaggttagagaagcccaggatcacacaagctggttagtgatggagctaggattctgttaatgtgaaagcctgaggttttaactagactggcagtacaggttgagcatcttaatccaaaaatctgaaatcttaaaatgctccaaaatctaaaactttttgagcaccgacatgacaccactagtggaaaattccatacctgacctcatatgatgggtcccagtcaaaatgcagtcaagactttgtttcaagcacaaaattattaaatatattgtataagatgtacatgaagcataaatgaatttcgtgtttagacttgagttccatccccaagatatctcattatgtatatgcacatattccaaattccaaaaaaatcccaaacacttacagacccaagcattttgggtaagtgaaactcaacctatagcaatttctgccacttgtatttggttgctgcttctgtgaatgaatgaatgaatgaatgaatgaatgagggagagaattctttgatgccaagaactttgcatatagtccaaattctttttcaaggcagaacctattatgtattgccagagagtcttgaggtcagtaaggagatgcattggtgcaagttggctattgaatggagggaggataaaggtacaggagacgctacttatttactgtatttaatcaggatgcccagggaataaggcaggatgtctggagagggtcagtggcagtgcgtcaagagtagtggcacctggaccctgttgctattttggctattattgatccagggaactttgccaggctaaaaataggtcctgtcctcttttatttgccccacatcttacgtgtttgaataagaaaggcctgatcttagctacagacctaatggaactcactattgagttccataatgaattctagtgaggaaatatcagtgaaactgttttcttacactgcaaaaatcaagtgctaaatacttgatctgtgtactttctttagggtacatgggtcagtattgtgtggtgggtaaaagttggtgctctgaaagctggattttctgggttggaagctgctctactacttcgtagtaacacggctgagagcaagttgcctaacctctctgtgccatagtttctcatctgtaaaatgaagatggtaataatgctgccctcaaaaaactggtgtggagattaaataaattaatctacataagcacttagactaatgcctggcacttagcacagaagcagtctgtaggttagtgtctgagcactttttactcagtgtttctgacaacaaaatgagagaaatttttttcctcctgacaccaaccaattttgacaccaacggggtgtcctacaattcaattctgacacgaattacagatagttagcgcagacctcacaggataaggatgcagtcccacaagactgccctcgcgtcaaatgtcaggtctctgggtccccacatctcttgggtagccatgcttgttgtctgacttggctataaggttaaggtcaagagttcccagaaccttcctccctttcaggttggataattttgctagaatggctcacaaaactccgggaaacatataatttttgtttaccagtgtgttgtaaagaatatgactcaggaacagccacatagaagtgctatatcaggcagggtatggagagaaaggtgcaaagcttccatgctctcccagcacctggacatattcaccacccagaaagttctctgaacctcattgtcccagtgtatttctggcggtttcattatgtagacatgattgatgaagtcattggccattggtgattgaactcaacctccaagcccctctctcttccttggaggctggcgggtggagctgaagtttccaaacttctaatcaaggcttggtctttttggtggccagcccctatcctaaagctatctaggtgccagccaagagttgcctcattaaaacaaaagatggtagtcctagcactttgggagggtgaggtgggcggatcacttgagatcaggagttcgagacctgaccaacatagtgaaaccctatctctactaaaaattagctgggtgtggtggtgtgcacctgtagtcctgttactcgggacactgaggcaggagaatcgcttgaatccgggaggcagagtttgcaatgagctgagactgcaccactgcactccaacctgggcaacagaatgagactctgtctttaaaaaaagaaaaaaaaaaatgttcctgtcacctttatcactcaggaaattccaagggttttggaagctctgttctaggaactagaaacaaagatcaatgtttttctgtgataacatagcatctgtcaccttgagaacttaaaatgttaatgtgattgtagttcattttatccagcatggctttatctaagggagggcctacaaagcacagtggaagagggtgggcattagagtcagacttgggtttgattgacagaactagatacttagttattttcacactgggcaattgcctaaacctgttaagcttcattttttttttcatctgtaaattggagaatatggtgtttacttcatatggctattgtaagcaataaaaaaaaaggtattttaaacacctagcatagcaggtgttagtgctaaattatatattactttctcctgataaagtaaccttttaaaaagtaaagagcttatttatatagagctagtttccagtctcttgttttagagacttaaaaaacagtactggactgctgttgttgtttcactgtggcaaagaatagaagaatgaattttatttcatcatatatttgatggttcccaaatcattccttgcttcttatagccagcagaaacctacagttggattttggtgagtctaagtttgtagtaagtgagattgtttttagtgagctgtcagcgggggttgatgaaaggcagaagaccatggtcgtttttaatgaggttgtgtgaaaatccaatgaagtggtcagtgaaaattctacctcgagataaactgtgcagactggctctaacagtagattattttcttctaattataagtttgctatagcttcttttatttttgtttctgtttttgtttgaaaccagaaagtcctttgctgtttccttattatcctcgaaaatcattgcattttgtgaaaaggcggatggagaatattattgatcagtgtttgcaaaagccagcagtaagtttgaaagaaatgcatgtctttgtgtaggagcaatagtgtctacagtatgtggctcacttatgtaaatgatcttaatttttagaatgaactatgaaaatgttgatagtcaactgtttttgattaacaaaagtaacaatttcatatggttcaacctaatactccaacttaagtttcttacacacgtgtgtgtgtgtgtgtgtgtgtataaagattactgaaggtgttggcatcttgagtattttatttgttcccagaagaaattcattgtaaacagtcttagttacag

SEQ ID NO: 2302 - DNA, 6000 bp, Homo sapiens
tttttctatgctacttggggacatcataggttattggtatcctggttgaattttcagttaggtttctatgaaagaaagatgagtggttaggtttgttgaattttttttctttcacagtattttgtaaataaactgggatatttcattctaattaggaagtcagatgccttttaaaagttgggtgatcagtttccatatttttatttaaagcatgtctggctttttaaagtgtatcataatcctgagtaacatttttatttttagaaagaaaaaagaaaacaatagaacaccttcataatactcagttactacagtaacagctaccatatttatcagagaattagctgtaatatgtaccagaatttcacacataattgaacctgtctttctgtgaaccagacctgtttttaaaaactgccttcattccataaacaccgtttgtgtaccttttctgtacaagccccatgcccagtagtagggactcagagtttatctaacatagatatccttcacaaaagcagatgttttatttttattcattcattcatttattcatttattttagagatagcatctcgctctataatccaggctggagtgcagtggcaagatcatagctctctgcagcctcaaactcctgggctcaagcaatccttctgcctcagcctcccaggcaggtaggacaacaggtgcaagccaccacacctggctaatgtttaaaaaaaaaaattttttttttttgagacagagtctcattctgttacccaggctggagtgcagcggtgtgatctcagctcactgcaacctctgcctcccaagttcaagtgattctcctgcctcagcctcctgagcaactgggattacaggcacgtgccaccacgcccggctaattttgtatttttagtagagacagggttccaccatgtttgccaggctggtctcgaactcctggcctcaagtgatccgcccacctcggcctcccaaaatgctgtgattacaggcgtgagccaccacacctggcctaatgtttaaaattttttgtagatatgggggtctcgctatattgcccagctggtcagaaatacattttattactacttaatgcttcgaaagcaaagtgatgggccagagaacacaaaggcaagggtgacgagccctcgggaagtagggaaaggcctcatgggagagatggcatttgtttgatctggaccttaactcataagtaggcatttgcaaaatggaaatttgttatttaaatcataaaagcattatattctgattacctggtcatataaaaaaatcggttaaaaaatagtaacattaaatttaatcaatagtggatgtattaagcacttactgtatgtcaggaaatgtgcttactgccgaaaatacaacgggaaactgccaagttagagaatagtcaatgagaccaccctcaggtttgataatttgctagaaggactcatagagctcactgagggctgtgattatgctcatggttgtggtttgtcacagggaaaggattctgattaaaatcagcccaaggaagacacacataggacagagtccagggaagttctgagccttcagttgtcctctccccacggtgtcctgggcagcataacttccctggtgttgccgtgtgacaatagcacagagtattgtcaaccagggaagttcatccaagccttggtgtccaggatttttattgaggctccaccccaaaggcatagacaactggtccagggctaatctcagtctcgagtccctccagaggtggagctgatactgcatgggccaagcgcccaccccagatcaccctattagaccctctagtgtatcccaaggccactaggcaaacagaaacaccccagtcaggcacaacattccaaggtgttagagtttacctcccagaagctgaaggcagaggctctcttcagccaaggttgaattcttcactgtacagaaacaaaaccagactctgtaagtttataaagctcactgtaaagtgaaggagatgaataataaatggatgattttccaaatatttaacaccaagctgcagcaggagtacgaaggaaaagcctgggatgctgtcagggaggacactgcctgtcaggaacatcttccaaaggaatcaacttttgggctgagattcctagaagatgagagggattcatcaggtgagcagtgcagggaagagcattctaggagggtcacagtcagtgcaaaggctctgaggtgggaagtagctgggcgtgttccaggaactggaagaagaaaaggggactggagcagagacaaagaggagggaatgtggttgcagcattggagatagaagcagggacctgatcccaggcggcctgtgagaccctgaaagcgattatagactttatctgcattgcagtgggaagccactgtgtggttttaaggttcgagcatggatactcatatttgtgattttcgtttttgaagggactcgcatttgtgatttttgtttttgttttgaagggacaggtgtggctcctgtgagaacagcttgttagagatgagtggaggcaaggagactgttaaaacactactgcaggccgggtgcggtggctcatgcctctaatcccagcactttgggaggctgaggtgggcagattacttgaggccaggaattcaagaccagcctggccaacatggcaaaaccccatctctgaagcatgaggatcacttgaacccaagaggaggaggttgcagtgagccaagatagcggccactgcactagtgagacactgtctcaaaaaaaaaaaaaaaatgacagcagccctcctgatgagatgttggctggaactagggtggcagcatggagttgagagaagggggcaagttggagagagcaggaggaggcagagttggcaggacttgtcacacatgacttcctgccagcagaccctcagctgtcacacttgacgtaccctgtggacatctggcagacccatctatttgttgcttctgccctgctatagacagagaatcagacaaccaaactcactggaatgatgtgtaaggaaggagaggcagcctttgaaggggtgacaggtacaatcctgttaacttgtttcatatctctgagcttgctgctgtctgttctggctgctgaaccccaagtcttaaaccctcttctagcctcacttgcagtttgtgttgtgttccagacagttgtggttgccaaagcagtttactgtcaataactcttccaaataattgaagtgttactgatcgtagattcagaaacagcatgagttaaatcttgccctccctagaaagacaactgttaactagaaaagcataatataaaattttctgcacagaacctggtacttaggaggagcttagtaaatgttgaacaaatgagaaaacacctgatcctcatttaaacatgaacattaaagttgtctgtacacctgtggtgtgttttaccaaacccaaacaagacctatagttaaatactcccttgattttccatgtgtatttcctattttctgttcctttctttgtaaaaggagcgtatgagactttgaatatagccaaaaacatggctaatatgctttgcctattttgctcttttttttttttttttttttttttgagacggactctcactctgtcactcaggctggagtgcagtggcgcgatcttggctcactgcaacctccacctcccaggttcaagcaattctcctgcctcagcctccctatttcactttgttaattggctaatcaaataacttacgcttgcccagaaacaattagaaagaggaagtactttcagtgctcacagaatacagtcagtgagagaccttggattttcctttccaactcatatatttatatgactagtggctagccaggactcttacttaaagtgctgaaagtgctgtcacttagccaattggacattttctgcttccatgtatatggggggaggggcgctcagctagagatgacaatgttggggtgcctgtgggatcttggcttcaagtcagctataaacaaaaggtgtcttaaaagaggtagggattacaaaagggtgtaggggtgtactgctaagtgctttgtgtaaattggcagatgatctgtaaacactttccagctcgattcagaattttctgcctcttgaaatctgattattcagatttataaaactacaatttggtttctgtctttctgcccaaaggctttctggctgtgggctgcaatacctcccttccccaaccacccctccccgccccccatttcccccactcgccccacaatcaggatcgtagaaacccagcctggtgcggtggctcacccctgtaatcccagcactttgggaggccgaggcgggcggctcacttgaggccaggagtttgagaccagcctggccaacatggtgaaaccccatctctactaaataggaaaaattagccaggcatggtggcgggcgcctgtaatcccagctgctagggaggctgaggcaggagaatcgcttgaacctgggaagcggaggttgcagtgagccgagatcgtgtcactgcactccagcctgggcgacagagcgagactctgtctcaagaagaaaagaaaagaaaccagaaacccagcaggcctagagcatcaactttttctaaagaggttcagtgggtttgaatgaagtttctaagtcttgagagtccaaaaaggaaacgttcgttacaggaagggagtatgttggggtgggggatcctccttgccggccctgagccagtcccctagcagctggagcatctggcgggagcacctagcgggagcacttcacgggagtgcggccgggtggggcggggccacgcgcctccccagcagccaatgggcggccgcggcgggcggggcagggagggcgcagggaggcgcgggcgccgctctcttcaacttgagcccggggcagtgcgcgcggctgcttgagcgacggcaccgctggctggtgccggcaccctggggcttgtcgtagcacctggggcggcatccccgcccgacttcggaaggaccgggaggcaaaggtgaggaagttggcgaaggaacggctctcctttgtttgcaggtgcgttcagggggaacgggggtcgagcccaagctcgctcgcggggacagcgaggcgggcgcgggagacctgcgggacaaaggctgcgccctcccttccccgagtcagcgcttagcgagttgcctggtcctggacggctggaagggctgaagagggggctttctgccccgccggtgggaagaaggagtgaggcttgtatgaaatgggggggaggcgtccttggacccccaattcgccagtgcagcaggactgttcggggtgggctattcattgatggggtctgcacggggcatttctgccgtggacagcgttctatgattgaggcagtgactgccttcgcctcacgtgccccctggtgaggccacatttctgtcttcctgtctacattaggactgaaagatatttcagggttttggtaatccagtatttggattaaaagcaatatcctttcgtgtagaaaaactgtgcatttccaaatgattttagttacacgatttaggatattggtgtgacttccatgcgagaaaatatctcaaattccccaaatgtagaaacgcagccagctcttggcattgagaaagaagtagtgtttttgaaaagaaaggcgtgaagatttaaatattgcttacaacactctattagcttgtgggggaatctgtgccttttctattatctgtttccctataccaatattgtaaccaggcacgtctatggattcctaattaatgtgtagctgtgaatcttcattactgccttgggtgggagaaggcggaaggagggggcaatcccattagtctttttctttctttttataactgcagctgcagcctggctttgacttgtatcatgaatgggggttctgcctgctttcctcatgctgttctcttttaggtt

SEQ ID NO: 2303 - DNA, 6000 bp, Homo sapiens
ctgaaataggagtggaaggaaggaaatcatcctatgtgaggcctaccagaagctttacatatgttatttaatcttaaataaacctataatgaaaaaattaacatgcccattttgcagataagaaaagtgagattcagtgaggtaaagtagcttgcccaaggtcacacaactactaagagctggaatgtgaaataaggtcttactccagtgcccctattctttccatgatagtaggggactttatgctttgtacctctttgtacctttctacactctaataataattttagtttggaaaaataggactgaagctcaatgggaaggtagaccatggaaacatggtcctcccaggaatagtgcagtatgaagagagattaaaggattgccctaatgacattaaggcccagagcagcactgttgaatacaattttttgcagtgatgcaaatgctttttacttacattatccaatacagtagtcattaggccatatgctactgagcacttgaaatgtggctagtatgaaagaggaaccgaagagttaattctaactgattttaagtgatttcagattaaataagcatatgtggctagtgactgccatattggatggtttaggactagagaaaccagtcaggcgtagagggttcatcagagaagaggccttgctggtacccctgaaaaatcactcgatatttgatcatctgcctcatacctctgggtaatattggtcctatatttggggaccataatttattagctagcaaaaggttttttcctagtgtggactacaaacttattttactatgttttatctttaggagagtaagtacaatactccctctcctttcttatctgagaatcattatagtcattttctctgtatttacatttttccatacatagtattatttaagagctcaagctccaggaaaactgcctgggttcaaatcccagttctgccaatgaatattttgtgccttgagttagctgcttcacatttgcaagcctcactttccctatccataaaatagggataataatagtgcttcatttatagggtagttgtgaggattgagttaaataacctatggaaaatgcttagccagtatctggcacatgctaaatagtcagtaagagttagctattctaaaactagtaccgtgtgacagtgtgtattttgtacctctgcattttgacatttactcaactctatttttgcttcaatagaaggtgttcctccagatctctgtcagaacattccaaaaagaaattcattcctcaagataagaaggtagacagagttttgaagaattagattttatcttattgcaggcatgagttttgagttgttttttatttcactttgattactaaattgttaaagtatttaaaatcattacagaagaaaatcatgaccgtgatattttgttgtgatcattaaaattcccttggtttaagctcaaaccgttgcacatataccacacaatcaaataataatactagaagttcttaatgttggcacagaagatttcttgatgttttgtagttatactgttttttttgttttgttttgagatgaggtcttgctgtgtggctcaggctggagtgcagtggctattcacaggcaagatcctactgcaactttgaacgtccagcctcatgtaccctcttgcctcagcctccccagtagctggtactacaggcttgggccactgcacctgactcatacctgtttaattgaaatatttaattcctagactctggctattcaatgccacttagaagtggctggatatttgttgatcatggactatttaaagactaatgacgtcacaggaacaagtaataggatcccttttgttgtcacctattttgtattttgtaatctttggattgtaaaactgcattgtaatatagtattgcactccctacggtgtttgtgcaaaaaacatttttttttccccattagattggaattttgagaaatctggcttcaagtgccagttctgcctttggtttgtctaaataaagaagtcatttatttctctgggccacagagaggtaaatgtcatctgtaaagtctaagagttgatcttgatttgattctagaatggtcttgaggtatccttccaaataaaattccttggatctgcctccttcccccaactccctaggaggacctttggccttaagggacttaagagaggtcagttttatctactgttcacagcgtttacttccatgctttaaaaaacatgctcttggaatattcttggatatttcatttccttggaaaacaattaatgggtgagtcagcatgaagaaaaaaacccactcacaatagatataaaaattgcatgaagtggtgaaacgagaaatgattttctttgtaaactgaaatgatgaggtatgcagaaaccaattacgtatttataaaatgagcgcgcggtgggaaagctttatgtagcaaagctaaagtgctgttacatatttagcaagacagagggcatggagattcctctccatactgccttaaaactgctgttaaacgttcctttcagtgagagagacaatgtgttgggaggcggacgaaggaaggaagcaagggaagggtcaaagccttccctccggccccgatcagtcccctctgtaaattcataattaagggaatttcctcctgcagctgcgcaacgcttggtggccgtttcgacgtcactgtcagggcatttcagggattttgtgtgcccaggcagtgacttcccgacttctccggcgtatccccgacggggcgcagaacaccgcccgtggcgaagtcgggccgggggagtttgggaacccgtccccgggagctcagcggccagaggagggcgcggaagtgtttcctgggtgagcgcggcagcgggacccgtttccggaaggctgattgcatcaggtgtggagcagggcgcctcctcggcccaacctggcggcctctgcgcctgcgcgcgccgccccgcccccccccccccccccccccccgccgccgcggactccaccgcgggttttcctctccgtcgggaagagaccgacctgggaggggcaggctccgctcacctaccccggacccccgagagagagcggggtggccaggccgggttccggggatctgaggggagctgtgaggtccgggaatagagtgccttggaaagaggacccgtctgcaaggttggaggctggtcgatctccgctcctgacgggaatggtggtcttgggctggtttccttgcctctttggccttgaagatcacagactaagaaccacaggctctccagttcagagagcctgtattttccccaagaggtctactgtggccctcgactgtccttggtccacggacgtgttaggtggatcttggggtgcagagactcagtcccaagagtaaacacttttcatgaatttatagggatttctctgtgacagtattgtttttatgttgtaggaaggagggacatgattgctggcctccagctcggtctgagggagataattgttaattggagaggttattggagtgcaaaagtcagaaaccaccttccacaaggcagcccccctcccatcccttcgtaacaacctcactgagtctgcatgagggtccctctatacactctattcgcaccttgtgcatttccctcccagcactctacctgtttgaaataaccgttttgagtgattatttgataggtgtctgtcacccggccggactataaattccatgaaagcaggggcctgggcttttaaattcaccactatcctcaggcctagtacaagacctcgtggatccttaataaactcatgtaggaaagaataaagtaatgcccaccccactgcatagagtcctcataggaagaatcacgtgagtttttaattcgagatccttggtaggactgtgtgtgtgtgtgtgtatgggtagggttctctaaagtgtatagtcctcacaccagcagcatcagcatcccatgggaacttgttagatatacagatgcttgggccccaccacatatctacccattcagagacacagattgggactcagggatttgtacttcagcaaaccctccaggcgattctgatccaggctccagtttgacaaccgctgccctggtgaagagcaatcctaaggatactttggggatgtcattcacagcgtctggggcagagcacggtttaccgtttactgagactcgactcttatcagggctttgtttgcacgcttacaattagagttatagataatattattggcaatggaaaggaaaacctccttttcctctccggcagttgtatctctcccctgatattatcttgtgatttccggatcaaagaagagtgtgtgtgcggcatatgcctgggggtggggataggaggtagaaggaaggagaaggtgtcgcctacaacttgcagttagcctgggtgggtgtgggcagctctcctgtggggacattttcctattgcaagggaatgctggcgtgtgggagaaaagccagggctaaggtaacccaactgccttttggtgcagacagacaccagccacacggaggggatacccgggctgcactgcacgtcctgcctttgggtcttactgggggacccattgcctccctgcgtgttcccaggcgattggggagggtgcctcccgcaggccctgccgcctccacctgcaggggtcgccctgggagcgcggcccgcctccttctgcccggcccccaccccccggccccgcctttctcccattcggccccctccccgccgggtccctccagccttccctcgcgcagccgctgccaaagcctggagaagtggaatctcgtcagcgccgctccctgcgcgggactcgcggaacggcactgagcatgctcagttgccggagcccgttctggtctcaagtaggaagctagtgcgctgtaaccgcatctgatctgggcgctccgggaagggcgagactggagcagagccgctgggcgccggagccgaggcgagcgccgcgcgcaccactggtgagcccagctttcttccttgcctttgccccggattccggggcagcacgagagtgctggggaaacacccgggtagcggcagcagcgtgcggcgagcggctgcgggttcccccggcggcttctcctctgctcccggccccggggctccgcggccactgctgcccgctcagccgcagccacacctgcagcagctgccgcggcatctgcagcggggcgcctgctgcggagtcccgtgcgccctgcgcccgcgccgcagggccagtggcacggcgactgcgggctcactctccttgacttccatccctcccgcttcccggcgccctctttccctcagcagccccggcttggcagggcctggggcgggggagaccgggttggaggcggtgcgcccgggtggggactgcagaggggaaaagtgagggtgggcgcctgcgggaagagcgcacacccccttgtcctggcaccggcctccgctgtgccgctcggctgtctctcctgggcggcagcgcgctcctgccggggagttggagccggggttggcttctccacgaggggttcagaggccagcccatgagacatgaaaggggggaaaagttccttttccccctcggtggcagagagagcgtttaactagaaaatggctgtgcataggggaccgactccaggaaactggccactgggacccgaaagcccctgcgctgcccaccgggcggaatggagggtggtacgctagaaatgacatttgtgcggcgagaacagagctggacggagggaaggatgctgagacccatagaaacaatgaaaggtggtcttcacgtcggtgaagtggtgtagactacgggttcggggcaaacagccgagggagcatgggactagaattcaaaaaaataaattaatttggataaatcatatgtggagttgtcaccgaccgttctgtagtcaagttctgcgcggttttagagccac

SEQ ID NO: 2304 - DNA, 6000 bp, Homo sapiens
tgcgacaggctctctgtcacccaggctggagtacagtggcatgataacagctccctgcagcctcgacctccctggctcaagtgatcttcccacctcagcctcctgagtagctgggactacaggcatgcaccaccacgcccggctaatatttgtatatttttgtagagacagagtttcatcatgttgcccaggctagtcttgaactcctgggctcaagtgctccacctgaattggccttccaaattacaggcatagccaccacagtgagcccttttttttttttaataaatttaacaaagaaaagaaatagctacaagtaaatatttacttttttttttcatattgaagattggctgatcttagcctttctaagtccttaataaatgcctgtttacacaactggtgtcttcccctaaacctaaacttcaaacttcaaactccaaactccaccgatttggatagtattagaaatggcattcatattaatggttatagtacatttttttacatgtgaatgcaaatggaattgttaggcattaaaaaagaaagcttatatagtggaagaaaataaagcatctagacataagctttaagagatctattgtgttaatacagctttactttttgagtggtaagcttttaaaaagaaatgtggtgctctaactccaggaaaagataagggtgactgaagtgatagtctagaggaaaaagatgcagacatttactgagtacctccaatgtgccaggtgccattctgggcattttcattatgtttcctcatttaattctcatggtgatcctttggaactgtgttattctcatttttacagatgaggtaactgagagacagtcagattaaagaactgcctatgattgtttggctaataataagtggaggggtgaggcttgaaggcaggtttgtcttattccaacacccatacatacccttaaatttaagttattctgacttgtgttgctcaaatccaatgtgttcagctgtttgcttctccaattaccaagatttttctttaaaaggtaggacacttttggcaacacgaaccaactttgctcagtattgttataaactgttaactggagacatttgaatttggagatggaactgaaatggtcttgcggtactagagaagatcaagttatcacataaacaaagtacagagctgagaacatattttaaatctttccactaactctgacttttattgactaaaattttagtgggcagtatgtttatgtttatgactcttaacattaacaacatcgtaagtcaaactcactaatatatgttaagcattctgtttatgattcttttaacctagaggattgttgagctgggactaatttcctcaaatgggaaaaaaacccaggtgagagctgagactgctcctgagactgagaaaggcagctctgacgggatctcagattttagcagcaggagttgaacaatgggcatagaatcagcttgcccaagatctcctgattaataaaccatggaacaagatttaaacccaagttcatttcatttcaaagctcataccacattttgcccaccatattttgctttgttatatgactacaacttagttcaggcttacaaaaaagtcctaattctaaaattcctatggcgtgggtgggaggggatttagatgattttgcataggcaagaaacacccagtttcatggagtttgatggaagagttatgtactaatatgggaaaagtagaggccatctttgtctttgttctttcttttttagacgggagtctcgctctttcacccaggctggagtgcagtggcgctatctcggctcactgcaagctccgcctcctgggttcacgccattctcctgcctcagcctcctgagtagctgggactacaggcgcccgccaccgctcccggctaattttttatattttcagtagagacggggtttcaccgtgttagctaagatggtttggatctcctgaactcgtgatccgcccgcctcggactcccaaagtgctgggattacaggcttgagccaccgcgcccggccgtctttgttctttcttgaactcttccttttcttgggtgatagacttcgtcaacgtctaatgaggatatctaggtgctagtctctgctcatcaaatgattcttatggctcaggagccgaatgggacgtaaataaacagttaagtctcatgaactcactttgcattcatctctagaagatgacaaaacatttgtatttatgtgtagcgtggcactttagttaaactttgtaccccactttgctctattttaaagcagaatatccttaaaaaggatacttagtcctgcttttttttttccgcctaagcccatttagtccttctactcattatgcaaggactcaaatggttatctttacagaagtgagacaagatagaatcaatgctcttgtagtcacttcatctttgtccattcccacttctgatggagagggttctaggacataatgcactgaaggttacattgtgagagatgaacaacatttgcaaaagaggtctttttgccttggaaaggcttcattcttaaaaaaaaatgtgagcatcaaggttaagtagacctcattagctcaaactttaaggatgatatcaggataaagttgggcccatgagaagagaatgagagggagatatagtgacatgaaaataaggaggaaaacgaggtgtctatgtaagttgggctcaccataaatacaaaggcaaccgttagggaaaagcaaagaagtctttgcacatcctcagaactctgaatgtcttagtgatgctgtatgagtgagtcttaatgatagtgaactgaatcagtcaagccaggttgtgtccatatgagaatgtgtctttgctaaacatgccaacatcactgaagcaaagaaacttggagttttctttaagatataggtcttttttacctatccggcccaagctttctcttcttgtcactccatgcactgtgttccgtatgctaaatagtttgagaaacccaaatgggccatgttcgcctacatttcattgtcctgtacttcctgtcctgtactagcaaagcagtcccattggtctttcttctcctcattaacaataaaggtaacacttttgatgttgtttcttcagaaaaccttcattcatcaaaactgcctcaaagatcatgtttgtttgattccagaacttcctgtaattacctgttattgtaacactcatcactgtattttacttacttgtgtaactaattttccatattctgcactagacaacaaagtcctttaagtcaggtactatatctatttacatagcattcacatctcctacaataagggacattagcagataaacaacacatattaaatgaataatgaagtttctgaaatactacagttgaaaactataggagctacattatatagaataaacatttactttgctatagaattcagtgtaacccaggcattattttatcctcaagtcttaggttggttggagaaagataacaaaaagaaacatgattgtgcagaaacagacaaacctttttggaaagcatttgaaaatggcattccccctccacagtgtgttcacagtgtgggcaaattcactgctctgtcgtactttctgaaaatgaagaactgttacaccaaggtgaattatttataaattatgtacttgcccagaagcgaacagacttttactatcataagaacccttccttggtgctctttatctacagaatccaagacctttcaagaaaggtcttggattcttttcttcaggacactaggacataaagccacctttttatgatttgttgaaatttctcactccatcccttttgctagtgatcatgggtcctcagaggtcagacttggtgtccttggataaagagcatgaagcaacagtggctgaaccagagttggaacccagatgctctttccactaagcatacaactttccattagataacacctccctcccaccccaaccaagcagctccagtgcaccactttctggagcataaacataccttaactttacaacttgagtggccttgaatactgttcctatctggaatgtgctgttctctttcatcttcctctattgaagccctcctattcctcaatgccttgctccaactgcctttggaagattctgctcttatgcctccactggaattaatgtcttagtaccacttgtctattctgctatatagtcagtccttacattgctttcttcttctgatagaccaaactctttaaggacaagtacctagtcttatctatttctagatcccccacattactcagaaagttactccataaatgtttgtggaactgatttctatgtgaagcacatgtgccccttcactctgttaacatgcattagaaaactaaatcttttgaaaagttgtagtatgccccctaagagcagtaacagttcctagaaactctctaaaatgcttagaaaaagatttattttaaattacctccccaataaaatgattggctggcttatcttcaccatcatgatagcatctgtaattaactgaaaaaaaataattatgccattaaaagaaaatcatccatgatcttgttctaacacctgccactctagtactatatctgtcacatggtactatgataaagttatctagaaataaaaaagcatacaattgataattcaccaaattgtggagcttcagtattttaaatgtatattaaaattaaattattttaaagatcaaagaaaactttcgtcatactccgtatttgataaggaacaaataggaagtgtgatgactcaggtttgccctgaggggatgggccatcagttgcaaatcgtggaatttcctctgacataatgaaaagatgagggtgcataagttctctagtagggtgatgatataaaaagccaccggagcactccataaggcacaaactttcagagacagcagagcacacaagcttctaggacaagagccaggaagaaaccaccggaaggaaccatctcactgtgtgtaaacatgacttccaagctggccgtggctctcttggcagccttcctgatttctgcagctctgtgtgaaggtaagcacatctttctgacctacagcgttttcctatgtctaaatgtgatccttagatagcaaagctattcttgatgctttggtaacaaacatcctttttattcagaaacagaatataatcttagcagtcaattaatgttaaattgaagatttagaaaaaactatatataacacttaggaaagtataaagtttgatcaatatagatattctgcttttataatttataccatgtagcatgcatatatttaacgtaaataagtaatttatagtatgtcctattgagaaccacggttacctatattatgtattaatattgagttgagcaaggtaactcagacaattccactccttgtagtatttcattgacaagcctcagatttgtcattaattcctgtctggtttaaagataccctgattatagaccaggcatgtataacttatttatatatttctgttaattctttctgaaggcaatttctatgctggagagtcttagcttgcctactataaataacactgtggtatcacagaggattatgcaatattgaccagataaaaataccatgaagatgttgatattgtacaaaaagaactctaactctttatataggaagtcgttcaatgttgtcagttatgactgttttttaaaacaaagaactaactgaggtcaagggctaggagaatattcaggaatgagttcactagaaacatgatgccttccatagtctccaaataatcatattggaattagaaaggaagtagctggcagagctgtgcctgttgataaaatcaatccttaatcactttttcccccaacaggtgcagttttgccaaggagtgctaaagaacttagatgtcagtgcataaagacatactccaaacctttcca

SEQ ID NO: 2305 - DNA, 6000 bp, Homo sapiens
ttttcctttctattttcttccttctctccttttccttcttcttctcttccctccccttcccttgcctactctccttctctcccgccattcctcatttctgcttattagtgagaagttaaataattatatttaaaagagtaggagaagaacgcaggtgccccagtagaaatcacaaccagcagccaacaccaacaacctctcatgtgaattaagccattaaaatgttgttttaaattattttattatttttcttattcttaagaaaatgttgtgggtacatagtagctgtatatatgtatggggtacatgagctgttttgatacaggcatgcaatgtgaaataagcatattgagaattaggtatccatcccctcaagcatttatcctttgggttacgaacaatccagttacattctttatgagttattttaaaatgtacaattaagttattattgactattgtcaccctattgtcccactctttatttcagccatttcagctgctcttgactgcactcaagtgagcttagcagaagaaactcacgctaacatacagaattatcagaaacaataaattaatattttaagccactaacaatgaggtcgacttattacacaacaaaagaggattaatggtacttgttaacaatgctctagaacattatgttagaatttccttaatgaatgagcatgtaaggaaactaggtaactttcatatatttgagatttaacaaatgatattaatcaacataatttaaaacacaaattctgagtctggcaaaactttgaagtattgtatataatagcgcccagaaagatacttcccctcaacttcttcaccctccccactgtcctcccattttcaccccatgcttcacctctgggcagtagacagtaaaacctcaattcacatctgaacaattcttgtcaactcatagttatacagtaagcacatttggtttcagcccttacagaaaaacttttgatggctagtattttaaatttattgattaagatactttaatgaacagactcaacattgtactatccttagcatttttggtactaattgcttttatgattgatttgcttgtgctagtctatttccttcatacttgaaagaaggatttgggaaatgtgcgttaaaaatgttctgtgtgaggcagagaagtcatttatgccttaattttatagatagtggtcctccaatgtctctagatattttcttttaaaatagctaacataaaatgtgctttgagtcttagataatttgcttgcttccttcatgactctgctatttataagatgacttaaagaaaaaagagctaaaataacttagcaccccccaacacacacatatacaaacccacaatgacaatgtaagattaataaaaaggctgtcaagttattttaaaaacaaggaacaaaataactcttctctaattctagcatttatttaaacaataattttgcataacagtatgcttttaactgaataagtttttaaaaacatcttttaaccagttttgtacactcagtttatcatcatctttactgtgtttctcaacgtggaaatggaagggaatgatgcaaatgacagtaacagcaattaacagcagcagttgtcatcatagcagcaagagtagagtatttttcatatcccattgctttccacaaatattttaggcctgacttttaaaaaataaataattaaatgaccaagtcatgcaaagagaacttcgtaaaacctgttaggaagttcaggcttaatcaactgatgcttaatcaatattttttgagttaataaaaactagcaaaatattgttttatatcaaatgctgactgatatccttaagaaattttgatgactcaagaaatctgttactacttcctcacgaattttgccgacgatgtgtctttcgtgacaagccacatttgttgattaagacaatgactccatgatactggagtcacctctttcctggtattaacccaccagttggtttcctggtaggaaagagcctacctttttcctggtatcaactcactcaaaagcatcattacttcagaaaacttttcatacagttttcttaaaacgattaggaacttttaggaaatcttactaatgaacgaggaaagaaatctggataacgttaagtagggggaaaaaaggtgtccagtgaagccaataaacattttcagcaatgtattttggtgttgaacagaaaatgaaatatactatgaatagtgttaaaaaaaaaacctttatatcttgttctggaaatggctttgatcttatgtttgaaaatgtatatgacttgcgaattcacaatatctcaatctcaataatgaagaaaagctataaagtcaccccacaggaggaaagagaaagaagtctgctcccctcattttgtgtcctgctgagcttatctctgcaattaactccacatctcaactctcagaagactccgaactctcagcttacacccttcctttaagcttgcttaagactagaaatttctatgttgtgacagggagaaaaatcattccaattaaatatgctctactgctaaactctaatttaaagaaaacaataaatgaggtggagaaaaataagaaatacattcatcaactgaaactaaggctagtgaggcagaaataattttatacatgtttattgaaagccaactgggaagacagacctgggaagacacatccacaaagttgggggtgttctagagtctttcacaagttacaagggctttatataatagaaaagcttaaaataaggcagaaaaactcctcataccagagttgtcttctttttcattggagggtacaataccgaagttaaaatcattagctacagattacagcatacaggctaaatgtctacatacaaaacaatcaataaaactttttgtttcagctaaacttagaaataaatcattgtcctatttagtgtcagtaggttctacagtaattagtacatcaatcatttgaggaactcgtaataaaatactttactcagagatagaatgtcaccatcaagtcacgaaacctttccagggcgagttaatttggaagtctgcttacttctaaagtaaactgtcaaatgtggtctgtaggttatcgcatttaaaaacaggacctgagaacttgagtagacatagtagataactattaaacaatagggaaaattggcttgaaaacaaaaacatgatttaaaaaattactatattcatctttttgatagagagtaattttgaacatttagtattttaagcatttcttctaaaatttaaggatatgaaaagtaagaaaagaatatggaaaatttaaataatattctgtgagacttatacatagttgtaaaaggaagaaaacttgttgccagtgccacttacatctgcctcttctttattgacaatcttccaaataaatttaaatagcatagttgctttgggtcctgtcgagtttggcctggaattgtaggtgattagaaaggatagggaagctttcatgtgatacgtattcattgatttattaattatttaagacctactttatattgaagtatcctacatgttataggatacatgagacattcaaacaaacacaggacatgccactccctacaaaagtgcatggttcaattgaggaaggaagtcttacagatgggacagagaaccagaaaataacataaagccaacatgtaatgtgtaggtccacctctctatctttgtagggatatagcatttcagaccaaaacctttaatttgggtctgagaattcaggaacaaatattttccttggtaaggacatttcttgcacaatttctaatagtgcaaaattggaaacaccgtgaagggcaccaacaaggcaaggttgagtaactattgttcttatcacaggacgtcacatggtcattaagaagaatgggggaaaactacattaagatgacctgaaaagataaggaacacatattttttgaaggataaaagtcagctgtatagtgatccatatacaatacttctatgtatatgtgtacctctatgtcttaaacgtgtctcattgtatacatatacatgtgtgcatataagtgcagacagaattgaaaactaatgcaaaattgttaccagtgtttaccactgaatagtaggaatgtggagaaatgatgaagagaaatttgtgttttatttcaaagacatctgcagcatacgaatcttttgcaataaattatataatttttctgttaaattaaaaataaaaagaaaaataaatatgctgggtcctactttttaggtattcttaggtggtagaaacaagtagcttcttttgtaatataaaggaggatgagtttcatttgtagtttctagatgaaattacaaaagataatatagattgaaggcagaaagaatccaataagctaaaatccaaagacaacctttgacggtaattggctcttattttacttacatgctccaaaccaatcccaatatttatcaacattcatgaaaagaacatttgctttctttggcaagcaaagataactttctctttcaagggccacatgtttgtgccttcaggtgctcctaaagtttctattaagcctaaaaactgcagtatagaaaaggcagggcgtattgttataaatcatacaaagaaaatgcatgtagtatttcagtctagttcttaccttcctgaacggagttcttacacaggtgtaaggaagataagtattgagaaagggagagtgggaatgtgaagtgatgcacattaagcaagttagtaggaatttgacctgtctggtctttctctgggttgggcacagcttcaaatgcttatgtgtgtatcaccacataccctcacttcctcctttcctacctcttccttcttactggctttgagaaagagcatataaatgacatcttcagggcatgagaagccacttatctgcagacttgtaggcagcaactcaccctcactcagaggtcttctggttctggaaacaactctagctcagccttctccaccatgagcctcagacttgataccaccccttcctgtaacagtgcgagaccacttcatgccttgcaggtgctgctgcttctgtcattgctgctgactgctctggcttcctccaccaaaggacaaactaagagaaacttggcgaaaggcaaaggtagaggccctgcttctctgcacttgttgctgcttctgctacacctgtctctggggtaaagactagcttggtgcctttggggctggagagggccattataccaataactccaattggaggagacacacaggggggtcacttctcacttcttgtgtgctgggcaatcttctgggcactttactaaagcgttacagatcatattcacaatggctttatgagagaggtacaattgccctcaatctgcaaataagagacctgaggaaaatattcatgaccaccaataggtcacattttctaccctagaggaaagtctagacagtgacttgtatgctgaactccgctgcatgtgtataaagacaacctctggaattcatcccaaaaacatccaaagtttggaagtgatcgggaaaggaacccattgcaaccaagtcgaagtgatgtaagttgctgtttctgtgctattgccttatcagagaaaccctctacctccatccacatatgcactcgtttcctccagtctcatggattagttctgatattcagatcaggacacccacagataaccctgttctcttttgcagagccacactgaaggatgggaggaaaatctgcctggacccagatgctcccagaatcaagaaaattgtacagaaaaaattggcaggtgatgaatctgctgattaatttgttctgtttctgccaaacttctttaactcccaggaagggtagaattttgaaaccttgattttctagagttctcatttattcaggatacctattcttactgtattaaaatttggatatgtgtttcattct

SEQ ID NO: 2306 - DNA, 6000 bp, Homo sapiens
ggtcttactctgttgtccaggctagagtgtagtagtataatcatggctcactgtagccttgacctcctgggctcaagtgatcttcccacctcagcctcggagtagctgggactacaggcatgtgctactttgcctggctaattttttttattttcatttttgtagaggcaaagtctcactgtttcccaggctagtatcaaactcctgagctcaagtaatcctcctgcctcagcctcccaaattgctgagattacagtcatgagccacagtggctggccaccaaatatattttgaaccacttagtgagttataagtatcatgtagaaatatttgctgctattattcttattatttgttatatctcatttagatttaagaacaagtatccattacttgcatgttcctttccacctatagttttgaataaatagaataaattgtattttaatgaatcctctcatctaatcagctattggctaatcagccatccatatcagtcactcaatactcaaatggtatgtaattttttaaatgcgttggagtcatttttcatttcagaaaaactctcaaattatcaagataatcaataagaaaatatgatttagatttcagtaaactttaaaactttcttagttcttgttttcttctacatctaattttctattgaaagaaaaacaagagaatttactttttgagttcttaaaccaattcaagaatggattagtccataggaaaaatattttttaaaaaatctatgataaaagctatttaagtaaaatagagtattactacatcaatatatgtttcttccttttctctattttgtctctaactggattgtttttggggttcagaattgcaactttctctatatctacatatatttctgtagaaatgctattacaggccgggcatggtggctcacgcctgtgatcccagcactttgggaggctgaggcaggtggatcacctgaggtcaggagtttgagaccagcctgacttacatggtgaaatcctgtctctactaaaaatacaaaattagttgggtatcggggtgcatgcctgtaatccaagctaccctagaggctcaggcaggagaatcacttgaacccaggaggcggaggttgcagtgagccaagatcgtgccattgcactccaacctgggcaacaagaatgaaactccgtctcgaaaaaatatatatatcataaaaggcataaatttttcatttacatggagcttgctaaaaatatcctgtatgattaacatacaattaaatttataatgttaattaaaaattagcatctgctagaacagaattcatatttaaggtcttttttatattaaatgtaacaatttgatcttgaacacgttcctaaatttttcaagttcttaattgtaaaaaggcaacccaataccattttatctcagtggtttttgctaaggactaaaaaacgacttaaaacattttgtgttatgtaaaaactaattcactcaagtagctatgctcatttttttagttagaaaagcagtaatttcataataaataagtgccagttatagtcagaagaaacaataacctgagggaaagaggaagagatggaagaattgtaacgtgttctatgtccttgtctgttgctaaatgctggttctatgggtagggcccagggcttcatctgagtgcaggctacaataggtttaatactgatatcagtttggggcctgtgtgtgtatgtccccagtctaggatttcctaattcttctcatgagaggactcccttttaatttaaaaggattattttttgcaagactcttcttccccatttaacggcgcttatatgtttgttatatatcaacgaaaaaacacatgccacaaagcgtttatgaattcaatatcaatttaaaatgaatacatgttactaattacatagagacttaatgtatgtttaaaatagtatatatatgtgtgtgtgtgtgtgtgtgtgtgtgtgtgtgtgcgcgcgctttagtctatagataattcgatttaccaaccccttggaaaggaatcccagtacatctcaaactgggaattgctgacattgctgatgtattaaagtgacttcctaattggaaaattctatatgacccggttattttcttcccaaaccattctatctttaaataagctttgtgcctttaagaggaattatgattataccgcatactatgtatatatatttaaatgaacaattaatgaaaattgttcccaattatttaaaaaaaaaaaagaagaagaatactattttgcggaggcagtgcgtgcaaatcctctgatgtgtcatggtggagtcattctcaatatctaatggctagaaaattgagtaaacatagaactaataaagaaaagatttcttcacatcatataaaatcagcctacaaaagagtacattgctgtggaaaattttgagacaagcacagggatttttttcacagtgatgatatctcatgcttgcaggcattagttacaaagttaaaaaattcctcttcacatatcaataccatagaagtgactgttgtcaattattgtcagcatgacccattctccccatcacatccccaccatctttcttttcagcataaaacacactatatttaaagaaacaagccattaatcaggattaaaaactcttcctctcactctttgcaagtacctgatagaaaatgctcccagttgacattccattcgtttgaattctgcttccattcctcaaaaacactgggactatttttttttccagatccaatttgtaggacaaaagccattatataaccataaaagtcactttacctctttctaatttatgaaacttgtgatctctaccaatgctccataaaactataacccatttctaatatcattttccttggttccatttcttcttttccaaaataagctattaagtgagaagtcactcaatgcctgctttcttgatagatttggaagctagacttaggaacccagcctacctctatcctactgttcattgattcatttaacttacaaatattgaccaactaccaagtaccaccatcttaagcatcaacgtttgcatataatggtaggtatttttagtgagcactaactcggtactaggcactctactaagcactttcattattttcctatgcgctggatactattattatccctgttttacgtatgaggaaattgagacagattaaataacttgtccaggaattcacacacagacagtttaaatcttaacccctgataacatgatgaagtatttgtttcttttttttttttttttgagacggagtttcgctctgtcgcccaggctggagtgcagtggcgcgatctcgactcactgcaagctccgcctcccgggttcacgccattctcctgcctcagcctcccgtgtagctgggactacaggcgcgcgccaccatgcccggctaatttttgtatttttagtagagacggggtttcactgtgttatccaggatggtctcgatctcctgacctcgtgatccgctcgtctcggcctcccaaagtgctgggattacaggcgtgagccaccgcgcccggccgaagtatttgtttctaacaagagcattctggacattaaagggccttagagtatgagagaaaaaagccagaaaaaaaaaaggaatagtaataataattttttaaaaagtagaaataaaaaggtaaggagttaacatccattagattccattttctattcaaatatgtatatttacatacagtactgctgaattgactcacagttcttaggtcctatagaggagtgcagtgaaaaggaagacaatttacacagtacagagctgaacataggacttacaaacaaaaaaaaagtcaaggaatacaaagtagctttcccaggtgtaaagtaccgggtctagaattctatgaggctagggagaagataaacgacaaaagctataagagatcagaatgaaaagagatccacaagcctaagaagcccaggcccttgaggagaaccatgaatttgagcaggatttcactaattcctttaaaaagtagccattgcctcaaagtacgactccatcagcataggcaggaaagtgggagtgaggaaaggcttagagttttccagcctggctggggtcagacaatttgcctggggaaatagtgggagctgaggttgaaaagaccgattggcttcacgtttgtggcaggccttgtccaaaaagcaataggaagtcgttgaaaggttttgtgcaggggagcgacaggattaaggcactacttagtaggaagtcatatcaaaagcagcaacctgacaaatggcaaatacgacagaaggaaaaaaaataacaggaattttcttcacaatgactcgactttgaggtaataaatgcctgagccacattggaagcaggggtctcagaaggaaggcgcagatgggaaaggcttttctgggcggtggcgtttcaatgcaaggagggcgcttgaatcactgacagacttcaagttaagggagttttcgtggctgaggttagtaagtcacacgcacagctctccaaaggcatgtatggggaacgccagccttggctaaaagactgattcaagttatgtccgtcaccctgagcaaccaaaaccacccactacagggcaggtgaccccacaaagcaaaccaagccatctggtccacgctccccacctcccggagggagatggaaaagtttcgggagtagtccccggccaatcggaaagacattttttcattcctcaaccactactctcaggtgctccagggagggaggatgacttcctgacggtcctcctgccgctcctccctcgggccaattatgaaactctgggcactcttgacctcaccccgttagggcccgggaggggctccctagtataaagttcgcagcaccagacagttgagctcacttgcctgatatttccagtgtcagagggacacagccaacgtggggtcccttctaggctgacagccgctctccagccactgccgcgagcccgtctgctcccgccctgcccgtgcactctccgcagccgccctccgccaagccccagcgcccgctcccatcgccgatgaccgcggggaggaggatggagatgctctgtgccggcagggtccctgcgctgctgctctgcctgggtaagttctccccctctggcttccggccgccccaaagaggagacaaataaggaaggctcctgtgcatttgtcattcgacaagtacggagttgtctccaggttcaagtgtgctctatttaaaattacgtcttgttttgtgagtctgtcttcccctatggtgggactggggtgggggggactggggatcgatgttaaaatgctttttattggtgaattaattattggcatatatgttatgcatggattgaaatatctccttattaaacaaaataaaaagttgttgaaaaagctttttttttttttttgaaaagttgccagtcctagaaatctaaaggcctggaacgcactgttaacatttcatgtcttgttcctttttgttggagagtggggaatagaaactagcgtaagaaattttttggaggggggaaaaagcttttctcctctgtcttgcgctcagttttctaaaacctagcctggtttagctttcccggaggagctggtatgcgccagtgccagttggctgagctccagacacaagagaaataaaacactggtcgagggtatctggagcagaagggccctgggcaggtcctggcgctccccaccgcccttcgcccctacacctgctgcttgcgtttttccctgcagcctcccaagcagcctctggagcaagcgttctgcacttgctgctaattgcactccatagcctgtgatcgctgagggtatttaaatgccagtcttcctatttgagatgatttagttcaaggggaaaaattttctaaatagcctttctgttaaaaaaaaattacttctttccaattcc

SEQ ID NO: 2307 - DNA, 6000 bp, Homo sapiens
aaacaaaggaaggatgagaaacgaagatgatacaagaggtagatttcaccttttttttaactcctttaacatatcattctgcatctatgaaagattttttgaagaattattttaagctcatcctccctctcttctccagctttgctgcttctcatttcttactctttcctgtcaccatttctccttaccaagaagttgggggaaggagggaaaatgaccacgtaaagctgtgttagtttgttgtaaactcattaagcattcattatttggctgggtgcggtggctcacacctgtaatctcagcactttgggaggccgagctgggtggatcacctgaggtcgagagttcaagaacagcatggccaacatggggagaccccgtatctactaaaaatacaaaaattagcttggcgtggtgatgcatgtctgcaatcccagttacttgggagactgaggcaggagaatcacttgaacccgggaggcagagtttgcagtgagccaagattgcgccattgcactccagcctgagcaacagagtgagactcctctgtctcaaaaacaacaacaacaacaacaacaacaacaaacattcattttttgagttaatttttgaatttatttctttgcattctgggaaactaggtagctcatttatttaaatcttcaaatcacagtactttgtttatattcaacacgtttttgtatcctgggttacgtgctatcttggtctctaaagagagttgaaggaggaaggagaaataaaaaggatggagaaggtggtcagagaggtgtaagggaggtgtaagggcatatgaagaggcaaaattgtacccaaatccatggaattttagctcagtgttactttcccagcagagccttgctctgtgcctttctttctctacttcaactattagtaagagagggttagtaaggatgccttttcctactggttctctctatgtaccatgtaaaattttataatgacataacaactatcagtggaacatggtggctcatgcttgtaatactagcattttgggaggctgaggaggaaagattacttgaggccaggagttcgagactagtcacatagtgagacacccatctctaccaatactactactactagtactcctactcctactactatcaactataattcactgaacagtttctaatacaccagattttttccttgaagatatgtattattgggaatcataaaaactgtgcaagtcattaccatcacattttatcaatgaggaaactgaggttcagagaggtaagtagtttgtggttcagtcattgggtgacacagatccaaattgaacagactgaacagattccaaaaccaattgtacataatattccagctctgttgtcccacctagaggagtgtctaccttgctggaagtctgggaccaagtaggaagagatgaagccactgtggcaaggactttaggaagagatgtctagggccacataggtgctttctcacttagcctacaactagggccagcacaaaagcccagattttttaaaatcagaagttactttttgaagtatgtttcaatatggccaaagaaaaagatcatcatggtgaactgaaactaacaggtataatgtcacagagacaattatttttgaggtttaataacatatgttaagctgccatttaaaagagatagcaagtcagccgggcgtggttgctcacgcctgtaatcccagcactttgggaggccgaggtggatctcctgaggtcaggagttcgagaccagtctagccaacatggtgaaaccccatctctactaaaaaaaaaccacaaaaaattagctgggtgtggtggcaggtgccagcaatccccagctacttgggaggctgagacaggagaattgcttgaacccggaggcagaggttgcagtgagcagagatcacgccattgcactccagcctgggggacaagagcaagattttgtctcaaaaaacaaaataaataaaaataaaagagatacaaatcaaacacattgagaaatacatataaaaagtggatcccctagactgaagaggaagatacaagaaagtaggcaggaaaaaaaataactacctccctcagaacaactagattataaaatacaattacctgaatacaacttttgagcagtgatttttcactgatacattcttagaaaccaattcagtagttttaaataaaatatttgaaagttctctctatgtaactgtaccactaataatctacaatgcatgatgcttatcattactataaaaattacaattttaaaaatgcctttcatcattttcattcacccactcttattaaataaagttaatggtcattaggaaattttcctatactactgaatgccttaaagccttcatttggagaatacatgttggcctagaaggaatgcattccaaaattttcctttccatcatggcgtgtgtctgtttatgtgttgtgccctatatgtaactacaagtttattttgtcctgtccagaagacggggaggacggtcccagctgcaggctgttctgtgtgggaagagaaaaaggctgatgcttaaaggccctccaaaggaatctacttaagcctcataccagatttgggaggactggttatacctgcctaaacctggcacaggaagaacagcactcaagcaattcctaccttggggttaactaggaatacaagtttcaccttgtgactctggtgtaactttggtttatttttctcttagtaacagctcagcttgcaaatgaaagcactgagacgcaactcagttacatgtttgaggactcaggaaaatcaattcttaccttccactcttccaaatgtaatggttgtattccagctttaccatgccccataagcaaatgacttgagagagagaggtggttgggggctgggggagaaaaagaagaaggagaaggagagggaagaagaggaggaagaacagagagaaagaaagtgaggggaaaaaaaagaaacaaacaaaaaaagacaggaaaagtctcttaacattgaagagattggatatccagtgtcagaaaatttggattttcttgggagtacttattttatttatggtggtaaataaagccctcaaggaaggttattaatttatctgtcctatttagtatattaaattatactacttcatattctagtggcctgaaaaagttaatttaccacttgaatggcataaatgatgaatacttacaccaagtcctggaattttccaatgctcaacaaacatttagtactttttgtttaggtctcgcttttttttttttttattagtatctacgaaaaaggaaaacaaaattgtagcattctgttggggctaacaggacagctgttggctaggctaaatgccatcttggagtaagagatactttaacttagggcactggtgctgagagatggagagaatatcagaaaagaaaaatgcagggtggaagtgttgagagggagggagatgatgtcaaaatccattggcttccagtgtttctgctctttttagctggggtgcagtaaccttccatcttacaactttgggtttctttaaacttcatgcctgccctctctaccaatgttttatgagctgtcatgtgggactagaatgggattctgaaaattaagagctgatttttattccaccggatatatcagttgcctggggcagtaaaataatttagttttgaaatgaaatgttattcgtgggagacaagtgcacaacaatttacttaacttaaacagtaggatgaggaggaagaggcagacacccaaactacatttcatatgtaaaataaggcttacatgacttttggatgctatagaaataaaatttctgtactgaggggcataattatccacataaatcttatatgaggaacacagaccagtacaaaagcagctgtatcttttggttatcttggaggcaatatataaccacataaggtaaaattggatgctgcttgctttctctaaaagctgtgaggatgtctttctgttccagaaattgcttaatgcaagtaaatgaaaatatactgaatacatgagtaaattcataaacagaaatacaaatgaaatttctaaagtaggtcctggtgagccccaattttatgaattattagaagacaatgcacccagaaactaagacactagcttgaagacttttttcatttcttttctttttttttttttttttttttgttgctgatgttgttgttgttgttgtcgttgttttgaaacagtgtctcactcttgcgccttggctggagtgaagtggctcgatctaggctcattgaaggctccatctcccaagcttaagcgatcctccccacctcagcctcagggaatggatgggactgcaggtgcacaccaccatacccggctattaatttacttttgtattttttgtagagacgaggtttcgctatggcttcaagactttaaaaggcaacaatgactcttttgaaattgcctgcattatcaaatgcctgaagtcaaccacaatgaatggtgagtctggtttctccatgacactagcaatcctctgaaataaaggaagttagaattccagaacacgtttgggtctctgactcttcctcggtggcttccaggagtttaggtcagcctgcaggcccgaccggaacccccgacacccctccacgcggattctttacatctccctccctaccttgtttacgccctagggggtagggaaatgaacagtcagtcaggtgagacccagcagggggagtggtgagctggtccgagggcagcccgaatatgtccctgggtgtgggtatgggtgtggggcaatttgggtgggagcagcgtggaggctcccaggaccaagtcctgcgcctctttggcggggtgtgtgcaggaggaggggggataaataggaggctccctcctcccggcgacattcacggagccggccggcctcccgccctgggtgtttccctgccttgtagccagggtgccagcctgggaagtagtttcgtttccttctgcctccgggattagtttccaggcaccctctcaggcgcccgaggcccgggaagggggcgaagaaggagggagacttgtctaggggctgcccggcccggcagagcggggttgatggaccgggccgcccggtgcagcggcgccagctccctgccactgctcctggcccttgccctgggtaagtggccgtgctgggcactggaaaccaggaggaaagtctggggctggagtcgcggggagggcgaaccctgaaccgagctggcatctggacaagagggcgcgctggggctggcaggcgcgggttggagaactttgaaggctgggagagcgcgaggttaaagatctggcaattgggcacctggggctgcacctgctggaggcagtccctagacgcgtgagaaggcccgagggcggaagcgattccgaggtcctcgctgccagtgctgcgagcaggccgccagctgctgacttgtgcgcacagcagagggcctggcggcgccggcgggctgtccaccggggtgaggcgctgtgctcgcaagtgagggtcggggggtgggggcaggggcgagcagggaaacccactaaagaagctcacgtggtagtatagaccaagaagcatatcctgcaggaggcagaagaacgggaactctttgactgaaggtgtgatcacctggcgttagggaagagtgccagcgggaggaggagtagcaggatgcctagagccctccagagggtctctcctgcctccttaggagtcagaactcacaaagcagagctggaacttcagatgtggctggaagcaggcttccccttcccctccaccgagggaaggtagtgagaaggcttctaagtaggaaaaaatcccaactcttcaaagcttgctctctgcatcatggtcattttgcggggcagagaagggaagggaaaccagtaacattttctaatcttagctgggctgtaga

SEQ ID NO: 2308 - DNA, 6000 bp, Homo sapiens
tgccagcaggcatgagtgggtcaggggaagtattgttatttgagagttttctgtcaatccagatttttaaaaagggggcgggggaggttatcaattatattgtaaagtagatctccttggaaaaaagtatagaagctttagatgtgttgggtttcatttaaataatggttcagctttgctaaccccatttgagacaggtctagctaagactatgaaagatggatcccaataaaatgataaaatccaagagcagcgtctatccccaaccaaatttagagtcctataaagagaaacacaggcacagaaaactctgtgggctgcgccacagtctaaatccgatgatcatgatcagtgtgacatcatcattgggtagaatataaacacttggtctgctggcaatcaatcaagtaggccatccaaatcaaggaaacagcagagtcccacaatcatttgttccttttgcagacataggatggcccatgcccaaacactaagcatccacttccttcattttaagagtattattcaaatggtcacacaggactcattcaggcacacagtttggtttctaggtggcagtttatacaagatgggttatgtctgctcaaaaaagtggtgaaatagactaaacacctaagaactattatatcaggatagtgggttatgggcagttttgttcttttaatcaattccttgggtctccttttcactgtaatgtagacacatcatttttaaagatgataatttaaaagataaattaatctataactttcgaaagattttaaaaggagagattattgtacctcagaaacttcttgcattccttaataactgcttatagagcctcagtatgtataatttatatcactgactaaaaagttctaatttttgaaaactgacctgagatgacagtccctttattgtttaggtggccctcccctggacctttcttggctccattcatgtttctccaggcacaccgaccacagccatccatctggggccacattttcaagtcacaaaaatggcaattttataacaagggaaagtaacattttattggcagtactcctccacttcccacactccctgccctcatctttaagaattgcctataattatccccagacagatatgatccttcacctgaatcatatttgctgagtcagcaataggcatataattccttttctccctaaatgatttacacatttacactgaagtctgtcactttaatacaccaaatctctcaaacaataaagctcctggtaagaagaaaacttgtccactgctatatccccaacacctagaacaagttcctgacacatagcaggtgcttaataaatggtgttaaatgagcaaatggaaacttggttttccatttccttcagctcaacagataaaacagcaattaagtgcatttcttgaaggatatcatagggaaatctccaccaccagtgaagtttaaacacatattttttgttagggataaagtaagaaatatttctgcactggggagcaggctaacccaaatgacctctaacgttcctttcaactcctagagtttttaaactgatgaacaccacagcttaggagaggccatcagctacataaagcctgattcccaagtagagtaaattgccatgttctgtttaaaataaagataatagctgccccgggatttggacgcaaaaatgctaattcatccaaaatgcagacacatcccttgggagtaaaatgttcttgctaatcatcagttatactaggcaaacagcagatgtgcttcagggtcttcttagggctaagcccaaaaaccatcagtggggaaatggagaagctagggatcaaaattaaaactgaaataaacagtatcacactaaattgaagctttgttttgcagtcaacaacaaatccacttaagaaacttacctgaatttagccttgaggtttgaatggtttgtaacagaatataaccatttcataagatagaaaatagtgcatttgacatgtaagcatttttgcccactaaaatgtcatatttacctgggatatcacactcagatgttcccattcaagaatatcaaaaatttagggtaagttattcagattgcatttttcttcagtctggcggggagaggtagttatcgcaaaaggagatatatgtcctaaataactttttaaaaaatctaattaaatacctagggaaattccattcacacataaatcaacttcggagtggttcttttccctcagcgcacccttcctttcttttggtgaaatcacagactagataagaaatgggagggccagagaactcttaactttaaaggtgcagtgtagattccatggagctgtgtctcaagagtcttccccattcattgactttgttttaaagccataactgcagagaccacacttaagacaatagcccaatgaacaaagtgaaaggattcaacaattatctgtgaaatgtgatcacatattttctgtagactttctaactttatagtcaattcctaatcactcgtacattaggtttccaaaagaaaagtcttctgtctttagattgtaatttaattttaattccagtgacaacagagtgcgcagaaagaagtcacttcctctgtgcacgtatacttaaaaaaaatctcctctattatctgaagagggaggtctaacataagaattctgtgggattaagctcacatatggttggccgacttggtgttggatgtgattacggccacacaactaaaccttaaatccacatactgttcctatttaactgacatatatgaactaatttatagaaaatgtgcagctaattatttcttccacctcctccatccctcaagaatgcaccagcaataatacgtgttactgaaaaagccaaacacccccactgaatatttgcaatcctaaacgtttgccaatttatctaaagcagatattgttattttagttctctgaatctatgcctgctaataagtataatggggggcagggggaggagtaatttaaccagataaatttcacctctatagacctcaattttctcaccaaaaataaaacgactagcccagagactatgcaaattccctcagtaacaataacctacatgtgaccactaattatcaagagcacaatttatgtgcaaaagaagaccagaattcttaaaagagccatgtcattaaatcgtagagttgaaaaggcctaaaagacagtcatgattcgatatgaccgctgtgttttctgactgcagaaaacgtctttgaaagcaccgcgggcagccgaaccaccaaatcgaattagaatccgcaaagggacccatgaacttctcccgagggggtagggtgcaaaaggcgcgcgtatctggggaggagttaggcggggagagggggaagagccgggagcctgagagcacagccttgcatttctgggatttccgagcttccagtatctcagtaagtctttcgtctgtaactacaaaatctcccgagccaccacctgcagctgcacagctgtgggaaagggaagaagaaaaagggaagaggaggtgatagacagggaaagacatcgcccgaggcgcccccaaagccagtaaggcgagtggactgtgaacatcgacgatgaaaaggggaaagggaaaacaggaggactccgcctttcccacccagctccgctcctttcaaaaaaaaggaaaggccgccgccgccccttcctccgcctttcacttggggatgcggagcggccactgaaccgcaccctcggagtcccgctcccctccggcccggccccggggcgcggaccgagtcttgcaacccagtaggcgcggcgccttggcccacacactcggggcaaaggtatctcctccctcctactctcctccctcccgccgtggggcactcgattcttcacgcacccgcccgcccttcctcttcctcgcgtcccagcctcctcagcccgccgcccccggcctttcagccgcagaacatttcagtccttccacccacaccacaagggagcctccagaaaactttgtgtgtgttatctggggctttgtccacatcctgggcagggcccgctcagccgggtggatgcccgagggtgtccgggatctcacaatgcgctggggaggccaccacggaaatcccacccctctgacctgcttctacagcagtgccacacgcagcacttcagctcgcaattcccatgccctgagcgccccctcggcgcgggggagactggaggaaagccccgaacccggcgcccttctggctgtcacgagggaagaggtgcgcgggcagagggaggcggctgagacacgccgcgcctcaaagaattattttaaagggaacaggagaggggtcctttttctttcgcattcccagaagaggggcgcgacgaggcgatccactgttgcatcacgtaactgagcccctgggctcctaaccccgaccccagacgcgcgcccaaattcgtgcacacacccacagccgtcgccgccgccgcggggccgagcacccgcccggctcccctgtggtcctcaccgcacccgccccagagcagagaccacccggcgcccgaggagcagcaggcgaggccccagcactcacagacggtctccccacggccacggccatcgcagctgcggcaccggctccggctgcgcccgggtgctttacgccgactccggctgctgctagtgctcgggctccggctcgcctccctcgcgcctccctcgcggctgcgctctgctcgccggcgtcccgctggcagccagcggcatctgctccccccacgccgccgcccctcccgctttattagagcaacatggccacccgcctggaagggaccattcgcttccccaggaaggggtgtgagcctgcgcgcccggccgcggtggtgggcgggaggatggtgggcgggctccgagcccagctccactggccccggccgcggggctcgcccctccgtccccaaacgaccgtctccgctgccatgagatgccgacagcctgtgcgctggccgccaccccctgctccatcaggtgctggaatctgagtaaaagcctgggcgcgagctcccagccccggggcctgccaccggctccacgaagcgggcagctccagcggccgccgggagaaggaagggcgaccgggggagacgggtcgcagggacagcacgtggcggaaagttagccccggactagcacgccccacccggagaagccggcctggaaggggctgcggaccaccaggcggagcggtgggcgaccgaagtgcggctgggctggcctcctcgtctccgcactggaagaattgcccttccgcaagtcttcccttcccacatgggggccctccaggccgcacctcggtcgcccaccgcttcccttgagaagggagactaaagacaggcatctggaagctgtcactgtggcgcgcgggcagacaggggatcccattggagaggaagagccgtagtagtcgctgctgccttcggccgacccaacggccgcctgcttgggaggaagaaaaagaacgcccccgctgaagaattaaggcagccattggttgctctaggggtaaggaccgaggcctcccctgggtgtcactggagcagccacacgtgggggatcagccgacttcattcgatcgctggcgacagacccggcgacccgtaggaatgcgcgctggggctgcggctggagggcgtggcgacggcaacaggcgggtggctcgagtgggtgcgactctgggcgcgtgggactgagaactcctccgccgtggggaagatttttttcccagcagatgttggggtgttactgcgtgtctgaggggccggcggaatggaggggtcccggtgcgtgcagggcagcgaggtgtgtcagatgagctgtggatccctgcggccccacgtgggccggagaggggggcccacgacaacaagcgattgaggacagcgatggacagggcggggaaccagctgggtggaagcaca

SEQ ID NO: 2309 - DNA, 6000 bp, Homo sapiens
atagagagttttactttttcctctcaaatgtagatgcattttacaatgttttaatgaacatttttacatattgtgttgcagaaggagttcaggatcagtcagttcaggacagtcagttaaaccatccaaaattaaagtggcaatagctaacttatcacctgttttgtgtgtgtgcttttgtttgttgttgttgttgttgttctgtgactcagtcttgctctattgcccaggctggagtgcagcggtgcgatctcggctcactgtaacctctgcctccccggttcaagtgattctcaagcttcagcctcccaagtagctgggattacaggcgcccaccatcacgcccggctaacttttgtatttttagtagagatggggtttcaccatgttggccaggctggtctcgaacttctgacctcaagtgatccacccaccttggcctcccaaagtgctgggattacagccatgagacactgtgcccagcctcctgtttttcttgtatccctttataattaatcatttttatggtagtcaagagtgatctggtctttgggttctttgactgtaaaccacagaaacaaatcctagataacttaagccagaaaataaaaaaataaattgtagaccccataaactgtaacaatttgccaaaaagtaaaaaataatttatggcctgcataaactgtaacaatttgtattgtctttgtgtctcttgattcaaaattcaaatgtaacagcatctaattggccaagcttagatcacatactttcttaagaatgtatgtactgtggtgatgaaaggaagggtgtgatggaacgtctcttcaggagcctcttattgaaaataaattaaattaatttttttggacgtgagatcttgctatgttgcccaggttggagtacggtggctgttcacaggctcaatcataacgcactacagccttaaactcctggctttaagtgatcttcctgcctcagcctcttgagtagctgggactacaccatgctaccacagccagcgaggaacctctttttttggttttgttttgagatggagtctggctgtgtcagccaggctgaagtgtactggtgcgatctcggctcactgcaacctccaccttgtgagttcaagctattctcctgcctcagcctcccgagtagttgggattacaggcatgcaccagcacatcccactaatttttgtatttttagtagaggtggggtttcgccatgttggccaggctggtctcgaactcttgacctcaggtgatctgcccgccttggcctcccaaagtgctgggattacaaggcatgaaccagtacgcctggcccagaacctcttttttaagaggcatttactttttaccaagttgaaacattcattggaaaagctctccaaataaattggggttcaattaaaaagggaatagaccctaaattactaacaatgccaaatattcactatagctgttttctaaaatgcaaattttctttgcttaaagacctccttgactcttcattaccttagtatggcaataaaaattattcatttcctagtctttaccctcatctccaactcaaaatttattgaatataccagaccatgtgacagaagctaatagacaaaaaagcactcttaccttgagacattcatagtctagtgacagaagcgtgatagtacgaccacttcttgattgcttaatatgtctaaagcagagtttactggcaataatagctggggtggccataagtccttgtttttcctattgtcctgacatcattactatcagcacaaacccccttttcccagcctcaaaagtttctcagtttggacagaaattataggtcattctaataataataatacagtattttctcagttaactctcaaaacaattctgtgaaggaatgagatgttcattcctactggataatgtgagtagagttttataaaaagactatctgcaaaggtatgtgcaaaatgaagggaaaccataggggtttactctgggtcaccctagggagggatactggctgcttcctttggttgagggaggcaaccagcctgcaatggtgccatagtaagggagccaggggggaataaataaccatactccttcctctttgttccatcgctgttgcttcctagtgccttcactcaactggaagctagagggaaagaaagtctcttgagttaaggctccaaaggacagacagcaggttggagagtggatctggctaacagaacacgtcctcccccaggactcactgttactaccctattttacaatagaaaaaaaaaaaatgagatgaaagtttaacttatttgatataacaaagctcataagtgatcatctgtagctgaagtgccaggttctccccactctgccactctctcgctaaggctccaacattctagcaatgccaggatacccaccctccccatagcatcttcacatcccaaatgagatgttggaatatgtaacgttaagttttgctgattagaataaactaacctacccaccaaggtagggcattcacattcttacaatctaagcagatgagtttacagcatatacattcacaaaataaataagtaaaaaaaaaaaatttgataaacaaattctacagtctgttctggtcaagataacacagttcctttgcaactgcccttacatccggttggtggtgtgtggagccctcttttcccaggccttacatgaggcctctggtccatgggcagtgctgctgctgtctgatcctccttatggagaaaggacaaaatgtccatgtaccagagctgcagaagaaagtatttgtcttccccctccctttgcacagcacccatctgtgtgtaatcttattattatatattttttgagacagggtctcactgcgtcacccagactggagtgtagtggcgcgatctcggctcactgcaacctccgcctccagagttcaagcgactctcccacctcagcctctatagtagctgggactacaggcaagcgccaccatgcctggctaatttttgcatttttttagagccaaggtttcaccatgttggcccacctcagcctcccaaggtgctgggattacaggcgtgagccaccgcgcccggcccatttatgtgtaatcttaattcaacacttattgagcgcctactgtatgtttggcataaaatggtggtccctaatttcaaaagatttggagtctagagggcagaaattgaagaggttggtgctctgcacgtctgagtccgcccacagactgaataaataagctctgcgtcggcgcccctcacctttctttcatggccagacttttctctggcggttccacagctgtcctgacagtggaattcagacggggtgaccaagcccctagcccacctaccagcgaaatccagcatcagttccagggcagccggacccgcgcccggggacgactgacccttagcccaaggctgcgggggcgtcggagtcctgaagcgcaggcgaggcagggccagcgggacagggagactcaaggccccaggggatctgggcgtttgaagactcaggtcagactctgaggcgcccgtctaaagagaccggttgtcttttccctaattcaggaggccaggctgtcccttggggcgtcgtaccgagggcagatcacagcccttccctcctcaccacactccctgtgcttccacccagctggttccccgccctgtccatcgctgtcctcaatcgcttgttgtcgtgggcccccctctccggcccacgtggggccgcagggatccacagctcatctgacacacctcgctgccctgcacgcaccgggacccctccattccgccggcccctcagacacgcagtaacaccccaacatctgctgggaaaaaaatcttccccacggcggaggagttctcagtcccacgcgcccagagtcgcacccactcgagccacccgcctgttgccgtcgccacgccctccagccgcagccccagcgcgcattcctacgggtcgccgggtctgtcgccagcgatcgaatgaagtcggctgatcccccacgtgtggctgctccagtgacacccaggggaggcctcggtccttacccctagagcaaccaatggctgccttaattcttcagcgggggcgttctttttcttcctcccaagcaggcggccgttgggtcggccgaaggcagcagcgactactacggctcttcctctccaatgggatcccctgtctgcccgcgcgccacagtgacagcttccagatgcctgtctttagtctcccttctcaagggaagcggtgggcgaccgaggtgcggcctggagggcccccatgtgggaagggaagacttgcggaagggcaattcttccagtgcggagacgaggaggccagcccagccgcacttcggtcgcccaccgctccgcctggtggtccgcagccccttccaggccggcttctccgggtggggcgtgctagtccggggctaactttccgccacgtgctgtccctgcgacccgtctcccccggtcgcccttccttctcccggcggccgctggagctgcccgcttcgtggagccggtggcaggccccggggctgggagctcgcgcccaggcttttactcagattccagcacctgatggagcagggggtggcggccagcgcacaggctgtcggcatctcatggcagcggagacggtcgtttggggacggaggggcgagccccgcggccggggccagtggagctgggctcggagcccgcccaccatcctcccgcccaccaccgcggccgggcgcgcaggctcacaccccttcctggggaagcgaatggtcccttccaggcgggtggccatgttgctctaataaagcgggaggggcggcggcgtggggggagcagatgccgctggctgccagcgggacgccggcgagcagagcgcagccgcgagggaggcgcgagggaggcgagccggagcccgagcactagcagcagccggagtcggcgtaaagcacccgggcgcagccggagccggtgccgcagctgcgatggccgtggccgtggggagaccgtctgtgagtgctggggcctcgcctgctgctcctcgggcgccgggtggtctctgctctggggcgggtgcggtgaggaccacaggggagccgggcgggtgctcggccccgcggcggcggcgacggctgtgggtgtgtgcacgaatttgggcgcgcgtctggggtcggggttaggagcccaggggctcagttacgtgatgcaacagtggatcgcctcgtcgcgcccctcttctgggaatgcgaaagaaaaaggacccctctcctgttccctttaaaataattctttgaggcgcggcgtgtctcagccgcctccctctgcccgcgcacctcttccctcgtgacagccagaagggcgccgggttcggggctttcctccagtctcccccgcgccgagggggcgctcagggcatgggaattgcgagctgaagtgctgcgtgtggcactgctgtagaagcaggtcagaggggtgggatttccgtggtggcctccccagcgcattgtgagatcccggacaccctcgggcatccacccggctgagcgggccctgcccaggatgtggacaaagccccagataacacacacaaagttttctggaggctcccttgtggtgtgggtggaaggactgaaatgttctgcggctgaaaggccgggggcggcgggctgaggaggctgggacgcgaggaagaggaagggcgggcgggtgcgtgaagaatcgagtgccccacggcgggagggaggagagtaggagggaggagatacctttgccccgagtgtgtgggccaaggcgccgcgcctactgggttgcaagactcggtccgcgccccggggccgggccggaggggagcgggactccgagggtgcggttcagtggccgctccgcatccccaagtgaaaggcggaggaaggggcggcggcggcctttccttttttttgaaa

SEQ ID NO: 2310 - DNA, 6000 bp, Homo sapiens
gcaatctggggcccagcaaaccaagaaagacaaggataagaaaaagtaagcaggtgtcacccccctgtatcggggacctctaacaatttattcctcttgcatgtctctacttttcccatttacagactggaaactggtcctttaccagaaagataaaagcaagtattttctctacagtgcagggaagatgatgaaggtttttaaatttttttaaaaggtacacaaagattaatttataaaactttaccacaattgaccaagcaatcaggcctggaggaacctgttgtctccagtagcatcttccacaccaacactaggagtctcaaagaagacaggttgatgtctcttcagcaccctctgaagacaattctcatgactcttgatagagagcatcctaaaatcacaattgttaaaattattttcctattctgtgttgtaagacttcgtaagccagtcactgaaattctcgttcccaaaatgaaacatttggaagagctgctagtggccactagtttcctcaaaattcaatatgatgaattgttttattgtgaaatgggatccaaatgcctatccagttgacacctctgccaacctcaagccaaacctaaacccattcataaaaggttttttttaaatagggtcttaatgtcatgtgccaaagggtcagattctgctcttgagttggtcacttcctgtgatactccagtagcagctgcctgaaaccagtgggagatttaggcctcccttgacattctcctgtgatttgaagctctcctttgaatcatcataaagcctagttttatgtcaatgctatcggttttgacaggaagcacgatggtaagaataccactaacgaaaacctttgtggtgtctcaatgacaaatatgcagatgccaccctcctttgtctaatgtacggtgctttagggcagctatttaatataaagcaactcagaacttgtttcaggaagtgttgctctttcgccttacatgccaaggttctagggaaaaagctgaccatatgtaaaaacattgatgctcaagcacataaagaattacattctttaaacatagagtacataggatcaagtctctgcacaataattgagatgtgttatagggaaaagtgagcacagtgctattgtccacttagtcttggtgaatgtgcagtaggctcacccctaaggaatctcatgttgcctgcagtaaaaataaaaatggactgctacaatgacatactgagagagttttaaatcatgctttacaaactgacattctgagctctgagacagcagaaaatgtatcaccagagcaagggaggaggcaaatgttctgaacaataattgaaatggttgtgattttatttggagttggcacagatccaagtgaccaaaggagttcaaggcccaaaatttagttatgctggattaattctgagagtaacaagcacatagattataatctaagaaaaccctttgtagctatgcatgtcgggagagcatctaacactaatggtgatgtttcccatgcagagactcagattacagtgactcttccagtgaagacagatgaaagccattgggcattgtacctttgttaatccaagctaaactaaccaaggatataggggtgtgtatgtgtctgtgtgtgtgtgtttgtgtgtgtgtacacatacatctataggtatgaatgagacaaaaagctgctgacttacagcttaggaaatgcaaagtcaagtttttcttttcaccctgaggcactcagtgcataaaggttcaagttttaaaactaagaatgtttccaaaagaccagcaatgttaaaagagtatttcgtgtatactagacgtgcctttaagcaataaaaattccaagagctgatcattattgtgcttccattttagaaaagtttatttagtaacaaacttcccagtgtagggaggtttttccttgcccttttgaacatgttaggttattttcttcctatcctggggccttaccaatgtgtaatgctttcaaagtttctatgaagcctgtgtggattctattttagcttatttatatattctcatttattttgaaggatattatacttaatttggttcagagtagtcgccaggttttgcacctgacaatggcacatattttttgtataactttttctaggtccttacccttttccacactttacatttgtacagtgaaagcaactgccagtggaggcctgaaatgtccaagaaaaaaaaaaatcacacctcttactgccagtggtagtggagtgttttggttagagggaccgcagaaagacagtggccaggctagacagagcagcactttgaaaagagctgggaagatgcctcctagcatagctggaacagatgtgggagttgccattcaggaactgactttgttataggtagaaaatgaaaaggcagatgcttacttatttacctgctatgcttccacctccaagcctaacttagtttttctaatagttttaaattctcttttttctgttctaatgacacgctccttttttaatgtaggtaaggctttatacttctccttgacctgtagtggcatgagagtgtataacatttcctaagatgacaggcaaagtagaactaaccctggcactgccattagctggaccccaccttctgccatctctggccacgaagtcactttccttgtttgcggctataccacagtggtgggactgcccaggggtaagttggtcagtggacagtgttcctcttttctgaaaactgtctgcacaattgccagcaggcatttgctggttaagatgcaaacagttttaaaattcgtcattttaaaaccatacttggcatctaataactacagtttacccaaccatccactcatcttttaaaaaaaaatcattttgattcttgctaaggaataaggttgcatgttttgcagttgcctaaaattagacacgtggaccgtgggtttggcattactttgtacctaaaagagggggaaagctcctggcattgctgtagctgtaaccattccagtgattgtcctttttttccccctacccaactagattaatagcatgtcctccattcactatgtaatttcaatccctaaactgctttagaccttttcttcaagtcaattgtacaaaggcatttattgtatatttattctctgactccttcagcagctcagaagtggaaaatgaagctcctattcagtactaatgggacacccaaacctaatagataatggttttgtgttatttgagaaaacaaaagccaaacagtaaatcctcccactagacatgcagtggtttcaagaagtcacttgtgaattctaaattacatacaaatggaaactaaccatatgtctttaattcagtattaaattttgctttggcttgtcatgtagagtagccttctcaaatttttggttttaatttctgtcaattccataatcattgcatgagcattcaccatcactgaatgctggtgctgtcgctcctaattttcctttctttttaatttattattatttctaacttttttgttttgttttttaacttgcagtgcaagcttcacataaagcctggcaagccaaggatgttcccgcattcacctgcttttgcagtaatatcgtatctctgccatgtgtgttctttagttttattttattttattttatttttttacccttcctcaaacaccagtaactattattaactcgttttgctgaatgttgttgggtggtagaaaatgatagaacaagggaataaccgcgaatgctctgtgcagctggactctgtttccggaaagtaaatgatttgctttttatgcctgttctgaatggcagcacgaagcaggcctgttacttgtatgtcgctttggacagaggaaagtggggtaaaatgctacctgtacgtctgacatgaaaacttctcaccgcctcagcagctgaactaaaaacctgaatagccatgacaagagtttgcattttcttgatgattcatctccatgagtgcacaatccctgaactcactgtcttttctccacacttgtcctaagccaaggtagatttgtacgtagacagactggtgagcaagcattatattttatttttacccttgcatgacattttcattttaatcaataacattatttggcctgagcttgtgggtctgttcagactgtctcctctcatggtttgaaactgcatctgaatgcctgccttcaatcctggccaagttggagtagactggtatgagaaaactatgattagttcacatttactggtgcatccttgatcctctcacagatagaggtcttaaaggttggatcatgtaacattgcttagtagaagaatcttcttctaaggatgatgggctttctacagcctgcttaccactaacagtaaggaatctttcataaacacacctcagtttgttcccagtgggcttagagggaggacctgatgactgattccaggatacttgtacttctaataacatttttcatgaatcatgagaaaatttccacagatacttcccttagaaaatttgctataaactctgtatcattggtagcacaaatttgagcgaggccttgtcaattttaaggtggaaataggaaggaccacaacatgacccgtaagtcaagaaggtagacatttcatatccagcttccttgcttagtctcctttcagtatttggcaataaaagaaagaagaaatagaacagctgaagtctcaaatcattgtctggaattttcctcaccttggctagctccacctgctctttgtctaaggcccttgcctcatcagggattagaactggcccatatgccagaacctgtactaaatgcctaatttgtatggaagagtgcatatttaatctcttttctatactgctcctttctgatgcttatcctttcatctgtgtgattgttttttcccctctactaacaagatcctcccagctttctctctacatgtagaaaggataacatttctcatgaacccactgcccctctgcattttcctcactggttagagattaagtaaataggatagaatatgctgcgtctcccctgacacacactttcttttttgaatgagcaagtctccattttgatttcagcaaagattttttctccttttctttgtcctcaaccatacttagaggaaagaaggaatggtcttccatgaactgattatgcttaattaagcaaagtaaggaaattagtttcatggaagcctaaacaaagctggaatagaaactacacactagacacagcagtagtcatagtcttcacaggtttaggagctactggaccaacattcttgtttttgcttttgtttttttaaataattctagtctggagctaactgtggagcagccaaatagtagctggcatgttgattcaaaccatgggctgaatttgctcataggctgtgcatcagacaaaagcttgaatatttgtgttgtatgcttgttccaaccaccgcttgtgtgagcatttttgtggcttgtacagaaagtacacttttaaattgtctcttgcatcactaaaatttttttaaaatgagcataacaacgaaaggcatccagctgactttttgattccaagattattgattggattgacttttttgcattaaatttttcccagcaaaataaatcatatggcgagtcagggaataaaaagtcaaaagaaacaaatagaagcttttttttttaaaaaatgtattgcttctgaacttttttctgccactgctccctagccctgtttagtttgttattgctgcttttcttttttctttctgtatctatgcctttttttcacagtagtccttggctctgcacggaataaatgataccctcaaatctaattggatgtgctttcgcctttgcatgtaagtacggtagtaagaaacctttgagatctttctgacttttcaaaattagagaaagcaaatgggatggatagattttttttttctt

SEQ ID NO: 2311 - DNA, 6000 bp, Homo sapiens
gctgaccatatgtaaaaacattgatgctcaagcacataaagaattacattctttaaacatagagtacataggatcaagtctctgcacaataattgagatgtgttatagggaaaagtgagcacagtgctattgtccacttagtcttggtgaatgtgcagtaggctcacccctaaggaatctcatgttgcctgcagtaaaaataaaaatggactgctacaatgacatactgagagagttttaaatcatgctttacaaactgacattctgagctctgagacagcagaaaatgtatcaccagagcaagggaggaggcaaatgttctgaacaataattgaaatggttgtgattttatttggagttggcacagatccaagtgaccaaaggagttcaaggcccaaaatttagttatgctggattaattctgagagtaacaagcacatagattataatctaagaaaaccctttgtagctatgcatgtcgggagagcatctaacactaatggtgatgtttcccatgcagagactcagattacagtgactcttccagtgaagacagatgaaagccattgggcattgtacctttgttaatccaagctaaactaaccaaggatataggggtgtgtatgtgtctgtgtgtgtgtgtttgtgtgtgtgtacacatacatctataggtatgaatgagacaaaaagctgctgacttacagcttaggaaatgcaaagtcaagtttttcttttcaccctgaggcactcagtgcataaaggttcaagttttaaaactaagaatgtttccaaaagaccagcaatgttaaaagagtatttcgtgtatactagacgtgcctttaagcaataaaaattccaagagctgatcattattgtgcttccattttagaaaagtttatttagtaacaaacttcccagtgtagggaggtttttccttgcccttttgaacatgttaggttattttcttcctatcctggggccttaccaatgtgtaatgctttcaaagtttctatgaagcctgtgtggattctattttagcttatttatatattctcatttattttgaaggatattatacttaatttggttcagagtagtcgccaggttttgcacctgacaatggcacatattttttgtataactttttctaggtccttacccttttccacactttacatttgtacagtgaaagcaactgccagtggaggcctgaaatgtccaagaaaaaaaaaaatcacacctcttactgccagtggtagtggagtgttttggttagagggaccgcagaaagacagtggccaggctagacagagcagcactttgaaaagagctgggaagatgcctcctagcatagctggaacagatgtgggagttgccattcaggaactgactttgttataggtagaaaatgaaaaggcagatgcttacttatttacctgctatgcttccacctccaagcctaacttagtttttctaatagttttaaattctcttttttctgttctaatgacacgctccttttttaatgtaggtaaggctttatacttctccttgacctgtagtggcatgagagtgtataacatttcctaagatgacaggcaaagtagaactaaccctggcactgccattagctggaccccaccttctgccatctctggccacgaagtcactttccttgtttgcggctataccacagtggtgggactgcccaggggtaagttggtcagtggacagtgttcctcttttctgaaaactgtctgcacaattgccagcaggcatttgctggttaagatgcaaacagttttaaaattcgtcattttaaaaccatacttggcatctaataactacagtttacccaaccatccactcatcttttaaaaaaaaatcattttgattcttgctaaggaataaggttgcatgttttgcagttgcctaaaattagacacgtggaccgtgggtttggcattactttgtacctaaaagagggggaaagctcctggcattgctgtagctgtaaccattccagtgattgtcctttttttccccctacccaactagattaatagcatgtcctccattcactatgtaatttcaatccctaaactgctttagaccttttcttcaagtcaattgtacaaaggcatttattgtatatttattctctgactccttcagcagctcagaagtggaaaatgaagctcctattcagtactaatgggacacccaaacctaatagataatggttttgtgttatttgagaaaacaaaagccaaacagtaaatcctcccactagacatgcagtggtttcaagaagtcacttgtgaattctaaattacatacaaatggaaactaaccatatgtctttaattcagtattaaattttgctttggcttgtcatgtagagtagccttctcaaatttttggttttaatttctgtcaattccataatcattgcatgagcattcaccatcactgaatgctggtgctgtcgctcctaattttcctttctttttaatttattattatttctaacttttttgttttgttttttaacttgcagtgcaagcttcacataaagcctggcaagccaaggatgttcccgcattcacctgcttttgcagtaatatcgtatctctgccatgtgtgttctttagttttattttattttattttatttttttacccttcctcaaacaccagtaactattattaactcgttttgctgaatgttgttgggtggtagaaaatgatagaacaagggaataaccgcgaatgctctgtgcagctggactctgtttccggaaagtaaatgatttgctttttatgcctgttctgaatggcagcacgaagcaggcctgttacttgtatgtcgctttggacagaggaaagtggggtaaaatgctacctgtacgtctgacatgaaaacttctcaccgcctcagcagctgaactaaaaacctgaatagccatgacaagagtttgcattttcttgatgattcatctccatgagtgcacaatccctgaactcactgtcttttctccacacttgtcctaagccaaggtagatttgtacgtagacagactggtgagcaagcattatattttatttttacccttgcatgacattttcattttaatcaataacattatttggcctgagcttgtgggtctgttcagactgtctcctctcatggtttgaaactgcatctgaatgcctgccttcaatcctggccaagttggagtagactggtatgagaaaactatgattagttcacatttactggtgcatccttgatcctctcacagatagaggtcttaaaggttggatcatgtaacattgcttagtagaagaatcttcttctaaggatgatgggctttctacagcctgcttaccactaacagtaaggaatctttcataaacacacctcagtttgttcccagtgggcttagagggaggacctgatgactgattccaggatacttgtacttctaataacatttttcatgaatcatgagaaaatttccacagatacttcccttagaaaatttgctataaactctgtatcattggtagcacaaatttgagcgaggccttgtcaattttaaggtggaaataggaaggaccacaacatgacccgtaagtcaagaaggtagacatttcatatccagcttccttgcttagtctcctttcagtatttggcaataaaagaaagaagaaatagaacagctgaagtctcaaatcattgtctggaattttcctcaccttggctagctccacctgctctttgtctaaggcccttgcctcatcagggattagaactggcccatatgccagaacctgtactaaatgcctaatttgtatggaagagtgcatatttaatctcttttctatactgctcctttctgatgcttatcctttcatctgtgtgattgttttttcccctctactaacaagatcctcccagctttctctctacatgtagaaaggataacatttctcatgaacccactgcccctctgcattttcctcactggttagagattaagtaaataggatagaatatgctgcgtctcccctgacacacactttcttttttgaatgagcaagtctccattttgatttcagcaaagattttttctccttttctttgtcctcaaccatacttagaggaaagaaggaatggtcttccatgaactgattatgcttaattaagcaaagtaaggaaattagtttcatggaagcctaaacaaagctggaatagaaactacacactagacacagcagtagtcatagtcttcacaggtttaggagctactggaccaacattcttgtttttgcttttgtttttttaaataattctagtctggagctaactgtggagcagccaaatagtagctggcatgttgattcaaaccatgggctgaatttgctcataggctgtgcatcagacaaaagcttgaatatttgtgttgtatgcttgttccaaccaccgcttgtgtgagcatttttgtggcttgtacagaaagtacacttttaaattgtctcttgcatcactaaaatttttttaaaatgagcataacaacgaaaggcatccagctgactttttgattccaagattattgattggattgacttttttgcattaaatttttcccagcaaaataaatcatatggcgagtcagggaataaaaagtcaaaagaaacaaatagaagcttttttttttaaaaaatgtattgcttctgaacttttttctgccactgctccctagccctgtttagtttgttattgctgcttttcttttttctttctgtatctatgcctttttttcacagtagtccttggctctgcacggaataaatgataccctcaaatctaattggatgtgctttcgcctttgcatgtaagtacggtagtaagaaacctttgagatctttctgacttttcaaaattagagaaagcaaatgggatggatagattttttttttcttttcaaggggggcaggaaggtaatggtttgagtagcctttgtttaaaaaaaagactaaatatatttaaaaggccacatttatatttttttcacaagaaccacataataaattccacttcttgacctgaatttggaaatccgaaattactaatccaggccaggtgtggtggctcatgcctgtaatcccagcactttgagaggccgaggtgggcagatcacttgaggcctggagttcaagaccaccttggcgaacacggtgaaaccccgtctctacaaaaaatacaaaaattagccaggcgtggtggcacgtgcctgtagtcccagctacttgggaggctaagtcaggagaattgcttgaacttgggagatggaggttgcagtgagccaagattgcaccactgcattccaacctgggtgatgaagtgagactctccaaaaaaaaaaaagaaattattaatccctgcctgtgctctacatagcctcatgggcatcattggatagctcagagggcccttgattctggcaaggcaaataaagccagaatgagaaattaccatcttctactagagaaaaccaagagaaaaatttttatgctaggatgcctttatgaccacttaattttttaatcttagtttaatggtctctccctggtgctaactgctgacagtggccacctcttttttggggattgaggggcctacataactagctggccttaccccatatcttttgttcaaacataataccatctttttgcttcttctgaactttagatctccataacacatgtactgtagaatgtgatggaaaagcattgatgagaatttattggcagttcagattgtgttttcccaacttaggctctttattaattggttaaggttttctccaaaaagggcatttcaacaatgggaattatttaatgtaacagtgggcacagattacttatcttccttctctgctttgtgactcaccagcagtaacacacacaatccacatcttgtgcacctca

SEQ ID NO: 2312 - DNA, 6000 bp, Homo sapiens
ctgagcccccactttgagacaaagtatggtgagtgttcccaggtttgaaaggcaatcttccttttgtccctgttaacctcccactacacccccttaagctcttgcgccacctgttggtcaccattctgggatggctaaacctctttctctccttagccttataaactcaggctgttaactctacctagattagtgtggtggtctttgtagttcctagctgggcagtagtcaaagtacatgttctagtttaaaactagagtaggtgcagccataaaacagaacaaaatcatgtcctttgcagcaacatggatgcagctggaggccattatcctgagtgaattaacgcaggaacagaaaaccaaataccacacgttctcacaagtgggagctaaacgttgggtacacgcggacataaagatggcaacagtagaaactggggactactagaagggggagggagggaggggagcaagggttgaaaaactgttgggtactgtgctcactacctggttgacaggatcacttgtactccaaacctcagcatcatgcaatatatatctagttaataaacctgcacatgtaccatctaaaagtaaaaagaagcaaatttaaaaaaaaaaaaacaaaaaaacagacccctccccaccagtctcctggttctttttgaaggtggctgtggtcagactattccagcaggttcctcagtgcttcatgctgttcatcaaacctggatccatctggacctaccatttatgtcatttattgttataaaaaataatacatattctcttgacaccttataattagagttcatttaagtcctttttatcaactccattagagtacttgtctggtgtcgagagttttggtagttccagtatatgtgcttgttttgtttcttccactggatctcaagaaggaacaaattattttggtgtcttatagaacaaattcagattgtactagattagaaggaatttattttgatgttattttggagaaaagacttacttgggacttgggtggaagtggagttcatatggatggttttgttttgaataatttctaaggtcttttagctctatcatttcttgtcagtctcccaccgctaaaatataactctatttacttcgttttttcacacagaaagattatagtgacatagtcttcctcttacttaaatacatgtctttttaggattctgccatagtattgattctgccatggcatttattatgcccagtgaccaaggcattagaatatttgtggtacctttacctttttaggccaataaatatcattcatttgctaaagaacatttcattaaacgaggtacagttggctctccatatccatgggtttggcatctggattcaaccaaccgtgaattgaaaatattcaggaagaaatttcacagagttccaaaaaaacctggaatttgtggcatgctgagtactacattgaatctacacagatgaagtgatgtgtaggcattctgttaggtattataagtaatctagggatgatttaaagtatacaggacaatgcgagtgggttatatgcaaatactacattattttatataagagacttgagcatgttgggttttgttatcttttgggggatcctagaactaatcccccatggatactgtgggatgactgtacttattttttagaaataatttctacactatagccccttttttactcccagtttctttcatttttttttttttaggcttcctaaaatattggcagaagctccatcctttctctgtgctttgttccaatgtttttagcatgtttcagcttgttctacatccctgggatatataataagacctagcctaaatgtaagcttgatagttcagggactatcttaagtgttatgttaactttttttcttttaagggagggagaacaaattctaatactagttaatagtgtcttacccacagtgtgttatctaatgcctttcaaactaggggaaaaaaatcagtgaacattatggtagatgctaaaatctgccattttcttgtatatttctgacagtttcagttactttgcatttgtattatacaatgactaacatcagccttttaccattctttcctctggtatttttcagtaacaaatagtgaatgtatttagagataaaaataattttgtgaccaaatgtgttcttgtagagtgcgttattttcccctattttctctgtggtattgcaaacagtcatggtgagtgctgcaggttatatgaggataagtaagacttggtacagaaatgtccagaatactcaaaactggaaaaaagtgatccctgatagttaaatggtcaagataggcttcctgaaggtgatggtgtttagccagtcctggaaggaatgcgcaatacaatttcaacaggtagaaataagatgattaagggtaaaataagaaaggggaagattagtgcatcatatagagcaggactgttgagcaagagtgtagaccacaagttgagggtatgctaggaaataaggctagaaaagaaggttgagatcagattatggagattcttattaatactaaactaagcagtttagcttatttctggtaggcattggggtgccgctggagagagcagggaaggaatatatgatgctaactaaggttattttgacaatgctgtaattgaaagtgaggaagagagacactttactacaggtaataatttaaaggccttccatgtacagtcattgtgccagaaacttagggataaaaagatgaatataatacaatgccacacctttggtcttgtagtctataatggaaaggctaaatggttaaatagattattatactgaaatgtggtaaatacgttgaaaggttttagtgtcttttttttttttttttaagacagagtcttgctctgtctgttggcctggctggaatgcagtggtttgatctcacctcactgcaacctccacctcctgggctcaagctattctcatgcctcagcctcctgagtagctgggattacaggcatctgccaccatgtcctgctaatgttttgtatttttagtagagaaggggtttcgccatgttggccaggctggtctgaacttctggcttcaagcgatccacctgccttggcctcccaaagtgctaggattacaggcatgagccaccacgcctggccataaatatgttaaaaggttgatatagaaacagatgaccgtggcatttagagttttggggtgttgagggagtcaggggtaactccagaaaggattgatatctgtgaattgtcctgaagggtaagaaggaatcagcaaaactcccaaattaaaaactttaccaaaaacatttcatcttagtgctaagtctactattttctacaaaatacatatttctaaatttttcatttactattttaaaattcttagcttccctcctcatccctgattaaaaaaaattttttttttgccctttggcttcttacatttttaatgaatgtgtttatgagtactttggactccactgaaaaaaattagaagaggccaagagagtaggatgaagggccttccagacagggggaatagactgaaaaaaaaaaaaaaaaaaaaaaaaaacagacgttggatacaaaaaagtagtttctgttctcatgtaaatgttcagcatacattgcaaatacaaaactcaagttccaaagataattatattagaaatacagatttggacctaatttctaagatgatgttgatggatgggtagctggataaataaatgagttggaggtagatgtggggagagaaaagactcagcggggacggaaagcacagggaggaaaaatggccaccagagataacagagcagcctatgttaattaatgatcaactgtgtgtggctttttttttttcctggcccagatggatagctcccagttgatccattgtcgggagcttgtggcacatcacctttctactctgcagtcttccctgcctctgaattccgtttatgtctaccgtcccctcaagcacaccctggtgacctgtgacaaaggagtgttcagattacatccctcctctgtcccaggcccagacttctccaaggacaacagcaagccagaagtgccagtcagaggtacagcagccttttaccatcatctcccagctgccagtgggtgcaagcagacctctactaaacgcaaagtagaggaaatggaagtggatgacttctatgatggaatcaaacggctctataatgaagataatgtctcagaaaatgtgggttctgtgtgtggcactgatttatcaagacaagagggacatgcttccccttgtccacctttgcagcctgtttctgtcatgtagtttcaacaagtgctacctttgagtgtaaactaaggtagactactttgggaatgagaacatgcaaaatcaggaaaggctgtagaaggaaatataccttaacaggctgatttggagtgagccagaaaaaaaaaataaaactctcattatttgtgtggctaattataattcagcgttatttaagcacataaagaccaaaaaaaaaaaaaagaaatccaaaagatccaaactttttttaaacttaaaaaatctctttgtagtatgtcagttgcactttttttctgccataatgtaacgtagcttgccccgtcaaaaattcaattaaaattcatggccagcaatcctgttccccctcagcatcctgatttaattttcctgttgcttttgcttgcttctccatttaatagttactgaactttatgcatgttgatctatattgattttcactgcagttgaatgaacaaattatttcagtgtgacagccatgactcaagttccaattagtctgaaaagggtactttggaattgtcccatattaatcagagatggcaaaagaaaaagttctcatattaccaggttgattttgtgtctcatttcaaattttaatttaaaattatggttttcatttttgtttaccttaaagtgatgcttaaaagtggcatgtaattaggacacttaggtttgttgaaagcattttcgacatttgtataaaagaatttgtgataaatatatccaggtgctcaccaaagaaacatgtattaacaacttaaattagatttttctaactgatagttttcactcatttataatcagtaggagagactgtctagatgttggggcagctctatgatttaagtctgtaacatgttataactgaatttagtaccctagttttgttaagctattaggattttctaatagaacttactccccctgcctccccagccttatgtttcttttaatgacttctggatcctgagctccctttgcagtctgaaaaaggtattgcagtcagaactgtgtactgatgataaaagcctctggtagcaataaaaagttgtccttaacttttgtttttgtgacttttttctggttgtgaagaggtacaggttcctgattggctaggcactgctatttcaactagagaaaacaatagaaagaccaagaatacacttactgaaaataaaacatgaagaggatctgaatgtgatcgagggatataggttttagacataagaatttttctttcgtgatattttttcactggtgcactgtgaatcctccaaatagtaaatttacatcttaatgtgactgcttgtgagagtaggctcagacccctatctttaaaatgtcatttttagccattttgtaatgttcagatttagcagaacaagagtattttcaggtcatcatctgatttgtaaaaaattcttgtggtagggttgacttacctgttttatgaccttaaaatccaattaaatgggaagcatttactcacatgtcagtaaagggagtgggagggaagatagcaaaggattggcttcacagatagacattttaaaaatttctcatcctgatcttcatctgtttaattcatctgaattgtaggagctctaagaagtttacaactgcatatgttcatag

SEQ ID NO: 2313 - DNA, 6000 bp, Homo sapiens
acacctgtaatcccaacactttgggaggccgaggtgggaggattacttgagcctgggagttgaagaccagcctgggtaacatagtgagacctcgtctctacaaaaaagtaaaattaggccgggcgcagtggctcacgtctgtaatcccagcactttgggaggctgagatgggtagatcacttgaggtcagggatttgagaccagcctggccaacatggcgaaaccccatctctactaaaaatacaaaaattagccaggcgtgatggcacaagcctgtaatcccagctacttgggaggctgaggcagggagaattgcttgaacctaggaggcggaggctgcagtgaactgagattgaaccactgcactccagcctgggtgacagagcgagactccatctcaaaaaaaaaaaaaaaattagccgggcctggtggcacgtacctctggtcctagctacttcaggatgctgaggtgggaggatcacttggggctgggaggtcgaggctgcagtgtgccatggttgtgccactgtactccagcctgggtgacagagcaagaccctgtctcaaaaagtatatggaatattaaagttcaaagatattgtcatgatttctttcatgactaattgttaacagtgtttaaaataacttcatagataatgttttgtaaatttgtttttctgacattattagagaattgggtagtttagaggtgggaaaggagaactaatatttgagtacgtttgcattccatatatatgctttacattagttatgtcatttagttataactatatgataatctccatataactgtattctctttttttgtatgttacctttgtgattcttcttacaattgtatgtttctgttattgtttaatgccaaacaccaaatagtgacattatttaatgtaatctgtcattcagggatttttttttttctcccataccccacattgtatctctaactgaaggttagagttaatggtgttcttgttttcatagctactgtaagtcatcgttcctttcatctccctaaaagccttcccagtttcatcagattataacatcacctacctctcctgggaatttatttccttgttgatgtgtttggctggcttagttaacattacttttccttatttgttgtggcattttggataaaagctcatcttgataggaatttaatttctcttgaatgcttaactcttcatccagaagtcttgtgattggctttacttggttctcagggatttttatggatccttagtccagaactagatcttaaagtagcctggatacagaattacagctagatatgaggaataacttctagtgttccataccattgtaggcttactatggttaacttaggaaatacaaatgaactatgataacagaatgatagcccatttaaaaaactgaaatcaatattaataagtgaaagttaccaggggcaacagatgaattatacatttagagatgatgaaaaaaaatattgaacaggaaatcaacctgaagtaaatgactattttgaaagctttccacaaacacaaaacattgttgttttaatcttcctacatattatttgagtattctccttacagctctttcaaactgtttgaaactacagtttgaaagagctgtaaggagaatactgaatgttcccaaaataaacaaccggttttatttttttaatggcgactccaaaactcaagagtaaaagttttctaatcactattactttaaagtgtgtccctgctaaaaattaagcttatactcaataggcttacaacaacaataaaacaataatgttttgtgtttgtggaaatttttcaaaatagtaatttacttcagattaatttcctgttcaatattttttcatcatctctaagtgtataattcatctgttgtccctggtatcttttacttattactattgattttagtttttcaaatgggctatcatttccattatcatagttcatttatatttcctaagataagttaatggctacttgctgcgggagaaattcactgtattttcttaatcttaagaggtggggtaacttaactccaaattactatcagttgataatagtgttacttaaactttaaaatgttatattctctgagcacctaaatttaattcaactatggatatttggtgagatgacatagtgaaaattttaataaagagtaggagaatattggatattgatattaaatgtgataatacataaagttttatttcatgtgtctcaagtctgatagattttgaataaccttaacatttttaaatatattttgtagtattacctaaccttttatgagagagaattctaaacatactcttgatgatagctcaaactttgtcttctgttttcaaaattgttcccttatagaatgtttctccatcccagagagatgaagtaattcaatggctggccaaactcaagtaccaattcaacctttacccagaaacatttgctctggctagcagtcttttggataggtttttagctaccgtaaaggtaagtgttttaagatagacttacatataacctcatttgagtgtatgtatgctaaactagaggctattagtgaacattctgtaaggtagaaagaagtggagaactttgctggagaatgatgtatgtacccataagaagacatggtgatgtcttctgctattgtttattttatttttattttttgatagttttgctctgttgccctggctggagtgtgtctgcctcctgggttcaagcaatttttgtgcctcagcctcccaagtagttgggactgcagacacgtgccaccatgccagtctaatttttgtatttttagtagagacagggttttgccgtgttggccaggctggtcttgaactcccgacgtcaagtcatcagcctgccttggcctcccaaagtgctgggattacaggcatgagccaccactcccggctttctactattgtttaaaaagcagaagtgtttttggaagtgtttctaatagtattctgtaattttctttttgttacaagtattcataactttttagcctatgaaattttttatctcttgattttagcacaaaccgtatagcatcagcagaatacttagtcattttctaacatattggtgtacagaggtggacaaggaatcagactagaataaagtataagcctattgcacgtttttctctgtcactacttattgaatatccatactgtgtggctttctgaaaaacaaagtgctttctacgggcttactttggtatataacaagatgtcataaagcaactttggtatatttttgttgaatgacagcatacaaataattaggttttatattgtccccattgccatgtcattggctgtgtcaagttagtaaataggccctcaacatatttaaagcagaaaatgagcatttatttaatggcaaggcatgaaaaagtagcatagtatttaaacttgtaggcattagtatgcaaaagaatatgtaaactgggggaactgtcaattaaatgctttattaggtatacagaatagaagccaaataattacggagtgtaagactgaatagctgctcaaacttctactcttaagacacttactaaacatgacaggacccaataaataagaaatatgaaaaaatgagatatttggcaaaattctctaattgttccacaaatttctccaactttgtttcaaatgtttaataaacacagcaagaaactcatgatagaaactacaacaatgtgttcactaataatttttgaaaaatgtactgtccaagaaaggacactaactttaaactcatctttctgtggaattatctgtgaaaagtaggttagatgtagtagagagggagggaggagtgatgtggacttgttgctgagataaaagtaggcatttttcagatatcccagattgcaagcaattagctttaaaaaatgtttacatacacaaaaaattttttaattttgggaatattatttattaaaaacttctaaatcaagctttttttctgctggatagaaatgaactttggttaattggctttggttgaactttgagcaatggaattgatattatttttgtagaatatcatatggctaggattgtaatgctaacagttagctctcaggccgggcacggtggctgacgcctgtaatcccagcactttgggaggccgaggcgggcagatcacgaggtcaggagatgagaccatcctggctaacacagtgaaacccccgtctctactaaaaatacaaaaaaaaattagctgggcgtggtggcgggcgttgtagtagcagctacttgggaggctgaggcaggagaatggcatgaacccaggaggcggagcttgcactgagctgacatcgtgccactgcactgcagcctgggcgacaggccaagactccgtctcaaaaaaaaaaaaaaaaaaaaagttagctctagacacacttgatcttgcaagtgtactttccttcctttcattactgctctaaagctttttaataaactttctttcctgttcttaaagttagctctgatctaaaaagtaatgagtggcagtcacattaattgaattccatagtattttgtgtatacctgtctcatctgcatatctaggtttttaaaacagttacaaaaagttaaattgtttttgaaaaatcactaaagttgctttttccctcttcaaaattttaggctcatccaaaatacttgagttgtattgcaatcagctgttttttcctagctgccaagactgttgaggaagatgaggtaataaatcctttcaagataatgtttcttccgtgaaaatttctctccacatttattaacttgcttcgtttgctaaaacaaaaatcataaatgagtttcttttctgtccttttctccctgtccctgttcccctttgctttggatagagaattccagtactaaaggtattggcaagagacagtttctgtggatgttcctcatctgaaattttgagaatggagagaattattctggataagttgaattgggatcttcacacagccacaccattggattttcttcatattgtaaatatacctgaagtcttttagtttcttatttgagtgtgtagttttcagtaaattaaaaaatagattgcctactcatttattttgtactggaaataggaaaaagaaaacttgatatccaaggaaaaattataaattagtatatatgtcatatcactgaagcttaattcgcagacttagaaattgaataggttaggctgggcgcggtggctcacgcctgtaatcccagcactttgagaggctgaggcaggcggatcacttgaggtcaggaatttgagaccagcctggccaacatggtgaaaccctgtctctactaaaaatacaaaaattagccgggcatggtggcaggcgcctgtaatcgcagctactcaggatgctgaggcaggcaggagaattgcttgaatccaggaggcggatgttgcagtgagttgagatcatgctactgcactccagcctgggcaacagagtgagactctgtctcaaaaaaaaaaaaaaaagaaattgaataggttgcatcaatttctatatgtaatttcccagatatttaaataaagttaaaatgatgttcttgtgattttcagttccatgccattgcagtgtcaactaggcctcagttacttttcagtttgcccaaattgagcccatctcaacatttggcagtccttaccaagcaactacttcactgtatggcctgcaaccaacttctgcaattcagaggatccatgcttgctctggccatggttagtctggaaatggagaaactcattcctgattggctttctcttacaattgaactgcttcagaaagcacaggtaggtgtcagtctaattaaatagtgttctttttaagtttttctattattggaatacatagagttaccaaactaaaagacatttctcatgttgtaatggcaaaccattc

SEQ ID NO: 2314 - DNA, 6000 bp, Homo sapiens
actcatctcaaagtattatctaatttcccctgtgactcttctttgaccagatacctttgttttaaaaaaagttattacaatataaatatttgaaagtcatactgagggctttaattataggcaattggagaacgggaatccattgaacctgatttacttctttttacatgattctactttatgtgtctctttctgtaccatctaaaccccctaaaaataatcttgaaacctagtgaaggaacttgagtcactagtgacagtcggttgttgggatagcttgtgaaggctggtggatccatttggttgtagctaatggcgtgaaagaattattaaagttttaaggtttttaataggagtttggaagaaaccttagaacctatgaagtctaatcttgacccaaatagctgtttcttctaaatatctcttgtcagatggtcatctggtttacattccatttcttttatataaagattttcactgtgttgcccaggctggtcgtgaactactgggctcctcctgccttggcctcccaaaacttcgatagctcctcctgccttggcctcccaaagtgttggaattacaggaatgagccacagcacctggcctacattccgtttctagtgttaatacttatgtctgcattagaagaaattatagtgagcttgcctaccaaattgttgaagatctgagaaaggcaccaaggcaacaaaattggaatctcagaacatctcagcagtatgcaacagggatagaatataacaggatgaccttttttcttttttataaagaatatttttaaagttgtgaacaaggatgtgtcaaaaaaaaaaaaaaaaaaagaaagtacccaaacctcgcacacaatgggttggggcaggtaggggtagaactggcttaacaaggaacctgagaaagtctcctaagagtttttgttgaccgtaaattatatctgaattgataccgaggtgtggtcttcaaaaaaaaaaaagctaatgagggccacgagtggtggctcatgccagtactcccagcactttgggaggccaaggcaggcagatcacttgaggtcaggagttcaagaccagcctggccaacatggtaaaacctgcctctactaaaaatacaaaaattagccatgtgtggtggtgtgtgcctgtaatcccagctactcaggaggctaagggaggagaatcacttgaacccaggaggtggaggttgcagtgagccgagatcgtgccactacactctagcctgggcaacagagtgagactcttgtctcaaaaaaaaaaaaaaaaagcccatgattttagactgtatttatggtaaaattaaagctaatttagaagaggcaaaatatcgtgaggagctatcgaagttttcagctatggaaaagatgaattggtgagcatgatagcacccttcaaagattggaaggattggtgtgaaagagattagattttggtaggttaaagttgtgaacaaggatgtatcaaaaaaaagaaggtaccaaaaccccacacacagtgggttggtacaggtgggggtagagtttttggttgtgtgtttttgtttggggcaccagtggttgaaactggaacaattggttgggtctctgttccgtcgaagtactgtgctgtggacacagtgagtaataaaaaaaatgaggacacttggacacaggaaggggaacatcacacaccggggcctgttgtggggtggggggaggggggagggatagcattaggagatatacctaatgtaaatgatgagttaatgggtgcagcacaccaacatgacacatgtatacatatgtaacaaacctgaactttgtgcacatgtaccctagaacttaaagtataataataaaaaaaatatatatatataaaaatgatattggcagatgtgactgcatagggatttctttatttggagacacggtctcattctgttgctggggctggagtgcagtggcatgattttggctcactgcaacctcagcctcccaagtagcttggaccacaggcacgtgccaccacgcctgcctaatttttgtatgttttatagagatggagtttcaccacattgcccaggctggcgtcgaactccttgactcaagcaatctgtcctcctcagccttcgaaagtgcaaggattacaggccggagccgctgcgcctggccaggaatttataacgtagttggggagttaacagaaagctgctttatgacatgattaaagaatcaagagtttttagaagaaattacctttgagataggtctttttggattaatattagttctttttcctctctatttaccccttgtcatcttagtatgaagatattttatgctaattatagaagatttgcaaaaactcaggcgtttaaagacacaaaaattaacaaaatcataattgagttaaccagaattagtctctagtaagttgagaagcaaataggtagcatatgtggagtggtacataggaaggaggatagtagctggagttgggatagaatgtggaaattaaagaagtggtttgctattttttgcttttccaaattttttatttttaaaaaaattggaactttttacatgttaattctggatatttaaaaaaattcttagagcccatgaatctgaagtgtgtaatacagatacatagtttacaggtacatagttgagaaagtcaaattgttagtgaaatttataatgaaaaacagcattctcctacgctaggcctttctcacccttttcttactctgcagaggttaactactcccaactctttcctccttgtcccgttatttagcatcacattttcaaacaacttgctctgctgctgttttttgacatttcagtttgagatatttatgaatttcctactatgaaatgtaaagacgtggcttttattttaccctcttccaatatccatagttatgtctccacatcctgccaatgtagttttatcatattgcgatccctatccagtcttttcattattattgctgtataaatattgtgatacattactttcttaaattcttttttctgaagttaattacctttttagttgcttacctttcaacaaatccagctaagccttttcacattcttttttgtttgtttgtttgtttgttttgagacggagtcttgctctgtcgccaggctggagtgcagtggtgcaatcttggctcattgcaccctctgtctcctgggttaaagcgattttcctgcctcaggcttccaagtaactgggattacaggtgcctgccaccatgcctggctaagttttgtatttttagtagagacgggggtctcaccatgttttgtcaggctggtctggaactactgacctcgtgatctgcccgcctccacctcccaaagtgctaggattacaggtgtgagccaccgtgcccagccaccttttcacattctttagcagtttcttaatccaattttctacacacagtcaaacctcaagtctgtagtttgcttctttttttttttttttttttttttttttttaaacctagaagcctgcacggtggctcacacctgtaaccccagtgctttgggaggccaagccaggaggactgcgtgaggctgggcaacatagcaaaactgcatctctacaaaaaaaaaaaaaaaccccacaaaattacctgggcttggtgatgtgcatctgtagtcccagctatttgggaggctgaggcaggaggatcacctgaacccaggagttcgaggctgcagtgagccactacaccactgtactctaacctgggcaacagagtgggactcttgtttccaaatacatataaacataaaacctagagacatttctcttggactctatgttgtcttgcactgctaaacttgctatttagacatgctgctcattttagagtgctagtcaatgtactgtggagctttctaggtgagcactgttcagtagaacttactgtattaataggaatgttccttttgtgcactgtccgatatagtatccactagccacatctggttattgaagtaaggctattgtgactgaagaaatacattttttttttttggtttgtttgtttttgagacggagtgtcaccctgttgcccaggctggagtgcaatggtgtgatctcagctcactgcaacctctgcctccctggttcaaacgattctcctgcttcagcctcccgagtagctgggattacaggcgcccaccaccatgcccagttaatttttgtattttcagtagtgatggggtttcaccatgttggccaggctggtctccaactcctgacctagtgatccacccgcctcggcctcccaaagtgatgggattacaggcgtgagccaccatgcctggccaatttttaaattttattcagctcatagttaaatatccacatgtgtagctaatggatactgaattggaagcgcaatttaagatgatttcatactggagggtatggtttcatactgaagaagtgggaatgggtaggatttaatgtaatatattttctttttaatgaaggaaaaatgttagtggtccttatctgattaggtttttaagaggaatgtttggaataactacttctaagaattcctggtaaaaaagccagtgacaaagttttgacaatttgaaacagtaataacatgttttgatcagagtccaaaggttccatcaattacatggccttgtttttattctctttataactgaatttcagatttcaagtgtgaatgttttagataactgattattttggtattttaatacgatattttaaagagctataaaatcctatactgcctcatagcattcttattttgttttatgagttgcttaattagtactttatataatgctacacttattctataactaattttaaaacttacttgattctgtaggtagctacagcaagctgggtagcaggcagatccaaaggatatcatgaagtttccagggcctttggaaaaccagagattgtctttcctgttggaaaaggcaatcactagggaagcacagatgtggaaagtgaatgtgcggaaaatgccttcaaatcaggtaatgatttttctcttaagacagatgaattttattagaaataaacatactactgccatacataataatatcttgacactacattggaggagtgtgtaccatttaaggatgtgctgtatttgagagactctccctgtttcttttttgtgtaacagggtctcactctgtcatccagtctggagtgctgtggcatgatctcagctcactgcaacccctgcctcccgggctcaagcaatcctctcacctcagcctcctgagtagctgggactacaggcgcatgctaccatgcctggctaattttttgtatttttggtagagatggggtttcaccatgttgcccagcctagtctggaagtcctgagctcaagcagtccaccagccttggcctcccaaagtggtaggattataggcgtgagccaccatgcccggcctcttcttttttaaaaactcctgctcctgctgtggccttttctttctgaaacaagagttaactgtttttgtttgttgacctgttttgttgttatctgagttacagctttgggaaaatagttaggtttgttttctttcatcataatctatactaacagtagtaaccttctttagatatatagtttatagttagccacagaggctgaacatcttcataccattgtctttagtcaactaaaaacctactctttcatcattagcggtaaggagttcatgtgaattactaaggtaataccaatgttggaagctttttagaagatagccagctggtctcttaactactgttagctgcatagtttttcttttagaaatttttatacttctgtcatatataattatttttcacaaataactgtgaactttatccactccaaaagtttattgtataagatgtcttatatgtcttttatccttaatatctaacatggtgcttggaaaatagaata

SEQ ID NO: 2315 - DNA, 6000 bp, Homo sapiens
ttggtaggcaagctcactataatttcttctaatgcagacataagtattaacactagaaacggaatgtaggccaggtgctgtggctcattcctgtaattccaacactttgggaggccaaggcaggaggagctatcgaagttttgggaggccaaggcaggaggagcccagtagttcacgaccagcctgggcaacacagtgaaaatctttatataaaagaaatggaatgtaaaccagatgaccatctgacaagagatatttagaagaaacagctatttgggtcaagattagacttcataggttctaaggtttcttccaaactcctattaaaaaccttaaaactttaataattctttcacgccattagctacaaccaaatggatccaccagccttcacaagctatcccaacaaccgactgtcactagtgactcaagttccttcactaggtttcaagattatttttagggggtttagatggtacagaaagagacacataaagtagaatcatgtaaaaagaagtaaatcaggttcaatggattcccgttctccaattgcctataattaaagccctcagtatgactttcaaatatttatattgtaataactttttttaaaacaaaggtatctggtcaaagaagagtcacaggggaaattagataatactttgagatgagtgaaaatgaagatataccaaaacttaccagatacaattaaagcagtgcttagaaataaattaatacctgaaaatgcctctactaaaaaaggatatctcaaatcaagagcctaatcttccaccttaaggtaatggaaaaagaagagtaaactgttcctaaagcaagacagaagcaaggaaatactaaatattagaatggaaattaatgaagtagagaatacaaaaacagcagtgaaaagtcaatgaaaccagaagctgattgtttgaaaagatcaaaatggacaaacctttagccagctagactgaccacgaaaatacagaggacaaattactaaaatcaagactaaaaagaagacactacctaccttacagaaataaaaagaattataaaggaatttatgaacaactgtgtgcaactaaattggcaattttagatgaaatggtccagttcccagaaatacaaaataccaaaacttaggaagtaaaaagctgcactggtgagatgattccaaaaaaacaaaaacagaaaaaaagaaagaaagaaaaaagctgagtatttgtaaaaccaaagatttaaacagttaatttttttaaagcactgccaaagaaaaatccatgcccagatggcttcactggttaattctaccaaccattttcagaaaaactaatagcaatctttacaaattcttcccaacttattcgttgaagccagttattaccctgctaccaaaaccagacagacatcactagaaaactacagattagtatttcttctgaatataaatgcaaaatttctcaacaaaatactagcaaactgaatccagcaatattaaaaaaaggattatataccataaccaagtgggatttgttccaggaatgcaagcttgttttaagattcagaaatcaacgcaatacattatcaatagtaaaaaaaagaatcactctttgctcactctagagaaagctaacaaagaaaaagtaaaacgaggtaaaatttccttaaacttttaaaaacaggacagaaggcagggcatggtggcacctgcttgtgatcccagaactttgtgaggcaggagaggagcacttgaggccaggagtttgagaccagcctggacaacagagcgagatccctgtctccaccaaaaaaaaaaaaaaaaaaaaaaaaatttaaactagccaggcatgatgtcacacacctgcctgtagtctcagctactcaggagactcaggtgggaggattacgtaagcccaggagcttgaggctgcagtcagctatgattacagcacctcactccagcctgggtaacaaagtgagacccaatctcttaaaaaaaaaaaaaaaaaaaaaaagaaaagaaacgaaactgcaatacctgaccctcaactagatcctgtactggaaggagacaaatggtgtaaaggtcattattgggtcaaatgagataattgggacggtagattacacaagtcaatgtatcaaatgctaaatttaccaaaattgaaaattttgctgtgattctgtaagagaatattactattcttgtgaaatatttagcagtatagggtcataatgtatgttccacataaaagaacaaaagacaagactagtaagacatactatgatacagaaagcatgggcttggcttttcttttactgacagtgcacaagcctattttctacgggtaaagcacattttgagttgaattaataaattccgctaagaaaatgcaaacatttaaaatacaattttagttttaacagaactatatagttatgttttgttactgtatgcctattgttggttacatccaactttgcatgcttttttagaaaagcaagaaataacaaaagactattttagttggcatattccacacacatcaaactttatgccagtttcacatttctcctcccatcctctcaattgctgccgcttctcctttctccacggttatcaaatagcttaatgtctgaggtaatagtttataaaaggcttactgtacagcataactattacagatatacatacagggccccctgctcctctgaggaaaagtgctgcacagtgctgggtatacaatataaacaacttcactaatatgtattattgtatttgctatcatcatcacaccaattccattaataatcctgtactagtgctgacttctgaatcttagttcctcttctgaaaggagggattaacgtggccatacaagaaactgaagttctactattccctccttgactttatgcactagaaacaatgaattaaaggtatttgcaattccaagtgtatgctctttcccaatctccctggctgtacaagcactgctgtttcaacttgaaatgtcctctagctcatacttcccttcctaaagtagccatcagtctgtaagactctctggatttgtgcagttgtgccctgccttccaacatctgtacttggacataattctacctttacatttagttgctttgagactattggtaaacttgcctttcctaataatgaattctttgatgttaatctccagagttgagcatatgcctaatagcttcacttgtaaacagcttaacaagtaaaagcactgagtgcttactatttgactacctattgttcaaagcgctatgccatattaactcatgtaatgttcccacaatttgatgaaactgtggaaagccctttttttctagttttttatttttcttactacacccccatttcagccataaagcccattttaaagacgaagaaacatacataggaagatgaatattcatttttaatgtattacacaatcaaaacaaaacacggacacactcagcttccaatcttgaccaacacacatgctaagctccattctaacctactaggatgtcacattaccacataaactacctgtaactgcagatcatttttactgaacttccctaacacatgctgactgtattagtctgcccttcatcggtatcaagaaatttctagtagaggggctcagaatctctcggagattctctggtcccagattagccaatctacatctattccgtccattatttcttaatctatttgtccaatcctttctatttcatctgccacaaatgacctggaaaagctagcagcagataacactgctatttcaacaaactcattttcaggacagagaccacacagcgtagaatcagacttaattctggctactgggttttagccgcgttacctaaggagaaagttaatcttgtggagtctcagttttcctcatctgtaaaatgaggctcctactaccagccttggggggattaagtgaattgcaagccacttaggagaatgcctggcagataataagcctcatcaaatgttgttatttaacgtcattactgtaatgctctgctgctctaagtcgagtggctccccactgacagaataaaacataaacattttagttcaaaccccttcagagtctgaatccatcctacctcccgaaacaccttccactgttttgatacccaattgtcaacttctgccaaaaggatctgtaacggagccccctagctccagcggaggctcctctgtcctcctttcaaattccagttatttaatctagcctttagagcacaactcaaatctcacctcccccggattccccccacccacccgccccaagccctgggtaacgttgccctcccccgaatttcacagcaccggaggttcaccccattcatttggcattcagtctgccgtgcaaagttagtaatcctcctggtgtccccggagaatcgttcaacctgagggtgggggtgtgtccccttctttgtgtattaacacgggctcgtagagcctccaacacgcactatagagtagctaatttgccgctgccacaaaaaaaagttactcgctgacagaaaaactggcccgaaaaggaacacagtagtgccgttttcaagtgggcaggtgacgggtctgtctgggccggagaggacgaagagggcggccccgaggttccccgggctgggggatgcgggagggtgggtctccggcgagcagcgcgcggccaagggcgctgccacgggggcggcgcggggggagcagcggggccccagcgcgtcgacgccggccgcggagacgcgtcgagcccccgcccccgcccccgcccctcaccttctcctcctcttcctcctcctcctcctccccggcagagctgtaggcctcacagtggtgacgcggggtcatccgggggcccgttaccacctcattctcataggcgcgcggaggcggtgcgcgcgggacgactcggccaactgaggagggagaaaggggaagcggatcggggggcgcgggcgcgggcgctggcgctcgagcgggacgcacggctgcggccgctgggtcggtcagcgaattagttccatgatgacccccggcctgaggccgccgccgctcgagcccgggttgggagggggctccctctcgccatagggcggcgggggccggggagaggcggggggtgagaccggctctgcccctgcccggggaaagcgcctccgaggggaaatggtgaaagggggggaggggagaaaagaaaagaaaaaaaaaaaaagaaaggggaaaggggggaaaaataagaaaaagcgagacagaggcgctgccgcgtccgctcgcggggaaggctggggagggaggggaagagaggggaagggaggaagaagtgccggcttcctcggctccgccctcgcggaccgattcctagactcgcccactccttgtaaactacgcggacttggtctttcacccttcctgttcctccccgccgccttcccggtccaacgaaagtacagagaagtgcggccgaaaggagacgggctggggaagtcgttggcactaggatggaaggagggaggacgttttctcgtggctaagaaaagccgaaggtccgtggactcattttccttgaaggagcggaagggttgcttgcagaccgcacggtgacgtcagcgtctctgggcccccactgagggggcgtgcggtggccggagagtgcgctgcgcatgcgcctggggaagaaagaagcggccgagcgctgcgcttgggggaggggatttcacgatccgctcctgtggtccagctttacagcagcttggttttatctagccctactcgtccccaggctcttagaaggattcactgggaaggggctactgatctcttgggtggagatcttgcagatttgttgacctagcaaagtattacgtgttcttaccgttgacatgtaaatagaattgcggtttttctcactgccacattgtgtgggtggagggagattctaaagggtt

SEQ ID NO: 2316 - DNA, 6000 bp, Homo sapiens
caggcatgaggcatcacacccgctcactgtctttattctgatagctgtttctcatgtgcttccttatgctgctcctctttgatttgaagcaaggtatagtttaatttcaagatttaatattctagtcatgaaataaaacaagtctgaaatccttttccagtaaaaatctactctttagacacacaaataactgcatattagatttttaaaaatatttaagattaaacacaagccaaaaatcaccacaaggtgactatttttgtcctaaaatttactgcaagccagaaacttctaagggagaggcagtaaagagtagtgattaaaaacataccatgctttggagatagtcaacctgggtttgaatcctggctgtgcccctctaagctatgtgatgaatattgggatttactttacctctttatcttttgtaaaataggaacaacaaaaatacctactatagaggagtgctgtggggataaacacaaaagaatgcaataaaaatgcttagtataatgtttgctacatagtgagtgatcaacatgtgttagttattattattctctctctcctttttttttcagatacagggtctttctgtgttgcccaggctggtgcaaactcctgggcttaatgatcctcccagcttggcctcccaaagcaattacaggcatgaactaccacacctagaaatgccgtgtagaatggtagtctaactttactatttagaattactaaatagaagttatttaccaatacgcggataatatgttctctttatatatcttatttattttctcagggaatttcataaactttcgattttttacaactacaattaattgtaaaaacaattattagttattaaaaaaaatatggcctggcgcagtggctcaagcctgtaatcccagcactttggaaggccgaggcaggtggactacctgaggttaggagttcgagaccagcctagccaacatggtgaaactgtctctactaaaaatacaaaaattacccaggcacggtggcacacctgtaatctcagctactcgggaggctgaggcagaagaattgcttaaacccgggatatggaggttgcagtgaactgagattgcaccattgcactccagcctgggtgacaagagagagactctgtttcaaaaaaaaaaaaaagtgaattaaagtatggtcttacaaatggatactgaagaacaagaatgtccatattggctgtgcacagtggctcatgcatgtcatcccagcactttgggaggctgacgtagctggattgcttgagctctggcattcgagatcagcctgggcaacatgacaaaaccccgtctgtacaaaaaatacaaaagttagctgggcatggtggtgcacacctgtattcccagctagttagaagtctgaggtggaaggatcgcttgagcctaggaagttgaggctgcagtgagctgagatcgcaccactgcaacctgggtgacagggtgagaccttgtctcaaaggaaaaaaaaaaaagaaagaaaatatccatactttttgttcagacaactgcaactagttacttacccacctattaattacttgtaattatatttatagtagattaaattgtcactggcaatctcataggcagtaagatagttttaataaggataagtatataattaaatgggagctcttaaagactcctggtaacattttaattggtttaatcttctgccttgcaactggcaactggtattcagtaaaagccataaaaacataatattgttggacctaggaatagccccaaagaggttatgaagatgttaattgaattatttttgtttttcattttttgggtagcagctttattataattcaaacaccatagaagtaatacatttaaagtgtacaattcaatggtttttagtacaggttgcatatccctgatacaaaaatctgaaatgctccaaaatccaaagctttttgagtgccaacatgacactcagaggaaatgctcattttggattttcagactaggttgctcaaccagtaagtatataatttaatgcaaacatttccaaaactgaaaaaaaagtttaaaattcaaaatacttctggtctcaaatattttggataatactcaacctaaatattcacagttgcgcaaccatcaacacaatcaatctcagaacatttttctcacctcaaaaagaaaccttcaaaaaatcagttgggcatggaggcatgcgcctgtggttccagctacacaggaggctgaggcaggaggattgcttgatcctggaggtcaaggctacagtgagtcatgttcacaccattgcactccagcctgcagcctgggggacagagcaaggccctgtttccaaaaaaaaaaaaaagaaaaaaagaaaagaaaaaaagaaagaaacccccatatcatttaactatcatcccctaatcccatgcctgcccctagccctaagcaaccacttccttactttctgtctctatatatttgcctattctggacattcacgtaagtggaatcatataatatgtggtcttttgtgactggcttctttcatttagcatactgctttcaaaggttatgcatgttatagcatgtattagtattttctttttatggcccaataagattccattgtataggtcggtgtgacggctcatgcctgtaatcccatcactttcaggctaaggagggagaattgctagaggccaggagtttgagaccagcctggacaacataggaagtctcatggcacccccatctgcgccacggagccagaccccatctcttaaaaataaaaatttgattgtacatagatgtatcacatttgatttatacaggcgccagctgatgaacatttaggttgtttcatctttggctattatgaataatgctaacgtttgtaaaaaagtttttgcatggacaaatattttcctttctcttgggtatatatttaggagtggaatttgcattattcttattggagtgaaaatcagaagcaatttcatggtctaacaatggaattatgttacactctcaatagtattatgcagaaatgctacagtctcaagagtaacatgcagaaaaatggtggcttttttgaatgaagaccatataataataggctacatgaagtgaaaaaaagaaaaaaaaaggatacaacccacttgaaatcctcctagggcttcccattccttcttctgttctatggcatctgtcctctgcttccacatcctgcctcagttgtctgagggccagccacactagctttcagagatttttagaacgtctcagcttcggagccttttcacataacttcctctgcttgtatcattctttgcccagtggtttcaagtctcatcttaaatgtcacttcttcagaaaaaccttctctgatatcccaaaccaggcggaaaggcaagcgtttccacagcagccggcgattttccatcttaacggttttaataccagaattgtttacttggtcaaatattgagagccttttatacacagggatagagggtgaaacatgcaagatccctgccgcctgcgaccttatattctagggaggggatacatgcacaagtaaacaagtaaatgtacttggtaattttacatagtgataattagctcaatggttatcctctgtttggactgtaaactccatgaaggcaggagctatgtctgtcttggctacttccagtttgctgagtctggccactaaataaactcaacacatattttttcactgacagttaaaataactatataaaaaacaaatggaaaaaacaaacgagacttctataaatggttgagatctagctcttcctctttcaaaactctgtaatactacatatttttaaataattaaaacaatcaaaatagcaaaaagttaccgtttgtactaacagaaccccaaataaaacccatttatgtcaccacacattctttaagcacctggtaataaaacctattcggaaatactcagacgtgttggttgagtggataaaatccccttgccacattgccaagcaggttcctcgccgtcagcagtataatttacagtgtttcactgaggccttaagcacccatgatttgattctccctaattttccgattcctaaaaccctttagaatctccctccacccacacaatgtggcagtgagaaaaaccgcaattctatttacatgtcaacggtaagaacacgtaatactttgctaggtcaacaaatctgcaagatctccacccaagagatcagtagccccttcccagtgaatccttctaagagcctggggacgagtagggctagataaaaccaagctgctgtaaagctggaccacaggagcggatcgtgaaatcccctcccccaagcgcagcgctcggccgcttctttcttccccaggcgcatgcgcagcgcactctccggccaccgcacgccccctcagtgggggcccagagacgctgacgtcaccgtgcggtctgcaagcaacccttccgctccttcaaggaaaatgagtccacggaccttcggcttttcttagccacgagaaaacgtcctccctccttccatcctagtgccaacgacttccccagcccgtctcctttcggccgcacttctctgtactttcgttggaccgggaaggcggcggggaggaacaggaagggtgaaagaccaagtccgcgtagtttacaaggagtgggcgagtctaggaatcggtccgcgagggcggagccgaggaagccggcacttcttcctcccttcccctctcttcccctccctccccagccttccccgcgagcggacgcggcagcgcctctgtctcgctttttcttatttttcccccctttcccctttctttttttttttttcttttcttttctcccctccccccctttcaccatttcccctcggaggcgctttccccgggcaggggcagagccggtctcaccccccgcctctccccggcccccgccgccctatggcgagagggagccccctcccaacccgggctcgagcggcggcggcctcaggccgggggtcatcatggaactaattcgctgaccgacccagcggccgcagccgtgcgtcccgctcgagcgccagcgcccgcgcccgcgccccccgatccgcttcccctttctccctcctcagttggccgagtcgtcccgcgcgcaccgcctccgcgcgcctatgagaatgaggtggtaacgggcccccggatgaccccgcgtcaccactgtgaggcctacagctctgccggggaggaggaggaggaggaagaggaggagaaggtgaggggcgggggcgggggcgggggctcgacgcgtctccgcggccggcgtcgacgcgctggggccccgctgctccccccgcgccgcccccgtggcagcgcccttggccgcgcgctgctcgccggagacccaccctcccgcatcccccagcccggggaacctcggggccgccctcttcgtcctctccggcccagacagacccgtcacctgcccacttgaaaacggcactactgtgttccttttcgggccagtttttctgtcagcgagtaacttttttttgtggcagcggcaaattagctactctatagtgcgtgttggaggctctacgagcccgtgttaatacacaaagaaggggacacacccccaccctcaggttgaacgattctccggggacaccaggaggattactaactttgcacggcagactgaatgccaaatgaatggggtgaacctccggtgctgtgaaattcgggggagggcaacgttacccagggcttggggcgggtgggtggggggaatccgggggaggtgagatttgagttgtgctctaaaggctagattaaataactggaatttgaaaggaggacagaggagcctccgctggagctagggggctccgttacagatccttttggcagaagttgacaattgggtatcaaaacagtggaaggtgtttcgggaggtaggatggattca

SEQ ID NO: 2317 - DNA, 6000 bp, Homo sapiens
aacaaataatatcttattgggttaaaaatacccaagaaaaatgtttgcatatgtcagaggagggataatgagaataaacatgttccaaagatcctcctgttgtttaggaggaagttaaagatagtatataataaatttctaaagtaaccattaaaataatagaaatgaaatggaatgagaaaagtttctcaaataatcaaaaagcggtcatgacaggaaaagaaaaacggatgaagtatgatacccaaaaagatggtagaaatatactagtaatttcaataaatgtaagcaaatggactaaatgctccttttaaaaaattgtaaatgattagactggataacaacaataaaatccagccatcagctgtctccatgtgtgctggctcttctccacccttctgtctggctttgtgtcccactctgtactctgctcacctgagctcctttgtcctttaacttctagttgggtttggccaatagcagattgtggcagaaggtcacagggtgggaggaaacagaagccaagatattaattcttctaatttccctcccagctgggccagagttcttcagtggttatctctatgtaagaccacacctcttgccaggggcccctctcccagcaacagcttttgctaggttccagtaatactctttcctctttgacccttcagggctacatgtataaaggcttttccttgttactaatggctgggcatttcaaaatcttttattggttcccttaatgctgtccatagctctctaaagaattccttcattaaactcttttcatttaacatcttgtgtgcattgctgatatggcttggccctgtgtccccacccaaatctcatcttgaattgtactcccataattcccacatgttgtgggagggacttggtgggagataatttaaatcatgggggcaatttcccccatactgttctcatggtagtgaataagtctcacaagatctgacagttttatcagggatttttgcttttacatcttcctcattttctcttgccgcccccatgtaagaagtgccttttgcctcccgtcatgattctgaggcctccccagctacctggaactgttaagtccaattaaacctcttttttttctcagtctcaggtatgtctttatcagcagtgtgaaaacggactaatacaattgcccgtttatttcctgccaggatcctgattctttttcttttctttttttttgagatgagttttgctcttgttgcccaggctggagtacaatggtgcaatctcagctcactgaaacctccacctcctgggttcaagcaattctcctgcctcagcctcccaaatagctgggattacaggcatgtgccaccaggcccagctaatttttttttgtatttttagtagagacaaggtttcaccatgttggccagcctagtctcaaactcctgacctcaggtgatccacccgcctcagcctcccaaaatgctgggattacaggcatgagccactgtgcccagccctgattcttataacaaaagacccacctaaagcataaggatactgaaaggttgaaaataaaaggttaaagaatgttatatcttgcaaataccaaccaaaagaaaactggcatcactatattaaagtagactgtaaggttagaataatatatgaaagataaaagaaactttataatgatgaaaaattcatttcactggtactataacattaccaccaaagcctcgaattatataaagtaaaaaaaaattgagaaaattaaatctatcaaacaaaaaggataatagtgatctacaaataactaatttttaaaaactatactatatatttaaatggctttataacaggccacttgttttcccaatttcatgttttcttagagtaatattccctttagtgcgcacctacttgaaaatttattggcagcaaagaaaggtaagtagaaatgcaggatgaccgaaagaagctagttatggcttaaaaattaatcttttttgcaataaatatggctaagtgttaatatcattaacatatccacctaaaaatattaaaatcccaaaatataaatggccaaaaataatttataaaaaaagaatttataaaaaagaattaacaaaaattcctttaaaattagatataacattcaaagctgtttagaataaaatagacagtgatgttatattgctggcaggaataaaaattaaaaaattatttggtttataacatttgacccagtaattcaatttctgggaatctctcgcaggaaaagtgaattaaagacaaaagttcaagtacaatacaaaaagggaatgtgactgataatatatttttaaaattagaaatgctcttctttcttacccttgttcccttctatttggttgttcacttcccaagtaattcaatccaaaacctattagactggggcccagcaaggtgtgtgtccccatagtgtgagtaggaaacccataagggatgccaaaacctcactgggggtccctgctgcggtgtgattcagctaaggctgaagaaaccccagcagctggaggaaagagtgtgtgtgtgtgtgtgtgtgtgtgtgtgtgtgtgtgtgtaaagaagcgactggaggaaagagtgtgtgtgtgtgtgtgtgtgtaaagaagcgactggaggaaagtgtgtgtgtgtgtgtgtgtgtgtgtgtgtaaagaagtgaatgatatggtttggctctctgtctccacccaaatcccacatcaaattgtaatcccatgtgttgagggagggtcctggtgggaggtgattggaccatgagggtggatttcccccatgctgttcacatgatagtgagctctcatgagatctgatggttcaagtgtgtggcacttcattctctctcctgctgccttgtgacgtaggtgctgcttgcttcctcttcatcttctaccatgactgtaggtttcctgaggcatcccagtcatgcctcctgttaagcctgcagaactgattcacttaaacctcttttcttcataaattaccaaatgtcaggtagttgtttatagtattgtgagaacagactaatatggcggcccacagtagggaatcatagcccaagcagggtaaggaaggaattttcagggtgagaggcgggtggcaattaggggaactggttacacagaagaggactgatcaattaagtacaatcacatgccacacgatgtttctgttaatgacagaccacatataggatggtggtcccataaggttataataccatagttttactgtacattttatatgtttagatacataggtacttaccattatgttacgattgcctacagtattcagtacagtaacatgctgcacaggtttgcagcctagaagcaacaagctatacaatatagcctaggtgtgcagtaggctatactatcaaggtttgtgtaagtgcactctttgatgttaacacaacaatgaaatcacttaatgatgcatttctcaggatgtatccccatcataaagtgaagcaaaactgctggtttctaaaccaacaactgggcactagtgggctctttgctattggggtgacattactcccagggttttctccctttctttaattgtaacttgtttctctgtcagtgagaaacctggctcccttatccttaatacatttgcagtcatacaattattggagtgaagcatcactgcaatgtcaccttccaatattatcacttatcagagtatattattttagtttacatctttgctttccccttgaattaaactcgtcaagttcagagacagaattgtacccatctttgtattctcagcccttatatagggcctgacaaataaaaatgttcaatattttcttctgggatgaatacacaccaattttagatgtaacagttaaataaaaatccaaagcacttcatgagtgaatctgaaaatgaatggggcagacagtaagtggtcttgtaggctctgagaaaaaaaaaaaaactatagcattttatgaaggctttattctattctggagccattccttaactcaagaagagaatttgatcagatgacaggagaaaaaatttacaagtgcaaaaggaaagggaaagaactggaatgagtatggtgtgtttatggtgcattaggaaactctccctctgtttgatgtagagagaaacataagctgagattggactatatggtgcgggggagcagtttgtggagcacttcagaagtcaggttgaggaatttatatagcataggaaaaagattaagagcacgacttttcttttcaagctcagtttgcatcctagtaccaccagtagctaggtgattctgggagttttctaaatgttctaaaattcttccaaatgtatgtataattgtatatttataggattcttgtgattaaaataattaatccatataaaaaattgtatagcacccaacatatggcaagtattctatgaaaattagttgttgacattgtaattataattggagccatattctacaactgcatgatattagcaatattctagaaaaattaattctcacgtaggactaggcgaagcctggaatttgaagacaaattgactatgaaaataatcttggcctatgataaaaacaaacaaacaaacaaaacattgattagaacagtgagaaagaaaagaactctgagaaataagtttaagaaaaaatgtggaattcaataagtaattggagtggaggagcacagaaaatagaagcattaaaaaaataatgtcggttgggcatggtgactaacatctgtaaacccagcattttgggaggctgaggcaggaggatcacttgagcccaggagttcgaggctgcagtgagctatgattacgccactgtactcaggcccgggtgacagagggagaccctgtctcaaaaaaaacaaaaacaaaatttcaatgttttaaactcttgagccaaagagaacatagttaccattggaaaaaatacataatgggagaaaatctggtacacaatcatcatggcagcggccggggccccggatggcatggaggaacctggcatggacaccgaagctaagaccgtggcgaccgaggcgctggcacggcccctcaactgcttggaggccgaagccacggcaggagcgggggcagggacggtggccgaggactccggcaccgcgcgaggcagcctgcagcctgcagccggccccagcccaggcccctggagaccccgtgtcccaggcttctgtcagcaacggcgaagactcgggcggcagcgcagacagcgagctggtggacctgaggatcatctggaacaagaccaagcacgacgtgaagttccccctggacagcacaggctccgaactgaaacagaagatccactgattacaggtctcccgcctgccatacagaaagtcatgtataagggactcgtccctgaggataagacattgagagaaataaaagtgaccagtggggccaagatcatggtggttggctccaccatcaatgatgttttagcagtaaacacacccaaagatgctgcgcagcaggatgcaaaggccaaagacaacaagaaggagcctctctgcaggcagaaacaacacaggaaagcgttggataaaggaaaacccgaagatgtgatgccatctgttaagggggcccaggagcacctacaaaaggtacccctgcccagcatgtacaataagtccggaggaaaagtgagattcaccttgaagttagaacaacaccgactgtggattggcagtaaagagcggactgagaaattgcccatgggatccataaaaaatgtggtcagtgaacatatggaaggacatgaagactaccacatgatgggtttcagttgggccccacgaaagcctcttactactgactaatgggtgtactgggttccaactcaatatgtggatgcaatcaaagactgtgctggggaaatggcagtatttttgaaagcactttcacctctggcccaggaggctgaccc

SEQ ID NO: 2318 - DNA, 6000 bp, Homo sapiens
gaaagaaaaatgtgttacataaagaatcatgtacaatgtaccagaatgtagcctgagccacttaaaatatattttaagatgattttgagatgattagttctgatttcaggcattgccgaattctcagttcactctcctttgccaggcttttcacattatgtcaaagctacttcatttatttcagttgattattcgtgtaaaagagagagcactggataacaaagtactgagtcgggcttcagagtcaaccgagcatttagttctcaagttctcaggttgcagagatagttcctacaaggctactctcttgcaggctagtagaactgggagggactaaagtggctggctggaaaaactggtcctcttgctgtagtcattcagatggtgtctacagtgtggataatttccacaattccaaagccaaccctacgtagataaacactatgaatgtttatgaatatggccaacccttgcataaacactcttccaaaaaaacagggcatgcttctagcattaacaacaaaagcaacaaaatatatagtaaatggattgtaaaatgttgatttcaaatttgagatggtcttgtttgtgggaaaatcagaaaggagaatatatgagatgtttcactgacttattctgctgattgcttgaagacagagattaatcatctgctatataaatcatctcattcttccaggttctgatttaaaaatgagctcttggttgaaaaatctgcattacttcaagatagcaccctatgctactatgctataccttccctgtttctcttcctcagagaggcattcctgtctccattgcaggttctgtgaagcaagacttatctaagcaggaagtttggggctgcaaaccacttttttttttttttttgagacagggttttgctctgttgcccaggccagagtgcagtgacatgatcatggctcactgtagcatagacctcccaggctcaagcaatcttcttgtctcaggctcacatgtagctgggactacgggtgcatgccaccacgcccagataatttttaaaattttttgtagagatgaagtctcgctatgttgcccaggctggtcttgaactcctgggctcaagtgatcctcccacctcagcctcccaaagtgccgggattccaggtatgaaccactgtgctcagcctaatgacagaaaacagcccaggcagggacccagcaatagtgagtagacggggagggggagtatggcctcatgtcagctttacgtatccttatcctcaggttctttcctttcagggctgctttccaccagacttctttgatgaggttagggatgatcccttcctttcccttcatgaagtcacaacatggtgcagcctagaaatatatagctagttgctttcacaaatgtttgtattcagtcatcacatatgaagcagacacaactacctctggctttttgttttcctcagtttagaaagctgaggctcaagaccatgggaattattcagggtattcaaggcaccatttctaatgagtaggaaagctgagacacaaagccagtttgatccatggccagtgcttttgccctacacctcagacataccagggtatatgctggggccttgttttatttatgtatttttgtattcctggtgcctagtagcatgcctggcactcagtgtgtattcactaaatttcgattgaataaaaagctaggatttattgtcaaaaaccatatctttgaggagaaagatgatatttggaaaattgtagcaattttgatgccttatgaagttcagggaagtctaagtcatttagggaagcactgcaactgtcccatgagagtgccctattttcaaggtagaagcttaagtgtgagcaggtttgcagcacacttgtcaggagtcagggattcactgaatgtagtcagtgtttctgtgtgggcactccctgcttattacccattctgtgagcaccttttagtttcagtctcacatgtcactgaggacaatgggctgcacatcaggctttcatggggttattggtgacagtatcacccaaccccactgcacccctaccacatgctgtagaaaaccaagtatcttaaattgtctggaagttcttgggggctgccaagtttctgatttccttattttgtatgtgtgcatgatacaggaaatttgccttccagaaagctcaggaaaggctaatgggtaaagcctgattagcctaaggggaataatgtctttttcataaataacactttcagctccggcaaggtaagccaatgtgataaggacaaatagaatgaggagaatttttttttaaaagatatattaacaaacaaaaaattctgcaaagtaaacagagaaaacctacataatcccccagcccatttcctaagaatatcatcattcttaaaatgaggtgtttaaaaaagaggatgctgtattaataattactggatctgtatttttaatgattgctttcctttaatcttaaagagataagtggactaacgtggataaagggctccatcttggacaacttgatcagtcttttcttctgtgctgagcagggcctgccaagagcaggaaattcaacgccatttacaaagctttcttgtcttactctcagagaaagccatcactgttcacatcattcaagaggctgtctgtaaaaggacacataaaataccagttatgaaatatagagtacacatttagtatagcttcatatcatttagtgctaagcagcaagatgattatgtcaaataaaagttatcacttatttatgtttaaaagatcagataagcattggataaaattatgtagcctaagcaaaggacaatttctaaatcttttcctttttgttttatatagtctgttatttttaaagtcttctaccacataaatttgcatttcctctttcacatcacttataaaataacgtatgttccttttttacctttgccttcttacttgaaaaaaacatccccagtctccttcatgctttgatcacaaactcttcatttctctgatggtggatagttggtcgagctgctttctgtctgtgggccctgtccactcagcctattgatgctctgtacaatgagctgtcatctctgtaattttaatcttagctctagtctctaagttagtttcatgctcctattatgtttatcagcatagatttccagcaagatgattatgtcaaataaaagttatcacttaatgtttaaaagataaaacaagcattggataaaattatgtagcctgtaaatcatttaaaactggtgtgctaattttatcttattttccaaaaccctcaccaagctcacacctctctgaaataagtgttagctttttgggctgccttcccccagttgctctgtgctccaaacagatgcctgtgtttagtccgagctaatatgcaaagggacctagttttaaaattccttagctgctccgcaaagaagagcgctgccaaagctatgttgtgtgccttcccatatttcacaagtaacaaaataattcacagaaaacacatagaagaacagaaaggagaaatctcttcccagggactatctgattatgtagattagaactcacgaatatggtattttctaatttaggagggagagagtaaacaaataaatgttccagggcagtcaaccacatgccccattgatattccgtgtgaaagtgtctctggcctaaggcacctggtttgtttgctttttgtcccgtcctgggagacgtgtcgcctataataacaacgctaattataatgaacaataaatgataatttatgggttaccaaggaccaagaagctctgggagtcttcattaaaacaacagcactacaacctctggaggtacgccgtaattattagatgtttacgtaccctcatcagcgtgctaagtttttattgaaaagcccctccttcagtccctcctgaatttttttaaattatggaaaaattccaagacacagaactagaaagaatactgtaatgcagcctcgagtacccatcacccagcttcgaccctcaactttttgcctatcttatttcacctctcttctccatttttttttctcttggactgtaaaattttaaagcaaatacccaaacttgtagcatttattgaatattttagtaaacgccccgacaatgttataataatttggtgggttattgcaaaatggaacgccaagacaaaataaagaaggaatgtagaaaactctcccgtggctgaaaaggctgtcacaaaggttagctgttaggagaagcgccgcgagcgtgacattcccccaagaaaggcggaggcagccaggcgagaaggcacagccccgcagggcaggtaactgaataccttctccgctgcacacccaggcatgcgcaatccagaccctggagttgctaaggccccaaggcagagagaggctcaggctacggagaaagccaatcagagggctccaagactgataagttagccaatccagattcgagggtgaatcaggtcctcagcatgcccatcgccccacccgcatccaatcagagagccggctactttgggcggacttttcaaaacagcgaaaacaaaacaaatcggggacctttaaaaggcgtaatgagaccagaaacgatctccttccgcccctctgtcttcccccgttccccaacgcagatcaatcgcggaataagcccgacgcccagattccgctctccgccctagcgccaggcgggaggactggctcggcaaagccaaggagagctagggaggccgcgagagaggctcgagacggcagcttaggggcgggactcttttttaaagtccgtggaggaagtgcaggatccctccgcggggagtcacgtgccccgcccccttgggggcgtcgaaactcttaacaaaaacaaggggctcggggaggtttccgctgaggcggcgggggtgcggcggtgggctggtcttccgcggccggcgttgcgccgcggcggagggtgggcgcgcggggagcgggatggagccggggctgtgaggccgaggcggcggtgcctgggaggaagggtcggatgccggaccgggggcaccgctgaggcggtgggtccccgacctgcgagacaggtttggaagcccccgctgcgcccagtccgtgcggaccgcgaggccgcgggcgggtggaggcgcgtctccggcacggtgagtggacccgcccagggccgccgtgggtttctttgttcgtggtggggactgtgggctttgaggaggttggtaccatgcgagtgcctcggtgctgcctgctcctcatccgctggagcgaccagggtgctgccctcagccccagccccggggggagctggcgcccgcgatggacagatagatgctcgtggggtggaaggaggttgcgactaggttaagggcagtctccgcctcggtgccccccgcccccgctcgtgttgtcacggggacttgctggcgtggtgcttctcgaattgacagccccggggctctgcagagttgtggggccccggcatcagtgggtggacgggtgttgtccctacgggcgcggggcgggcgggctggactggacttctctccccggaccgtagccgggtgtgccgcgccaccccagggctcctgggacgggggtatccgcctctcgggtaagtccggaatcggcgctgcagcagcggacgggaaaagctgggggcgggactctccgagaggggcttctgcagctgggcgccccgggcgggcggggctcgggagtctcctccctccgcttctttgttcagtcgcgagactctccctcccctcccccctattgtgcaacaccccatccccgggacccgctgcagtcgctcgccacactgcagtcccctgggcagaaggccctccctggcgcgacttcaggtggggcagaccgaggggacgccggcgcccgcggacagtttcctgtttgtgaaacgccaagaggccagggctggccggtcttacccagcgc

SEQ ID NO: 2319 - DNA, 6000 bp, Homo sapiens
atagtcactgggataactggaaagcacaggagttgggctttatgagaaaaactgattgccttgagttcacttaggtcacaaagtacctctctttagtagcaaatgctgttttactttctgacttcacagatataatgtccagtggccaatggccttttgcaaacaggcctcttctcagagggaaggactggaccctggagaaagaagtctaacctcaggacttgcacaatttgtaactataccttcatcaccctaaaagtagacactgcacacattcttctgtccctcttggtctttggttcttcctcacacagccggcccttcccagctcagtgctcctttagccacaggctatttgttgctgtagttgctgccaacttggctggtgagaagccaggcctggaggaaatagagggtcctggcaagaacctggactgagggcccccaccaggttagcttccgagtcctgcaatgcactgtgcttctgtcttagttggcttgggctgctataacaagacaaccatggacagaatggtttaaacaacaaacatatttctcatggttctggaggttgggaagtctgcgatcagggtgccagcatggagggactccttccttgtttcctcatttgagggattggggttgtgagaggaagaaagctctctcctctttttataagggggaggcagaggggcatgcactaatcccacctcatgacctgattaacttccaaagccccatatccaaatactatcacataaaagaacagagttttaacttgaattttgggtacccaaacattcagtccatagcagtctctactaaaaagtgtatgcaattagaggccactgtggggctcccaggacctgattaacaaaagatagtactatctgggtatagcctgagagtatgaaagggtgataggaatatagagttgggtaggggtggggtgcagaggcttttgggaccatgtttgaaacagctatcccaggaaagcattctaaaaatccttgggttttctttggatcaaacaaagaaaatttggccttgccttcaaactgtacagtcatcttaaagctcagaacaggcaaatttctcatggcacctgcacctccaggagtggagattttggggtaactgaggctcttggaacagaagtctgtgtaagatcagcctggcacagtggcagcctggttcctgggtcagacagcctcccaggacagtggcttgcattgccagggttgttcattctattccatcatctatctcttgtccgtccttccaacccagcatgagacattgtaggatgaacagtcttgccttcaggacccttgcctcagtgaggcctggcctcagtttaaacccaggggaatgttgtaaatattgagacggtctctagagtgaaggaaatattgggctctgacttgacttatacaccctgacttctcttttcttaggcttctgggttccaaccagaggttaccggtaactttatcttcttttgcattgatttctgtctctagtaaccagatcacacttgtagttacgaaagggataggggaaattcaccaccagttttccacacagaaataggggaggcctggaaagaaagttcagatgctggggtccaggaaaagtgaccctgagggggttggtctaggaaatgtgaggcctagtggggtgagacaccgctgaaagagagctcaagaagagggggtggggacctaagccgaagcccgcgcactcactgcctggcgcctaggtgactggtggaatctgctaatctgttgggtagtttttccgtcgtctgtcaggtggcgatgagtggaaactaatcttcggggccgtttgttttacctctgcaggaagcagggcgcttgcgccttctcccaaccttgctttcctggctgggagaacgcaggaattggagaactgagctgtgggctcgaatccgcgcatgacctggagatctggaccaagctccgaggcttaatggggaaagctgagatgtccccagcagggggctttgggcgattaacttttcggaaagtcgccagagaaagtgtggtgcaggcttgcgctcttttgggtggagttcacaggagtagggctcgaggtagccaaaacagtaaattgagatagctccccgccccacattccccactgcagaattgctgtggacagaggctctcgaagatcggctgctcagagtggtaggcaggatgtagaccagggcgggcgcagccctggcgcatagcgcgaccctttcgtctctcagctgagctgcggaggaagggggcttggcagctcagctcacggaacaagcgcagtgctgtctttcatgtttcactgttcagtttttgtagctttttttaatggccccaatacataactctcttgtgaaaaaaaaagtttaatagcatccaccctacacacttatgatcaccaatggagatttccttttaagccccgagtatgtgggcacattcggctgcccgcccaacccccaatcctcccaccccagtatggaagacagtcgggcgttgaggactggtttgccaaattcaatcactgtccacaacagctggtcacttgtctccttttagtgagcccctgactctttctaagcccttggaatccagaaaagtgtatcttgccatcctccagtttgaggtagactaaagcctgagcaggtgtctttgccttcctgggtcatccctaggcaaggatttgatccccagtttggctcttgcgggagttgagagggaaacaaggatggttgtttcagtgcaggcggggctgcagaaactgagagaagggagcaaagacaagaggctgataacagctccagaaactggactccagagtcctcttgacctcctgggtttagacagggggctgatagtgcagctggggcaggaaccactctcctcctctttcagcagactccttgggaaaaggaaagggagaaacaagcagctggatttgctttggagaatcttcgtcacttgaggaatgggctgtgtatttgcgtggcatgggggaacttacaaatggcattcagcagcatcaatgtggcttaaaccctgacagctttgccacagacctcagggcattgcctgaagaaggaacagcacccaggttcagaaccatcctacaatcatcctccccagaagaaggtgatttcagtcaagtagaccattctgagagatactgtgactgttctcaatgtctacttttagggttgccttgtaaggatctgcctacccaccctagttaagggagaagtatataacttgagcctagaacagtggacagggggtgtgttcagctctggacagtatctcatgtagtgtgcccatgttatgcacatctatgtgtgatgtcctctttctttatcacagtggttttactacactttccaggtaaccttctgttttacaagtactttgatgttactctggcggtggaagattccaaacctgaaaaatctgcattgttttatatgcgtttcattattgagatggaaaaccttaagtaggtactcaataatgggtaaggccgtttcttagcttcaaccttggttcatctgaattgaccttatcagtcaatagcacgggccgtttcattaaaataaccaatgaataatgtatcatagcttagtttaaagtttcaaatatgtttttagacagaaacattccaagcatgcaagtcaggtgtatttcccagataaataacagtctggggacgttgcccgtacagggaaattctctgttctcaaggaaattttcccttctcgggtttcctgaggttgaaatccagcgcgcacgtcattaatcattcactgaggtcggtccctcagtcaatggcaggtctgggtaagctaaagcgagcagttagctaacccttcctgccacggggatcctggggcgaaagaggacaactgggcggtcagttacatgtgctggtgtccagccgctgcctctctttccccggtcggagcgcgggggtgcgtgtgccctcactctcacgaatacagacggagagcttcccagaaggaaaaacaaattcgtcataatgttcagcgcagccgagagtttccaacaagaaagcagctccagtcgtggcatgatgactcagggtggcgttttaaacgctgaataaacccattccttagctctttaataaatcgctaataacagcaaaaacagccttctccccgaaccgcgccacaccaaaggcttcccaagttgggctgcgaatccctgtttggttttccaacgccgaaagacgtagaagcagtgggatctcctggtgggacgcatttctccaagggctcccagagagaggacgagatagcagggtttacagggcaaagagaggagaacctggaaatcgtgtcctggggggcaagagtgcgttgcccagtcacaagtgtgctgtagaggtgggagaggacaaggacccatttccacatttcaaccctccgtttctatcgctgcccctggaggactcagctgctaacgccgagctcgtttccacgcggctctggtcctagtcggggaatccgggtggccgcgcgacgcgagagaactgctgggatgcgtggccctggtatgggcgcacccagcgtccggggcgcaggttctctcagcccagcttctcctcccactcactcgctcggatctcctccctccttcacatcccccgcccccgggaccgcgaggctccctccccgcaccggccagtgagtacacaaagccgcgggtgaggggaagcttcgcaggcgtgcacggagcagtgagatcactggcgttataaatatcccggtgccagcgcggagatccgctcgggtggcctctctcttcccctctccccttctcttccccgaggctatgtccacccggtgcggcgaggcgggcagagccagaggcacgcagccgcacaggggctacagagcccagaatcagccctacaagatgcacttaggacccccgcggctggaagaatgagcttgtccttcctcctcctcctcttcttcagccacctgatcctcagcgcctgggctcacggggagaagcgtctcgcccccaaagggcaacccggacccgctgccactgataggaaccctagaggctccagcagcagacagagcagcagtagcgctatgtcttcctcttctgcctcctcctcccccgcagcttctctgggcagccaaggaagtggcttggagcagagcagtttccagtggagcccctcggggcgccggaccggcagcctctactgcagagtgggcatcggtttccatctgcagatctacccggatggcaaagtcaatggatcccacgaagccaatatgttaagtaagttactcgctctcctacaaaacccgtcctaggcggccgcggaagattcgggagggacagcaggtattcgccgggacacaggctcaccttcctgagcccaggccactgggaccaagctgatactcagaaacagccgggcgggttgggtggagatgcatctatatggcgtgcgcacacgcacccctctcctgggcatgaggaattgcgatttctcaggtgtatgttacctagaggctggtgcccagacgggtaccttgttttcagtttgctctagcctcaaagacgagtccccagccatgacaggagagaacaaaaaactcatttcttctcactcaatttgtttaccttctgcttatgaactagcctggcatttttcattaggcatcaaaggcagcccttctccctatccataactgaagttattttttgaaaagaagaatcaaatcccaaatacttccctcttccatccgctaccataaacctcaaattaatattgtatatgtatatgtatatatgtatataagtctatgtatacaatgtatacacataggtagatagatagatagatagatagatacacagatagatagacagacagatagataactaggggacaccagacagacattcctgc

SEQ ID NO: 2320 - DNA, 6000 bp, Homo sapiens
gtatctagattctatttttttaaaaattaatgcctagttgttccggtacaatttgttaaaaagactatcctttctccattgacttgtctttgctctcttttgtattctttgatctttggatcagttgactgtactgtttaggtctacctctgggatctctgttctgttccattgatctacttgtctattttttcaccaatacaacactatattgattaccgttactttattagtaagccttaaagttggacagtatcagttctccttcaatattgtgttggtttagtacatgttttcagttcaataagtttttcctctaagataaattctcttgttggataaataatgttaaatgtaataataatagtaatatttaatatttcttaaacaaatactatatgctaatacctgtgctaaattttcatcatgatttatctcatttaatcctctaaaaactgtaaatgacaggcagcattgttttgtctatctctctatgtttctatctttttcttccattattgacactcaagtatcttgcctgagggaatatagaccactaaatgaaagtgcttccactgggactctggatccataaccttagccagcaccataccatctcccatattgacagatatacatgtagctatacacacacatctatatatgtgtgtgtgtgtttgtctgtgtatatttataacagactccagatgggtagagagagaaatagatattatctagaccagagccaagattctggtttcaaactgctatagggctggaggaaaaacagaaaacaaagcttaattcctcccacattgactgccaggtgttaatccgcctgcaagcgccttcacagtcacttttgcttttcttatgtctcttctaattacccttggtggacagcaatttctaaatggcgattacattaatataataatttgtagtcttatgtagtttcctctcttctagcgaaatgccactactcattcgattgctgtctcctatacctaactgcagaagagtattgcctccagagtgaactatggtttttggttgccttcaaagataattaggtgggcctccatgttttaagcatttcattgcagtgtgtgaaaataaataggggctacatgagggaattacagagcttcaattattaagtccttgtagttatgaactggctccgtgtcattcataattctttttttgtctccatcttttggtggggaacttgttttccaggctgtttgtttccaaatgacttcttttctcaatggaagatagaatccaggcaaagtaagagtcccttactcccggccaccacctcccaaaggaataatgtgcatctttaaagagttttgtcatttgagaggctgaggcagaagggtggtttgagcccaggatttcgagaccagtttgagcaacatagtgcaagaccccatctcaacaagaaaataaaaaaaatcagtcaagcatggtggtgtgcctctgtagtcctagctactctgaaggctgaggcaagagggtcacttgagcccaggagtttcaggttatagtgattgcaccactggccactgcatctcatggctgcagaatgagaccctgtcacaaacaaacaaacaaaaacccacaaaagactcttgtggaagacatccagtttactagacttctgtcctacccagaaatgatcctctctgggttttcttcacacctagacattaattgcctgtttctagttacatactataataagagctgcttacctacttcatgtctgatacctgccaggcatcatatggggtactttacaaacgtaataatcatagtaaccctacgagatggatataaatatattcccttttgtagatgagaaagtaagactcaaagatttttaggaatatatagaaggttgagaaagagcagattgttttataaccctaattggcctgactctattgctcatgttaaattctgatctttatctccagactcatttcttattgcatcatgtgctgccctctgactgtaagaatgattttaataacctgcagttgccagactgatggagcaacatcctatggttcatttctccttgtggctagcaatacatatttgagaaatagcttatcttagtgactgatacaggaaacagagtgaatctaattaggttttatgaagccagagacttgaaaccttggcttcagggacagcaatatttaaatggatgaactaagtaagaaatcagactagtattgagccatttagtaacttacttacgtatcttaaattagtgacttgaaagatgagttagttactctcattttacccctctttgaaattctaaatagcttgaaagatttacatagcttccaactaaaccagaggataattggtgttttgggagaatttaacatcctctacctaactgtgcttcaagtttgtaaaattattggattggtacagaattttttgaataccatccatagagcaaaaatgattctaagccttttcatatttgtaatgctaaaactgttttctgtgtcaaatttgactgcaaatccatgatgggatatgcctctgatatggtatatgatactttggtcttagtaaacaatttttccatgaacaaaaatgagttagttgttagtttaatattagatttgaaagtttttatgcgtgcttttttatttataaggcaaatccttttcctcctaccatcacatctcccttctttctctactgacctaagaatacttctccatgaaccaagaaggctgtctagaaaatgggtcactgatgcgtgttaaaaacgtgtgtacacattaatttcagattttttggagcacctttcttatgcttgtaattcataatctcattcaggtttattctcagatttcaatataacatattctgaattgcttattcaaggtacaagtatgtccagggctacttctttgaattctagtctcttcatccttcttatacattcataatatataagatcagtaaatgctgccaagtcaacagaaacttaaaggttaaacctgccacatctctgcaacatattaaggcaattctccaaaggctaatgtttattaatgaccactttgaacctgaattctatgagaaataagtaggtgtttcaagattgcttttataaatgcatttgttttttgcaccatccattgtaggcaatctgcattgactatttggtcacatctgtttgaaatctagatgctgtgttacatctttgcatctgtgcctttgttgttgtagaggtcacagttattctggtagaactagtgaaaaaactctaagtatttcacttctatttaagtttgaagtttggagggcgagaggggcagatgtgtgggttataaaactgtttcatttcttctgatttgagataatcagaactaattcaagcttagtttacaagtgttataatgctttttgggttatggctgttgtattagtctgttctcatgttgctattataataaagacatacctgagactgggtaatttgtaaaggaaaggggtttaatggactcacagttctacatggctggggaagcctcataatcatggcggaaggcaaaggaaaagcaaaggcaaactcccctttataaaaccatcagatctcatgagacctattcactatcacgagaacagcatgggaaagatccgcccccatgattcagttagctcccattgggtccctcccacaacatggggatttatgggagctacagttcaagatgagatttgggtggggacacagccaaatgatatcagctgtcaaaaactgcatgtgcaaaaatatgaagtttaaataggtagtctaaaaagccttaaaacattataataattaattagagcagtatttcccaaagttcacacattcaagttctacttttgtgagtctgctcgtgtgtgcttattatctgcagatgatttatttttattttcatcgaattgactcagtaaacctgaatacctagtttagtcttcactgaagcaataataacaatgagatcacaactttgtggtgatagttatttatatttcaaatacatgttaaaataaatacatagctattagactaaaacaagttctgaataaactaaatcatcccttataacccctgatctgcataccacatccagagactcactagattcatgattactttggggcctgaactgaagatattcatttttttaatttttgaaattttcataacttcccacactacaccaatgttaggaggacattcttaataggaaaagaatagagccttgcagcatgggtcgtacattttggagatcctccactttggacataaagtagaggatgcagaacaattttaaaactcttcttgttggtgaccacagttcagaagtgttttagcagtgagtgttatcagaaatgcaaaacttaatagatacatacagcaggaggaaagtgctaatcaaccatcaccaactctgcttccgtcttctgagaaatgcagatgtgtaattttctaaatctggggaaggtttcttactgttgccgcatggggagctatgaaagttgtgacatttccatgcctctgttgttgtagctgctcatttgcattttatctttgccatgctgacatccaaatcacagttttgatgtgatgcttttggcagctgttcagagagactgtccagagaaaacagcaggtaactcagaccatttgtgaaaaatgttaggtgtgatacttatgctctcaaagggacaggtaagaatgaacccaaatgccaactcctcttcatggagggaaaaaagaaatcaatagatagctttttttttttttctggaaacttcgggaagtttattgcttttcaaacaatgaagattactgtgttcctatttatgaaacaagataggaatgagaggaatggtggggactgttgggaagtgaaactccacttgatacttcccaattctgtgccttctcaggtccctgagcaaaatgggaaatggttcagtgaaacctaaacattctaagcacccagatggacactctgggaacctcaccactgatgctctgcggaacaaggtgacagagctggagagagagttgaggaggaaggatgctgagatccaggagcgggagtaccatttgaaggagctgcgggagcagctgtcgaagcagactgtggccattgctgaactcacagaggagctccagaacaagtgcatccagctgaacaagctgcaggatgtggtgcatatgcagggaggaagcccgcttcaggcctctccagataaagtgcctcttgaggtccaccggaagacctctggattggtctctctccatagcaggaggggagcaaaggctggcgtgtctgctgagccaacaacccggacctatgacctgaacaaaccccctgaattttcctttgagaaagcaagagtcagaaaagactccaggtaagaaatttccgcatcctttaaactcagatgggcttaatattgtgaaatatgagagtgacatttattaagcctccttaatgataaagaacatattgaccctttcagattttggggtagaggggtttttgaaatgattttgttttgcaaaaaaatctcccattgggcagaagtttaaagtagaaattgtactatatatatctctcatgaggagctcagtttactgacaattatttctattaccttgaaaaccctaggggtgtgaaatagtattagaaagtgtacacttctttttctagaggagtgaacttaaaaatgtacacacatcacagtgaattgtgactatgttagccaaaaaaaaaaaaaagagagtcacattttagtagtcttcaagtgtcatggaaaaggaacatgctggagcctcaaagatgaattcattcattcattccagtttatggtggtctctactctctgccagccactgtgttagatgctaagtatgcctcagtgaatagaaacagagcctttctagca

SEQ ID NO: 2321 - DNA, 6000 bp, Homo sapiens
gatctgatggttttataagtgtctggcatttcccctgctcccactcactctcctgcctccttgtggaaaaggtgcctgcttctgcttcgccttccaccatgattgtgttttctgaaggctccctagccatgcagaactgtgaatcaattaaacctctctataaatcacccagtctcgggtatttctttatagcaccatgagaacagactattacaatgttcatgtgtactcattgattaactctcacttataagtgacaacatgcagtttttgacttcctgtttctgagtcatttcacttgggacaatggcctccagttccatgcatgttggttattatccttttattttatttattgatttttaatttatttatttcatgaataagttctttagtggttatttctgagattttggtgcagccatcaaccaagcagtgtacactgtacccaatgtgtagactttcatctctcaccccctcccaccctttcccccaagtccccaaagttcattgtatcattcttatgcctttgagtcctcatagcttagctctcacttataagtgagaacatatgacgtttggttttccatttctgagttacttcacttagaataatggtctccaattccatccaggttgctgtgaatcccattatttcattccttttcatggctgagtagtattccatagtatgtatacaccacaatactctggattatcttattagaagcagccctgcctcttcacaatttagtcatgaaaaaggataatctctatgagctcagagctagataaccaaaacaaatctgaatgagtagactccattttacacactgatttatgtcaactaatttctttaacttgagagaaactaatattcatgtggttaaaatattgttatgaaataatataaaatgaaaggtgaatctgttttccaactcagtcctttccctccaaagaaagctaggtgtattctgtgtatctttccagaaattatgccaataagtatttgagtaatacttaagtaataagtaatttttaattgaacgtttactctatgccaagcatctttgtacacacaggggacaaggagtaaacaaaaactatgtcactctagtgggaggagacatatatacataaattaatactcatacacatattatgtctaaaagttacaaataatcttgtaactaatttaagaagaagatttaagaaatagaagtaacatacaatggagttggtgttttatagagagagagctatgagagggtgacatttgagtaaacactggaatcaatgggaaggagggaaacatgtatatctggagtgaaagccttccatccagacacagcagccagtgcaaaggtctcaagagggggtttgtctgggattcaggaaactgcccatggcccgtgtggctggagtggggagagcaaaggggagggacagtggtaggaggtaaggccagagcacaaacaaagggcaagatcatgtgaggcttgggagacaactgaaagacgttgggttttgttctgagagaaatcagagggtgggggtgaaggtgtggcactgggggtcttgagagaggagtgacatgatctgacacattttcacagaatcattcaaattgctgtgttgagaacagactggcagtgggggtgggcaagggtggaaacactgagattagctcagtgccagatgatgatatttcggaccaggtagctgaagcgtaagttgtgacaaacttttcatagtctgaaattttctcaaggtggccctgacagaattttcaggtgagaagctgagcagcatggctccagagtctgcacctggataactggaaggatggacttgccaacaactgagaagcagaaaactgctgattgagcagattttgaggggaagagcatgaatttggtattagacattttaagtttgccatatatattagacactcaatatgggaggaattaaggcatatgtttgctgttaagactggttttctagagcaggagaaaatgacaagcaggacagagagtgagaaggagaggactgtatccagtgcacacatggagagtttccagagtggaaaacacacagatgtttataaagttacagtctggaaggcgagtatgcaagcacaaatgcacatagtgagtagccagattgacaggaattagggcaaagtcttttctggaagcttctattttcatagtgaaataaagagtgtcttgtttgaaggaattaatgaatccctttttacccccttgcttaaaaccctccataggcttcccctcacccttgagaataagatccaaacattttatcacagcccacaaggccccatgggtcctggacctggacctgcctacctctctccattgccacaaatgcttcagtcacagggccctcccctttgtgtctcagacagatgacaaactcgatcaagccttggcttctttgacttacttgttcctctgtctggtacgccctttctcttgtcctcccaagtctggctcactcttctcacataggtttcacttcaaaggtcacctcctcaggtctttcttgaacatctcatctaaaataaaccttcctcccaacacattattttactatatatttgttatgtattgtctgctgcttcccacaagaatgtgtttcataagaaactagcactcttaacccaccttatcactctctctctgtctcctgatcctattaatcattacattatgtgtgtgtgtgtgtgtgtgtgtgtgtgtgtgtgtgtgtgtgtgtagagagagagagagagagactgagatttttctgtattacccatctcctctaagagaatagcaactctacaacaacaggtactgtgtctattctatttactgttgtgcttcctgaccttagaaccgtatctggcacataacagttgttcaatgaatatttcttgatgaacaatttggaaagtcagatgaaaaaattggatagagagcatataatagagagcctggcatatagtaaatcttcaataaatgtcacctgctgtgatgataaaaaaagacagtcatagcaacgatcataagcacaactatgaaaggctgatgacttctctttactcgtgaaccaatctcctcttgtctcattagaaattttgattaatcacatctcccttcttcttcataggttccttgccttcagctgtctcatatttgcccacaattaaaacaaaaacaacagttaaaatataccttccttaactctgtattttcttactagatacaaccaagtatctttacagtctagcaataaaaaagagttgtttatactacctcacagctagttaaccaaaacaaatcttgaatgaatagactcatttttctttactgttcttatctataaactagtttctttaaattgaaagaaactactttcatctaactcagtctaccatctaactcagtcctcactctgcaaggaaattaggcatattctgtgtatctttccaaaaattatgtatgtatatccagacatattctgtgtacataaccgtgcaccttgaatttctcttaataaatgaaacatcttggatagctttctaaagtacacataaaaagctaggccaggcacgatggctcatgcttgtaatcccagcactttgggaggccaaggcaaggaggattgcttgagcctaggagttcaagacctgcctaggcaacactgtgagaccccactccctaccctaatccccccaccaccccgtctctacaaaaaaatttaaaaattatctgggcttgtgatgtgcctgtaatccaagctactcaggaggttaaggtgggaaccccacttgggctgaggccaggagttgagcctgcagtgagctgtgttcagcctactgcactctagcctaggtgacaaagcaagaactcatgtttatttaaaaaaaaaaaaaaaaaaaaaagagagagagagaagaaagggaaaataagcattatttttgggaaaaaatcactgtatttagaatagctttccctcttagttaataaaagtaacaaaccaggccaggagcggtggctcacgcctttaatcccagcacttttggagaccgaggcaagtggatcacctgaggtcaggactttgagaccagccttgccaacatggcgaagccccgtctctactaaaaatacaaaaattacctgggcgtggtggcgggcaccttgtaatcccagctactggggaggctgaggcaggagaatcacttgaatgcaggaggtggaggctgcaatgagcagagataagcaccactgcactccagcctggggtgacagagcgagactccgtttccaaaaaaaagaagaaaaaaaaagtatcaacccattactcaatgagtttttcagtcctcggtatttattttccctaattcaacctctgaggaagccacagctaatggaaacgagttacagagagagagaaacaggagaaaagcctaaactcagattttctaaggcgcacaacaggcttgtcacgtttctggactggacagcgaatttcaactcttgctgttgaaagtttattttaaactgttggtgcagtttctttaaaagacggcaattctgtttgggtagtgaaaaatacatgtatctctacctagtttcgtctacaggttccaaactttttaaggatggggtggaggatgacgttcgctagcttttggcagataatagtattctggtattccaggaccaccactctctgcccactcctgggagcccctcccttcggccctctcctccgactctctgctgggccctttaaatcccctctcctgtttagcagtggtcacgccgcccgccttgcgtcccccgcgctgctccgcacgtggaatggcccatgacgtcacgaggccacggctcaatcagatgcggcgtttgggaaattttaaatttaaaggcggggcggcctgtgagccctgaagtgccggccgcggagggtcctggccattttcctgggaccagttcagcctgataggatggcggaggaaggagccgtggccgtctgcgtgcgagtgcggccgctgaacagcaggtaggggggccacaccacggcccggtgcccgctgggcctgcggcgccgccctgagccggaggggcgaggcctacgatgtttccaggagccgctgcttcccggctctgctgtctagtgactcggctgctggccatcgtttcagggtctgtaaagtgacaggggaggatcggagatctagaagatactttccagctgcgagattcacttaaatttaactcagtctcgctgacatacagaccttcccttctgtgctgctctgccttgcggcatctgctcctccctgccccattccccgcctagagaagtcgtatgggaccgtgccttcctggccctcatcacagttagtcattttacacctaactgctgtctccagaccctctgaagacaagggctagtctgtcttgtcacattacattcaatcgtcactcaagatcattctacaaatatttatcaatttttttttagtgactttgtacaacacagacactcccgtcattgcccagtggctcttccattctaatgggacgagacagaaagtaaagttgaaaatgtaggatgttaagtggtgatatgtaggtaataagtgctagggagaaaaagcaggaagaggaataaatgaaatcggtttgcttcactagcttctggccctcgacccgaaatgctaacactttgtgtgtgtgagaaatttttattgaacacggggtttaataaatgcaaataccaagatcaggaatttcctatttttgaggagctcattatctaatgccttaaacggctacataaagaaaccattaggataccttttgacaagtgttatgatgggcaggtagagaatgtttgctagaggagttattagcccatcagagacgaaagcttcccgtggggtgaactggtgtcagaaaagtcttgacgcttttcatgagt

SEQ ID NO: 2322 - DNA, 6000 bp, Homo sapiens
ctggccaacatagtgaaaccccgtctctactaaaaatacaaaaactggccgggcatggtggcacgtgcctgtagtctcagctacttgggagtccgaggcaggagaattgcttgaacctgggaggcagaggttgcagcgagtcgagatcatgctactgcactgcagcctgggcgacagaacaagactctgtctcaaaaaacaaacaaacaaaaaaggataccagttttgtaatatattatgattccacatgtcattctgaagtattccacacatattagtaccttagaaaataacaaattcatttttccttgaactaaagcacattcacatgtactattggtattaaaaggtagtatttcgcatgcatacggtgccaccttgtggcagttgtaagtatttgtgtatctacataaaattatggttcgtattaaataactgccattttttttgacaagttatgtgtataggttattgagtaaaaatccttagcctaaaagccgttgttttttttcaaaataacctttgaaaaagaacatttttcagaatgtcttcagatggatataatttaaaaggagactaagtcagaaaccctagattgtctgctaactataccactgtcaagatactgaatcttagacaaactgtatagccattctggacctcagtttccatatctttaaggttgttcaactaatcattaattaagtcactttcaacctaaaattttatttgattttagctttagaaaattgtttctatttttagcaccttaatatgaaataaagggctgtttatgacacaccttatctcttttactaatatgagtttgtttggttatgcattctgcttgaattttcttcagaaaaaagtcttaatttattcttctccctgtccaaataggcttcccctaaataatacacattaaaaagatttcattgaattataaagaaaagtaagttaaagtaactgaaaacaagttttgaaacattctgtaaagataagtgtgcatgtatttgataagatgcggtcaatggcaaatcaagttcccaaaagttaatgtggaagaagtccctccaaagcttttagaatcttgggtgttactttgataaataagaactagtacgagttcagagtttgggcagctctttctaccataatgtggatcaaatactaccctgtattgcagatgtggcacctcagatttatctgaactaccgcttcattcttccattatcaatcatcaactcagtccttgtttcaaaatgtcttttcctaaagtatctcttcttattcaacctctctggcatccatttatttcagacactcaacttcctagccctgcaggctaaaatatccatcacagtatcttgttttttagagactggtctaagaacttgcatcagaatcacttggaatgcttgttaaaacatgtcattctctataccccacactgtagacaaatactgtccaataaaaatatacgagtcacatacataattttaaatgtcatggtaatcacactgaaaataaactaaaaagaagccagtgaaatcattttaataatacattttatttaattcaatgaatgtaaaatattatttcaagatgtaatcaattagaaaacatattaacataatactttatatccattagtttagatgtctttgaaatctggtattttacacttgcagcatgttacaatttggatcagcatacttcaggtgcttaagtgtggcctgaaccagttctggggaaggtggaataaaagccaggaatttacaaaacacacaggtaattcttctacatgatcaagtttgaggccactaacctagactgtcctgtacacaatccattctacaaccattactgaattaacatttgaaaaaaaaaatgcccctttaattatgtcaatcctaagaacctagaaaaccctggtacctccaattcaatcaacacagataggtattcacagttctctaaaagtgacctcattcatccatccaacctactcttcaattagaaaatgttttggattcttacataaagctttcctaagcaaatattcattcattcaacaaatatttgttgagaacccactaaatgccatcatggatcttacaggtgttaaaaaaaaataaaataaaaatggaagtcacagtttagatatacatcaagaccaactgcccataaccacataaaccaaaacttaagtcatcctgatttccctgaaatgctctaatcataaatataaaacataagctttacatttttgttagtatgattccgtgaaattaagccaatcaactgtagacaaatcaacttaaacagctgtttgccaccccccaacaaaatcttaatgtataaggaccaataatggaaaagctcaaaatgcttcctcctttatccttataagctgtgctgttactggtgagtgcaagcttcttaccactcttcccacttgatttgaagtctcctggattctgatctgtactttttctatgacaataaacttttagattcatcctaattttatttttgatacaggaaaacagatcaggtataacacaaaccattacacaattttttacaataaaataaatgctctgaaatagcactatgagatgctatgaaaatacttcagagaggtccttatacagtctgaagggccaaggaaaatgtctttaagcaaagtaacatttaagttaagaaagagtgtgaatataattaggaatctgagcagataaaatgaaatttctaggtagagaaggaatatacattatggaaagcactaaggtggaaaagaacattggagggccaagttactgaaagaagcagacagatgaggaaagtaatctgatagggggcttcccaggcaggcagaaaccagataaggccaaactcatgagcttccaattttcctttaaaaaaaaagtataaatatttaaaccaaagtagactacaaactcctcaaaagacacagaccattccttctaaacctcatgtcttatgtctcctcatagagtacagatatttagtacttcctctgtacatagaaaaatcgtaattgtgccagccttttaatttctagaatttccaggttatactaacaattatgtgtagcttcaggtaacttaaaaagcacatcatcatgaaactcaagaaaacctttcctaaagtgctgagttttaacataaaattccttagaaagagagggagtttttatgtggaaagacatgggcaccatggtctaccagcgtgacgccaaaattctagctctacccaagctcccagtggaaggggtgaaggatatccaactcccttgcttctttactcctcactttccctgacattgctcttcatatcaaagattgtgatttatacacacacagagattaaaggatttaaggaaaaaaattttactgggtcaagtcaacctgttacctatcacacccatgccttactcttccaactaatcgaaacatgatatatacaacgctgtacaggcagaattctaagctagttccccacattcctggcccctagagagcgcatctacataatcccctcccctggagtttgggtagaacctacaaatatgagcagatatcacttctgggactaggttcatcaaaagggagatctgactgagtcttacttaatcaggtgagcctttaaaaggggctgggggctcccgaaagccacgaagatgggaagtgttagaaggcctgtaaaaggtctagctgacacacagctggcctctggccaacagctggcgagacaaaaagggacctcagtccaacaaccacaacgaaattctgccagagggcttagaaggaccc[450 bp omitted]cagaacgcagcctggacttccggacgcagccccctaccgccccggactcgcctacccctctggcctctgaggagggccctaagcccaggacagacgtggaaaaagggcagtaaaaaggatgcagttcttctctttaatccctaacccaatttctcgggaaaagctgcgttcccacacagaaggcgaaccctgtaaagctgtggcttggctgccgcgcacgcagtcgctttacgaattcccaaagcatctagcggaagtttagaccgttcactaggggtcacatgggccacttcgcgagcagctggcgaacagttcctttcagtttgaaagtatctttgaaactcggaaattgtgctccttggtctttcagttcataagcctagagagtggctactgaaattggaatcgtcatcttcttccctcggccccaactagtagaccacgaccagaagacacatcctaacctacacctaccgtagtgtcacacccggcacagcgcgaccaggtccaccaactgcgcctgcgcgaaccggccgctcccgcgacatcacaggaaggctgagagaaagggcaggtccccgctgcgtggggctgggcttaaaggctcgtcgcgcctgcgcaaaggacctgacgacgtgctgcgtcgttacttttgaaacgcttggcggggaagtgctgttggagccgctgtggttgctgtccgcggagtggaagcgcgtgcttttgtttgtgtccctggccatggcgctgcagctctcccgggagcagggaatcaccctgcgcgggagcgccgaaatcgtggccgagttcttctgtaagttctcgcgcaggccaatatatcggggggaacggagtcgtgacggctcagtaggcccacagctcggcctctgataccagagaagtaatctggggagaggcggctgcaggcgcttcctccagacgcgttgctaacgtggagctgcaggcctgcgtgctgctggggcctacctcgcggcgtagcctcttccggagcgtttcttcctttaagtgcagatccgtcccacctcccaccccttactttccgatacaggacacggtgtgactggggtgggccccagtgtatgcgtatgtgtgtgtttttcttttttttttttaactgcgagagcaccctcaccctcccactcaaagtgattattgggcatgaggctggcagtagacaagactttgggaacccttgttttcgaacaggccagctgcacgttctaaaggaacctggcaggatttgggagggaaaggggaagataaaggcttgtctggagcacagtgactattcagtcagttgctaactcgaatgcaacagcctattttgacatcctctagcctcataatctgaatttggacttggattacaatgaggtgaaatttggcaataataagttgatacactttggctttttttttttgccacgtgaaagcaattatctgttttacttagaagcaagacttttaaggatttttaatgccactttgtacctactctgctttcagcaagatacacgtgtgttcagtcatttatagctgtatagcctaatgaaaatatagcaacatctaaatatattttattttccagagttatgcagggataatgaattttctgtaacatttcttttgcttgcagcattcggcatcaacagcattttatatcagcgtggcatatatccatctgaaacct

SEQ ID NO: 2323 - DNA, 6000 bp, Homo sapiens
aattcctatttacctgtcatcttttgcagtcttgtcacactcaatatcaaactgccatctttccaggacctcaccactttcaatatttgagataactacaaccagtttctgaactgaacacttgtataaccaatctgcaacatataaaaaggaaggcatctttcttggtccactgcatcataaagtagctctcttctcgggtcccactccctatcctcagcaaattcctaccactgctatctgggacctcctcctatgtgcaagaaaatttgcaccatcaataatctaacttctgttttcaaattctcagtatctgtatcaggtacagtaattggtgctgaggacagaatactgaacatgtggtagtttcatcctaatccaacataaaagcataggagatgggcattaatctactcatcacaccaataaatgagaaattatcattgtaatggctgctatgaaagaaagatgtaagatgcaatgagagcataaaaaaaggaaaatttgagccactcagggaggtcagaaaaggtctgagtttagctctagggataaacagcattaaatatgcaaaaggatacgaaagaagatacaggcctcaaatactgccaagggaagagcatatagagggctggaagcagcccactacaagtgcaatcaagaaacaaacaaacaaaataaaacaaagtaatccttgcaagattaacaggagccagaccatgcaaagcctggtggatcaaattaaaaaaatatatacttcaagaccagggaagtcattactgtgtgtgaacaggatgtaaagcaattagacttgtatttcaaaactatcattctagccgtgatacggaaagtggactggagatgttaaagaggggatctagagacactagttagtcaatcagtaattcaagcaagagttaatgaaagcttgtaggaggataaactggtagatatggagcaataggtagatttaagagatttcatggttaaaacgtattgggtttagtcacgatagtaaggaagaagcatgattcagggacagcttccaagtttcttttatttctggctggacggtttagtcattcattgagagaaaaaaagagaattaaagagtatcagtcttggagatgatcctaaatttagtttttagtatacttgagtgtacattgtctctgggatagctacataaagatatagctgctggatatatgagtctggagaaagaggcttgggatagatgtaagtttgtgagctgactacacagaggttgttagtgaagctatacacaggtcagagatcacctatagagaaattataaacacagaacgggggctcagattgagccttgaagtaatcttggaaattgaaacagcatattcaggagtcagcgaagtttttgtaaagaaacagagtaattactaaatattttaggcttattggccaccaagatctctgttgcttatttttaaacaaacctgtaagtgtaaaaacactcttagcttgtgggcagtgcaaaaacaggccacttgttggatgtggcctgtgggccttgtgatccctggcatttatcaacaactttttattagtttcactctgaaaaggagactgggtggtaatttgctcttcctttaaaactggagagatgaaaccaatggggataattaaaatcaaaacacagaagcagaaaatataagagagaacaggataaagaccctgaaaaaggctagaggaaattacattcaaaacaaaacaattggccagcaaaacaaaacatgagcagccactcatgcctgtaatcccagcactttgggaggcagaggtgggtggatcacgaggtcaggagttcgacaccagcctggccaagatggtgaaaccctgtctctagtaaaaatataaaaattagccaggcacggtggcaggcgcttataatctcagctactcgggaggctgtggtgtgggggcagaggttgcagtgagcggagatcacgccactgcactccagccttggtgccagagtgagactccaaacaaaaaacaaaccgaacaacttgcctctagggaagagcaatttttccactttaactaaaataaaagggacaagttaaataggaaggtctagacacaaataaggtgaaatgtcattaacgcagtctcaaaggagacaacctaaaaaccattggcttaggcaatgcttgcttctccagcaaattaagataaaaacacacatccatagttgtctagaggttccaggccaaacgacctgagtacagccctatgaatcactatagatgatttattcctgacccccaattttggatgcaactctgggagaggtggacactcttatcagtgtctttcctgtgtacacttgagaacagaggtctattcccacaccaaaagaggtctcatcttgctattttgacaataccaatctactatagcagaagttctcaaccaagggcagttttgtcccctagggcacatctggcaatataatacatggaggcatttctggttgtcagagcaagggggtttgttactggcatttggtgagtaaaggccatagttgttggtaaacattctataacacacagaaaagcacccacaccaaagcaaagaaaagcacccataccaaagaaatacccaggccaaaatgtcaacagggctatcttcccttgcctgttaatttgagacctgacatccacaggttgttgtgggattcccctcctgtacacataaatggcaaggcaatgttaacagtttatctagaggatagtatagcttgaaagagagttaccaagctaaaaaagttcacatggccatcattggaagggcatattaaaaatgggttagtaaaaatgcaataaaaacggtaaaaaagacacatttctggtcaacaacaaaagaaataatttctaaattaaaaaaaaaagatggctgctgtagtactttttaaaattttagaagatcaaatgggagaaacacttgaacaattagaaatgagaatcctaagtggagggtaacacgaaagaaaaactaacaggaattctagaaaggaaaaagaaatcgatgaagaacaagtattcacccaacaggtaatacatcaatgtcttcagctaaagaaaaacgagtgttcagacagaaaaggcttactgaatcactggcagaatttttgaaaacgacaaatagaaatacgtgaaaaacaaacaaacaaaaaaactgtgagtgttctgttatttagtagctaatcttttctctttttgaagtttagttctctggttgaatccaatttccttgatcttaatgtaatgataacattagactacagaaaattaattagttacagaaaattaatacattatattgagaatatgtagtgtatattgtctcagatagtgaacaccattataattatgtaaaattccaacctgttccatttggccacatttactgcaaaagccacttctaagggagttgatgaagactatttttttagccatatcagatttctaacatcaaaatattcagcccactcacaatgtagtgggtgggggaagagtgtatttcttccattttatatattattttcttcctctcaattgaaaatatatttgagatgtcagtacacttctatgtgcagagcggaaaaatgactgcttaagatgctagaaaatctgcaagactcaaattgtttccaatgattaaaatacctttcagttgttccaccacattatttaggtattttatgagctcaagatcagtagttacaagcaaggtgagtccgtatttctgcactcgagtaaaggtttcagatggatatatgccacgctgatataaaatgctgttgatgccgaatgctgcaagcaaaagaaatgttacagaaaattcattatccctgcataactctggaaaataaaatatatttagatgttgctatattttcattaggctatacagctataaatgactgaacacacgtgtatcttgctgaaagcagagtaggtacaaagtggcattaaaaatccttaaaagtcttgcttctaagtaaaacagataattgctttcacgtggcaaaaaaaaaaagccaaagtgtatcaacttattattgccaaatttcacctcattgtaatccaagtccaaattcagattatgaggctagaggatgtcaaaataggctgttgcattcgagttagcaactgactgaatagtcactgtgctccagacaagcctttatcttcccctttccctcccaaatcctgccaggttcctttagaacgtgcagctggcctgttcgaaaacaagggttcccaaagtcttgtctactgccagcctcatgcccaataatcactttgagtgggagggtgagggtgctctcgcagttaaaaaaaaaaaagaaaaacacacacatacgcatacactggggcccaccccagtcacaccgtgtcctgtatcggaaagtaaggggtgggaggtgggacggatctgcacttaaaggaagaaacgctccggaagaggctacgccgcgaggtaggccccagcagcacgcaggcctgcagctccacgttagcaacgcgtctggaggaagcgcctgcagccgcctctccccagattacttctctggtatcagaggccgagctgtgggcctactgagccgtcacgactccgttccccccgatatattggcctgcgcgagaacttacagaagaactcggccacgatttcggcgctcccgcgcagggtgattccctgctcccgggagagctgcagcgccatggccagggacacaaacaaaagcacgcgcttccactccgcggacagcaaccacagcggctccaacagcacttccccgccaagcgtttcaaaagtaacgacgcagcacgtcgtcaggtcctttgcgcaggcgcgacgagcctttaagcccagccccacgcagcggggacctgccctttctctcagccttcctgtgatgtcgcgggagcggccggttcgcgcaggcgcagttggtggacctggtcgcgctgtgccgggtgtgacactacggtaggtgtaggttaggatgtgtcttctggtcgtggtctactagttggggccgagggaagaagatgacgattccaatttcagtagccactctctaggcttatgaactgaaagaccaaggagcacaatttccgagtttcaaagatactttcaaactgaaaggaactgttcgccagctgctcgcgaagtggcccatgtgacccctagtgaacggtctaaacttccgctagatgctttgggaattcgtaaagcgactgcgtgcgcggcagccaagccacagctttacagggttcgccttctgtgtgggaacgcagcttttcccgagaaattgggttagggattaaagagaagaactgcatcctttttactgccctttttccacgtctgtcctgggcttagggccctcctcagaggccagaggggtaggcgagtccggggcggtagggggctgcgtccggaagtccaggctgcgttctg[450 bp omitted]gggtccttctaagccctctggcagaatttcgttgtg

SEQ ID NO: 2324 - DNA, 6000 bp, Homo sapiens
gtcaaatgaaatctatactctaagtactaatcataaaatatatatgtactggacaatttccttctacagctattcttttaaaaaatatattaattttatagaaaaggagagggagtttttaaatctgacaacatttctactatctccatcctaaaagatgtgctttctaaagaagctacaaaaaggaaaattaacctcaacatatcatacggtaaacaaacaaaattaataattctttctgatgtttattttgtgttgttgttacattattaatgtttctgatcaaagtgatttatctaactgcatctggtcaactccttctagagataaatgaagtatcagtcaaacacactttaaagctaatccacccaaagctggagtaccagttgcttttggctaagaaagtgcagttaattgatgctttaaaagtaagtacatgtgtcgtcgtggactggtgattattatttgaagtcataggatttctaaaattatcaatactttaacattacattggattgaattttgaatattaaggtgcttctgtttttcattttaaataggaattacagattcatgagggaaatacgaactttctgataccagaatatcactgtattctagaagaggcagatcacctacaggaagaatacaaaaagcaacctgcacatcttgaaagactctatggttagtggaccattctagaataccttgccatatttcttttcaactggctatttcccaaggatcatgtaagagaagctgggcagaaagataaaaagattacatcagtcatgattcatgaaccagtcatgaatcagttgacaacaaatttattgcacagaatatttctgtattttgtcaagctacttttaatatttaattcttttacttgataaaatgcaagtatattaagaaataagtatactgtgatgaattaatctatatatatgaacaaacctggtataaaatgaatgtaatctatgaacctttagagcttagactgtatttcacacaaataattgtcatgttttgttgctattgtgaattataaaaatgcagcatttaaaatttttaaggcaaaatttaataaaggatatacagtatttgtgttgtgtcaatttatagttcaaaactttggtggtgagaagctgaatgtttcacaaattgtattgaaacagagtaagggaggtgaggagagggaaagaaggagtgaggaaggaagaaacagcttaagaaaaacaattttgttagcaatctttacataagacctgttgtatatagcacactatttacactgtcttcataatcaggtgagatatttaatccttacaatagctctgcaaggtaggtggtattatcttcatttttcatatgctttaactgaaatctgagtctaaggaatttgttgtcacctagcaagttagtgatcatgcctgcattagaatcttctcaccccaaaatgcatgccttttacactatgccaagccttccatagtcactgtagagccaattggtatcactagtacacatggatccttaagcctgcctactgaattttttattacatatccagagactttctcacaaactgtagctatatttaatgtcttaacctttattacatgacaagcacatgatctcttttatccttataataacttatgagattggctgtacataatatcactgattgcaaaatccagacagctttgtaaaccaaagtttttttcataaataatttgacagcaaaatcttgacttaatctgaattaatttaataacaaaatctgacttaaactgacatgaggttttatatatattttttgtttgtttgtttgtttgttttttgagacagagtctcgcttggtctcccaggctggagtcagtggcgcgatctcggcttactgcagcctctgccccctgggttcaagcaattctcctgcctcagcctcctgagtagctgcgattacaggtgtgcgccaccatgcccagctaatttttttgtacttttagtagagacagggtttcaccatattggccaggctggtctccaacccctgacttcgtgatctgcccacctcagcctcccaaagtgctgggattacaggcatgagccaccgtgcccagcccaaggttatatcttttttattccacttagtgcaaatattcatccgtatattttgtgccagaaatagtactatgttttgctattggatgctgctactcagtccccttggggttaataccatagtatattcctttcattatcttcctaaaataggaaaaattctgaaatacatcttgcatcaagctttttggataaaggattgacagcttgaattattcctgttttacatatgagaaaactcaaggtgaaatgatttgcccagatctttgaacctaggactatttgccttcaagtcaaatcccaagaatggtcaacatataggtggaatattttaattcagataagctgttaaaaatagaatctgcctagactatgtcaaaatggtcagcttggtggaaaaaatataccacttgttgtgatgttatatatactgatagcagttcaaaaatggccagtagttgattgtctgaattaatagcttgtaatcaattgttaagagggttattaggcagatgatttatatcttgaaacttgttttaaaatccccccaaaatgactatttttaaaaacatggcttttaggtttgtgtatgttaaatcatggaattacaggtgcttaaaaatagattatcaagcaattactttagtgaaatactgtgtcattaaatataactaatcactgacaggaaatttatgttttttctttaaaggcatgatcactgatcttttcatagataaatttaagtttaaaggcaccaatgtaaaaactaaagtaccccttctattggaaattctggacagttatgaccaaaatgcattgatttcattcttcgatgcagcatgacatacaaataaggtaaagtcccaaagaagtggtctgtttaaatgaaaaatgttaaaagagaattagaagttaactgtgtatgtactttaatttcaaatgcttttttatatctaaaaatatttgagatataatggctttttaaagtaatgcttctatttcttttgacaaattgaactttctaaaactaaaagagtctttttatttttaaaacacaagtagaatgatttaaataggattttaatgaatttttggcaagtggctgttttaatttttaaattgagaagtaatatgtggaaaattaaaatatattcaaatgtattacaaggtacataaacacataaacatgtagaccgctttataggcttcaaaatgtatttttatatattaccttatttgatcttcacaactgttgtaaaatttgtcaaatcatataagaaaactgattctcagtgaaattttgtgattaagaggacatgctaatattttgtaaagctgggaccagaacccaagtactggtacttgctttgtgtcctggttactatgtatgttgccagctagtggaaataacctaccaattgttttttctaggagataggattgatttgcaactgatattccttttgcttggtagtgttttatgactctgctgcagtttgtggaaatgctggacttggctcagtgctataaattgtagccaggaaataagaagagcttacacagagtcgggggatcttaattagacatgctgtaaccagtggagctattcagcgtgcttcaagtgaagagtgcagaaatagtgatgccatcttagattttcctacactagtatcttctagatctctttttatcatatatgacattaaggctacagaagttttgtgcattaatcttaattcatatttattaatttcaagggaatattgaaaggttttaaaatggcatacagataatggaaaataagctttatgtttcaagaagggcagactcacgaattttttagaaaacagtgcttcttaatgatatgctattatacttattagttatgtgcaagctttgtatattcttatatttatatataaatataaaaatttgttaaaggcacgtatagttaagagagttttattttaataaggtcatattgtttttactatgtttaaaaaactttacttctgaaaggaacataattatatctaggtcactagaacgtcattgtgttttttgttggttgccacagcttggggaaaaatagaaaaaaattaatgactgtatttgaatattttgtaatgcactgctatttattatatatatcaacagtagttcaaggtgccatcttaaattaattgcatcttcattaggaaaaataaaaagcataaaacacaatttctggttactatgaataaacgcctaaatgttaagatgacattacagtcttgacacttgagtactgtattactatgtgagctccgtgttaaataatttatgcacattatttaatcctaacaaccatatgactgtagttattagtccctattaacacataagaaaacggagaatcggagatactgaaaaacgtgccccagattttagacctttggaaaaagtcacttaagctaactagacgtcccagagctaaaggctgggcaacccaaatgatagtcgccaaagtttaattccgtttaattccctaaaaggcttagagtcagccttcggacagcctcgctcactaggtggctcagcttaaaataatcggaagcgtcgggccctaaatcctacctctccccgccccgcgcaggcgttttctcccgccccagccagtttgtttctccctcctgccccgcccctgctcagtttcctttggtttacccttcactcgcctgcgaccctgtcgccttgaatgacgtcaaggccgcgagcgctttcattggtccatttcaatagtcgcgggatacttgaactgcaagaacagccgccgctccggcgggctgctcgctgcatctctgggcgtctttggctcgccacgctgggcagtgcctgcctgcgcctttcgcaacctcctcggccctgcgtggtctcgagctgggtgagcgagcgggcgggctggtaggctggcctgggctgcgaccggcggctacgactattctttggccgggtcggtgcgagtggtcggctgggcagagtgcacgctgcttggcgccgcaggctgatcccgccgtccactcccgggagcagtgatgttgggcaactctgcgccggggcctgcgacccgcgaggcgggctcggcgctgctagcattgcagcagacggcgctccaagaggaccaggagaatatcaacccggaaaaggcagcgcccgtccaacaaccgcggacccgggccgcgctggcggtactgaagtccgggaacccgcggggtctagcgcagcagcagaggccgaagacgagacgggtaaagggatgcgggatatctgcaggagggtgggtcgagcagggtttggcattggcttagcaggcagagaagagtggcgagaaggcatgtcctgggcttttggaagggggccagggtctggagtgcagttggtgctggtgtgtggtttgccacagtaggagttctcccatattagcatcaggaccccgccaacactgtgtgtatgctgccggtctgctctctatagggggcatctgcctgtacataatggggtcaaaccaagctctaaaacgtgtagtcttcgctcagctccgcgcctttctctccacttttaaaccccaggcactgctgtaggactctgacccctatcctcctcacgcttaagagatgacctctactttagaaaagcgtgtacaaaatactttgcttttggcaaattccgccattttagccggatttgctctgttgctccaccctcgggcgacagtggtgaaccaacaatttttttgctgtctttcctaaacttgtcacgtattggcctgtcacccgacccttcttgtggccctgataagttttgcataattccacctagtgttatctattgata

SEQ ID NO: 2325 - DNA, 6000 bp, Homo sapiens
taaataattgaagcgtggtgatctattcgagtgacaatacaatatttaaaaataaaatagccaaatgcaacaaaagccattggatatttctggaagttttgtatgtttgttattgtttatttgtttttaaaagtcaaggacacaagtcacctaaataattttctgtgctaaagcacaattaggtgacattagaatctgtcatctgagcacaaaagttagacagtaatctttactacctcttgtgaagataaaatagagtggttcactctattatttcatacctgatagtatgatgatgatctggagaactaataagattatttttgatgtactaggttttagaaaacagtaatttgtgcattttttgtgagattttcataaggaaatgggtttaatgtgattttcattatgaaatggttaaaagaaagacttccacagacattgactacactgatacctgcccttccataatgtagatgatgaacttagctttcaaaaacagttttcggtgatgaaaataatgcattccttcatttgtcaaaaaagaaacaaacaagcaaaccaacttactgaggccccacttagtgccattaggtccttgggatacagcaatgtacaggtcagaaagatctctgctctaagttttcttgtattatattaggggaaggaaactgataataaatacaaaaacaaacaagatacaattttagatgataagtttatgtgatagtgagtaattagttgtttgcataaaaaattctaccttccaaaatatcactacaaatactttagtgtttctcattctattatgtgtatgaaagcatattaaataaatgagatactattatacagttttgtaacctacttctttcaattaacaatatacaatattgcaagaatttttttcatgttattatatattctcccacaaaactgtttatttggctacatggaacgtactacttcgaatgaatataatgtaatttattcacattaatcacctagattatcccttatttttcctcattatgatcaaggatataatgaacatccaggttaataaatcttgtgtacatctataatcgtttcttgagaataaatttcttacatcaaaactgttgcctcaaatggttatttaaatttcaaaaattgggccagtcatggtgacacatgcctgtaatcccagcactttggcatgctgagactggcagatcgcatgaccccaggagtttgagaccaacctgggcaacatggtgaaacctgtctctataaaatatacaaaagattagccaggcatggtggcatgcgcctgtagtcccagcaaacctgggaggctgaggtaggaggaccacctgagcccaggaggtcgaggttacagtgacccacgattctgccaatgcacaccagcttgggttgacagagcgagaccctgtctcaaaaaagaaaaaaaatcaaaaattaaaactgtgatgtaccttttaaaatagttttcccaaaatgctgtataatttagcctccctctgactgtcgataaggtctttggttcacctcatccttaatagcactggatgatatctttttcctcccgactttatgggagaaaaaaactcattttcattttgacatctattatttttctttctctttttttgaagatacaattcatgtatcatgaaattcaccattttaaagtgttcaattcaatggttttcagtatattcacaaagttgtgtaataaccatcaccactatctaattccggaactcttttataggtcccaaaggaaatcccatactcattagcagtcactgcccatttccctctccttcagccctggcaaccactaagctgctttctgtttctatggatttgcctaccctaggcatctcatataaatggaatcatataacacctggccttttctgtctttttccactgagcataatgtttccaagcttcatccatgttgtagcacgtatcagtaattcatttctgtttattgccaaataacatttcattgtatggatataccacaattgatttatccattcatcatttgatggacatctggcttgtttccacattttggttattatgaataaagctgctatgaacatttatgtacatgttttcatgtgaatatatgtttccaattctcttggctacatacctaggagtggaattgctgggttgtctggtgactctgtttaattttagagttaactgtcagactgtttttatattgactacatcattttacctttccaccagcaatgtttgagggttccacttttaccacatcttcaacacttattattttttgttgttgttatttcttaattatagctatcctagtgggtgtaaagtagtatctcattgttgttttgatttgtatttctctaatgtctaatgatgttgagccccttgtcatgtgtttattggctatttgtatattttctttggagaagtgtctgttcaaatcttttcccatttgaaaattagattatttgtttgaattgtagggaatacaagttattttactgcgtgtagctgctccccaggtttctggatgccattgttaaaaaatatcatgacttagattttatccccgtgctcctggaatcctcaggtttctgtgacacagagttcaagtgagagttcaatcattctagggactactcagcaccacagtagcacctacagagatcatctggagggagtgattttgtctcaacagacggatcttcaatgaagatgaaacaaatccattttggagagagatgttagagaactgatggcgttcaggacatgctacccaaaaataatggtaccttggcacttaagaaaagagcagaagcaagagggttactttcactttccccagatcttctcttctgaggcagaccataagaccttcattccagaggtgccttccctatacctggaggaaacagacatccttatctctgaagacacacggacagggaaaagaatctgagcaaataggccttgctaagtaagtccccccagtttattaccattagatcacagatttgtccaatcatacttctccatgacttccacttctttatcaatcctagccttaaaaatacacaggcttccctcttaactttgggtcttaatttctgaagtctcctgttttgtgtaaaactcacataaataagttagtatgtttttctcttgttaatgtgtcttttgttacaggggcttcagccataaacctagtaatgaatggggaaattttttttttcctcctctatagaacatataccaactgcaagaagaaagaagaatatgcctggttttgggcctggcgcggtggctcacgcctgtaatcccagtactatgggaggctgaggcgggcagatcacctgaggttgggagttcgagaccagcctgaccaacatggagaaaccccgtctctactaaaaatacaaaaaattagccctgcgtggtggtggcgcatgcctgtaatcccagctattcggtaggctgaagtaggagaatcgcttgaacccaggaggtggaggttgcggtgagccgagatcgtgccattgatctccagcctgggcaacaagagcaaaactctgtctaaaaaaaataaataaataataaaaataaaaacagtatgcctggttttaaagcttcaaagaatttactcattctcctgtatgtaacattctagaaatgcatctggagttaaagccttcttggagacttaagaacaaatgcacttatgcatggccttttgaaacctaatgtttctacaaggaggcacgtccatacttgcaactccttctagaagcttccccaaatctcctgcctccccacgctgagttatccgatgtctgaaatgtcacagcacttagtcttactcttctatggcctactttctactgctatttgtgttactcatgctacccatcttatctccctcagtgtgtgagacgctggcatcagatttggcatctcccacacactcaacattatgtgttgcacacagtaggtactcaatacatgcaagttttctgaatagatattttcctagtcatctgtggcacctgctatatcctactgaaaattaccaaaatgcaattaacttcaattttacatttgggatttacagaaaataactctctctccaagaaatgcataacaatttagctagggcaaatgccaggtccgagttaagacattaatgcgcttcgatcgcgataaggatttatccttatccccatcctcatctttctgcgtcgtctaattcaagataggtcagtaaaggaaaccttttcgttttagcaacccaatctgctccccttctctggcctctttctctccttttgttggtagacgacttcagcctctgtcctttaattttaaagtttatgccccacttgtacccctcgtcttttggtgatttagagattttcaaagcctgctctgacacagactcttccttggattgcaacttctctactttggggtggaaacggcttctccgttttgaaacgctagcggggaaaaaatgggggagaaagttgagtttaaacttttaaaagttgagtcacggctggttgcgcagcaaaagccccgcagtgtggagaaagcctaaacgtggtttgggtggtgcgggggttgggcgggggtgacttttgggggataaggggcggtggagcccagggaatgccaaagccctgccgcggcctccgacgcgcgccccccgcccctcgcctctcccccgcccccgactgaggccgggctccccgccggactgatgtcgcgcgcttgcgtgttgtggccgaaccgccgaactcagaggccggccccagaaaacccgagcgagtagggggcggcgcgcaggagggaggagaactgggggcgcgggaggctggtgggtgtggggggtggagatgtagaagatgtgacgccgcggcccggcgggtgccagattagcggacgcggtgcccgcggttgcaacgggatcccgggcgctgcagcttgggaggcggctctccccaggcggcgtccgcggagacacccatccgtgaaccccaggtcccgggccgccggctcgccgcgcaccaggggccggcggacagaagagcggccgagcggctcgaggctgggggaccgcgggcgcggccgcgcgctgccgggcgggaggctggggggccggggccggggccgtgccccggagcgggtcggaggccggggccggggccgggggacggcggctccccgcgcggctccagcggctcggggatcccggccgggccccgcagggaccatggcagccgggagcatcaccacgctgcccgccttgcccgaggatggcggcagcggcgccttcccgcccggccacttcaaggaccccaagcggctgtactgcaaaaacgggggcttcttcctgcgcatccaccccgacggccgagttgacggggtccgggagaagagcgaccctcacagtgagtgccgacccgctctctccgcctcatttccatttcgtgggttctcgcccgctctctcccctccagcctgcaccctcctcccggatcttcactgcgaccctagcgctccgtgtggtttctggccgcgcggccctcggcggtttcgggttcaccactcaccccctcctttccgggctgcggcgtaggcccgggtgtcccctgggctttggggtgtgccaatttgccctgtaaaccagtacccccggcccggagccgcggcgcgccggggcctcgcggactggctgtcttcccgcggacaacctgtcgcgtcggggatgcccgcggccccgccatgcagctctggccgcttctatctgctgcgtgctgtcccggggacaaagacaggaaggaccgcagcagaacgaaacggtctttactggaaaaacacctttctagagtcctgcccttaaattccgactcgggacgacccgaggcatatggcacactactctcacccactctgttttatatt

SEQ ID NO: 2326 - DNA, 6000 bp, Homo sapiens
gtatgcttttctactcacttttagctgctgtggtcagcccaaattctggtctgattcctcagttggttaagactgcacagacatggcaccacctggaacttctcactcaaagagtcataaaaaagttaaactcaccctatgacacatttctaaaaattattgaactttgaaattcattattgcactgttctctctacctatcattttgcctgaaaattttttataataaaaaattccatgctcaatataaatattttaaaaattaaggctatgggaggtagaaaatgaaagttccctgcaatcccttcatctatacatagcccctatatatagccaatagactatcttagtaaagaataatctcttgactcagactatctcagaggaaaacattatttcaagtaaagatatgagatgagatagtcttaacacagcttcctcagaattacacatcactattccttaaagtgctgttgagagcactagctttgttctgcattttcttaaaccgtagaagtaactaaaagttatacaaagaggggaaaggattttgtgtatctcagctgtaatatttacttaattgtaataacattgtaaactctgaatattgagaaacaaaagttacgaggtagccaggcatggtgactcatgcctgcaatcccagcactttgggaggctgaggcaggtggatcacttgaagtctggagtttaagaccagcctggccaacatggcaaaaccctgtctctatgaaaaatacaaaaattagcagagcatggtggcacatatctataataccagctacttgggaggctggggcacaagaattgcttgaacccaggaggcagaggttgcagtaagccaagattgtgccactgcactccagcctaggcgacagagggggactctgtctcaaaaaaaaaaaaagttaggccggacgcggtggctcatatctgtaatcccagcactttgggaggcggaggcaggcagatcacctgaggtcaggagttcgagaccagcctgaccaacatggagaaaccccgtctctattaaaaatacacaaaaattagccaggcttggtggtacatgcctgtaatcccagctactcaggaggctgaggcaggagaatcgcttgaacctggaaggcagaggttgcagtgagctgagatcgcaccattgcaccccagcctgggcaaagggcgaaactcagtctcaaagaaaaaacaaaaacttatgaggtaattacatttagagaatgaggtcacaagaactgaggacacaaagggatgaaagtggccgggcatggtgcctcgcacctgtaatcccagcactttgggaggctgaggcagatggatcacctgaggtcaggagttcgagaccagcctggccaacatggtgaaatcccgtctctactaaaaatacaaaaattagctaggtgtggtggcgtgtgcctgtaatcccagctactcaggaggctgaggcaggagaatcacttgaacctgggagacagaggttgcagtgagctgagatcgtgccattgcactccagcctgggtgacagagcaagtcgctgtgtcaaaaaaagaaaaagaaaaggggtgaaagtaaaagcaactaaagaaatagttcctcatcttccacaatagaaagttaatagagctaaatctataactgaaaaaaatcaaaaaagaaaataagcatgttatttagaaatacggtagaatatataaaaatgaacagttaaatgaattgaagagggttgcatctgggaagcagaaatgcagagtttgtatgcttgttattaatatttgttataaaacaatttgatttttaaaattatgtatatatggtaacagtgattaaatagaaatttaaggtagtaggaacaactatgtgaaattagattagaattggtgatatcagcttgaactcatgattactaatatttttttctttagtttcatctgctgaaaaggcatagatgcaatgacacctaagtcgcaataagcttgctaagctcccagatattgttttttaagcaccattttctactgtaaggtgtcaggacactttgcagaaatggctcctttcagtgctgggtgagagaaagcccaaaataaaattagaacatcttgttgtaccagaaagtaaagaactgcttttatatatatatgtcctatcaaaacagctaggttgaaaggagctctcactaaacaaatctcagacactttgaacaccaaaataagatggtaatggattataatcctttgaggaaatggattataactgattcaataatctgggaatccctaaattcatactgaaaacacagatgttccttgaattatgagggggctacatcccaataaattcatcatgagtcaaaaatatcctaagtcaaaaaatgcatttaatagccttataaatacattgtaaagacaaaatatcataaattgtaccatcataataataagttggggaccatctgtatatcattaaacagggcaaaatgtagggctcttctggttgttttttgtttgtttgtttgtttggagacagggtatcgctctgtcgcccaggctgtggtgcagtggcatgaacctggcacactgcagcctttgccacccaggctcaagtgatctttccacctcagcttcctgagtggctgggaccacaggtgcaagtcacctcccctggctaatttttgtattttttgtagagactgtgtttccactattttgcccaggctgatctggaactcctgggctcaagcgatctgcttgcctcaacttcccaaagtgctgggatcacagacttgagccaccacaccaggcggggctcatctttttggcaaaattgtttctaatacatatggaaagagaacaattatcattttgtaactatcatagtaaagactagtttaggaaaaatcaataatactgctaaattgtgagagaggggtttgctgaggagcagaatatttgcaggaaattcaagtgtctcccccatagattgcttattagttgcaagtagaaaaccagcaatttatacagtggagaaactgggatcaaattaacatcactaatgagagacaaacaatatcacgtgcctccaaatgtggtctcttggaaagaatataacctcatgtatgtaatattacaatcaggaatacataacctgaatctaatcatgaggaaacacgagacaaacccaaagtagggaagattctgtaaaataactggcccttaacacacacacacacacacacacacactcctaagagtggtgacaatgtgttaatttgattgttgtaatcatttcacaatgtatatgaaatcatcatgctgtacaacttgaataaatacaatttttgtcaactatacctcagtaatactggaatgaacaaatgaacgaatgataaataattggcctgcactcttcaaaaatctcaatgtcacaaaaatacaaatgctgaggaactcttccatattaaaggaaattaaaaagatatggtaactaaatacggtatgtgatcctgtactagatctatactggaaggaaaaaatgttaaataaagacattactggaacaattgacaaatcggaatatgaactgtagattagattaaatataaatattgtatcaatgctaaatatccttaatttgataaacatacaagaggataccctggttcttaagaaattcacactttagaaataaggggtataagagcatagtgtatgtaacctattttagaatgattcataaaatacaaataataggcttatttatatatttatacatgtatattacacatgaagaatagtaaaaacaagtgtggcaaaatgttaagaattggttaatctgagtaaaggacaacaggagttctctattatttttacaacttttctgtaagcttaaaattatttgaaactaaaaagtttaaaaaaaaaaatgggccgggcatggaggctcacgcctgtattcctagcactttgggaagccgacgcaggcggatcacctgaggtcaggagttcgagaccagcctggccaacatggtgaaaccccgtctctactaaaaatacaaaaattagccagtcgtggtggcgcgtacctgtaaatcccagctacccgggagactgaggaaggagaatcgctggaacccaggagatggaggctgcagtgagccgagatcgagtcactgcactccagcctgggcgacagagcgagactccatctcaaaagaaaaaagaaaaagaaaaagaaatacacactaacatcaaggaaaagagctttcacttaataacagaagatctaagtttgtgcgctacttctgtttgttaaatatccttccttaagcatcacacttttctcacctgcaaaacaccatcccaaacttacagaggtctcttttgatccatacaaattatgtgtatgagagatctaactgtaaattattatacaaatgacattataatattaaatacttaggagtttgccaaaataaagaatggagttcgttttcttaaggtaccgtacacattaactacagttataacaaactacggaataagcggtagtggtgtaaacggtgttccttaaaggaaggtaatgttttttgccctgttccgtcaagtcttaaacgcttgacattttaaaatagttttaaaccctttccggaattagaagtggtatttcggaccgtgaagtaaccgatcagccataagtgtcccatctttaaggcctgctcttttacccgtcttgcagaagttcttccgagagtgggcccgagacagcctcccgcccgaactaaactctccgcagcgcttccggcccttggccccgaagtctagaaccctgggccggccgcaaaggaaggtctgccgcgcatgcgcgccccggcgcagcctatccggagcgatccatctcgttacgtcaccaccagcctagctcggacggcaagcggcgggagattttcaaaatgggagcccagaggcaccgcccaggcctcggaaggtgtcagggagaactttccgtggtttcagcgtcgtcgcctggagcggcggtttagagagccgagcctgatgggcgccaaggccggctggctgcttggagcgctgcctcgaagggactgcgtgaaggaagctaatccggagaacccaggccagagcctggaaatatggcgacctgcatcggggagaagatcgaggtgaaaagactcggcagtctgcagcggggcgggtgggagtaattgtgggaggacacgagaccgctgtgggaaggggagcgaacgaagctaacggctgcggggcgggcaccgaggtgcttagggagggtcccaacggcccagacccctgctgtttaggggcggagcggcccgcccctcaagagacaagagtagggaaggcgggacaggtgagtccctccccgcccggcagtgtcccgaggcactgcggctttctttcagcaatcccgcccgagctaccgcgttagagcagggcagggctacctcccacttctccaaggggatggcggttatctccggcgggagctgcggcgggattctgaccgagccctccgctcccggggattggctggagatgggaggagggcgcttaggctgcactgaggttgaggaaccagatcactagggtgcaccatcaccctgagcttccagtccagcctggaagcgcaggtatccccgcacggagtcaacatgccttccaccctagacacctgctgcatcgaggtgtaatacccgcttgaattttgtcaaattccccactcgatccattttatcttctttttccagccccttcccatcttcctttctactgtgagtcatcacacataatctttaattttaacttttaaggattttaaagttggaaatctgcttggtaaaggatcatttgctggtgtctacagagctgagtccattcacactggtttggaagttgcaatcaaaatggtaagaataaactaatcaacttctctcctgta

SEQ ID NO: 2327 - DNA, 6000 bp, Homo sapiens
tcctcgacgctgtcctagactattatctctccctcctccctaaaaagttttgcatctcaactatctaactgctttagttagtagtgaccaccagatcactccctttcattctttgaagatttcagcccctgttaactttcacacactcttttacaactcctgacatagttctcgatttcaatatgctcacagatgaccctcctgtcctctcatttaacccctctcctcaaacagcttgtcttctaccttaccacagccattcattttttctggttacatcctagaccttatcattaccagtaattgcaatccttctataacctcaacttcaaatactccattctccaaccaccattcttatctttttagttcaccccctactacacaacaatccaacaactctgattcctccattcttcaaacctttcattatctcttgattctatcatatttccactgtccctcagctcttggtgtttttattttccttctcacccagctaaaataccctaaatcacaatcttggttaaattcgactcttcacctgcacacatagagctgaaaatggtaggtgaaaaaaaaacacaaaacctgctgactagtctccctttaaattcatcatctcaaatggacccttatgccaaccagcaatgacactgtatgtatttccctggctaagaccatttgtacactagaagacattccataagaatgtcccaacaattctcccttctgtctttaacttcatcaattattctctccactggctcattcttatcagcattcaggcattctattatctgaccccatcgtctcccattgttttatttttccttcttcaagactacttcaaagagttgcttatactcaatgtctcaaatttcttgctacatgctctctggaatccattctaggctctagagcccatcatttaatcaaaacttttcgagccatcattgttcttcacatggctaaaacaaatggttatcagaccttaattcacctgaccaatcaattgcatctgacacaaataaacacttttcctactagataaaaaccctttcttaacttggttttaggatacaacactaatctggtttttctactgttttcctggtcactcatcttcatctcccaggcttctaaatgcagagtgctctaagacttggtcatttttttccacatatactcattccccaagttgttctattctggtctcacaggtttaaattccatttatatactgcaaatttccaaatttctatctttagtcagcatacctctcttgaacccttcctgcccacctaacatctctggaaggcttaagaggaatctcccaactaagctcctgatatcctcaccaaaatttcagcagtcttgcccattttgttagatggcaactccagtcttccatttgctcaggcccaaatccttgaagtcattttcttttccacctaataacagcaaatcccactgaagctataaaacatccagaatctgatctcatgagtttggtgtaagctatcactatcatctcttaccagcatcactcaaatagcttcctaacagatctctttgcttttaccctcacctctttctactctaaccctcaacagttcattctcaacacaggaaccataggaagccttttaaagagtaagctagatcatgtcactcctctatttaaaatcctgcaatggcttcattctcaatctgagtaaatgccaaagtcctgaaaataatcaatgaggcattgatcagcctctgttaactttctgatctcatctccaactactctagctcttgtatggctccagctacattggctctttgttgttcctagcacatgccaggcatgttcttgcttcaagatcttggcactttctgcctgtaatgctattccccctagagagttacatggcttactcctttcaatctttactatttctcagtgagccttttgtaactacactaccacaatatacactaccgaaaaatacacccaactgcctcttcatccttctttcttgctttatttttctccctagctcaactatatgacatactatatattccatatatatattttttttatatatatctggtgtatatgcacacatctatcgtgggtgtgtgtatgtatattgtctctctacaaacacatacacatttttcccctccccaagtagaatgtactccatccatcatgagggtaggaatttttgttcattccagtggctgaacctgtgcctagcacacaggagatcaagcatttctgctaaatgaatgagaatatgaatttaaatatagtaaataattttcctgtaggttataacaactttagaaatcttgcaagttaccaatattttatagtgacagttgtccactaaactacatactgaaaaaaaaaatcattcaaaaggagactaaatgttcatgtaataagtacagggttattccaataaacaggttgactctattcctctaaaaactggtccaggtcttgtaaagattagaagaggaagaaattagatggcttgaattgtcacaaaaaagctattattcgggaaatgacaacttcctaggaaatgaagattcttcagcaagctattaaaactggacaccatgcattctaatttaaatactgaatgcctttctacaattactcagtgaaagagcataatgaattcccctccaggggataaatcaccacgaaattgcttaaactttatttctgttaaactactaaaatatttaatttttcaaactattttaaaaaccaaaagactgtaaaagacaattttttaaaaagacacagggatcttgctatggtgtcctggctgagggcagtgatcacaggacactacagactgggactcctgggctcaagggatcctcttgctttagcctcccgaatagctgggactataggtgcatgtcactaccctggcttgatttttacagtagaataaaaacataccagaagtggttaataaactgatttatataaaaatagtgataaattgtaatgcatttaagaaaaatgaacatggattctttgtagaactgttaattaactgtgtgaacacttttaattcaatttctgtatcagtttcaataattggggcaaggggattccctacttgtttttcaatagaaaacctaggcacagtaaagcttggagaggaagattatagttaacaggctcctgcaaacaaagaaggatttgcggatatttcagattcgaagacaaaagtgttcaaaattgacactagaacaatgaccctcagtgtcattcttacagctgagaggaaaaaaggaagtgaggaatacttagaagcatttacagtctaaagccaaaataattgtaacgctgtgtaaaagcatttcaaagactgctgttaactaatgatgtttagtatcacatgaaatagtctaacccatgcttattgtagtttattagtcttacaaaacacgtagaagttaggagtggtacacggctctgatttcaaagagttttaagtttaagacatttagaagaactctaacttaatattgttttctccccctctctcccaattgttagatgctcttccaacaaacaaacaaacaaaaaaactcccttttttaaaataggggagaactaagttctcaaaaagctcacaaaccccaaacagcttttggttcaaatacaggttctgagcctttggttacactaacaaagtattagtgtcaggtggctggtatacaatgaatattctcagaatatgggacaaactactgcaacataaatgccactatcataaatgactagttagcagtcctgttgggaaagagtaaaaaaataaaacatgttatttggacagttcttcctcttatagatttttaccatcaaaaaagagaaaataagcttatgtagttaatgggaggtgggaattcggctttggctgtcattcattcacaatacgtattaaatgcctacaatgtacgaagccctgaagagataataaaggtattctgagtaaagacatcaaccttgatctcaatgagtattagatacaataaaaggaaaaacgggtaaggggagaaagtgcctagtgctacaaaagcgtaccaaaaaaactataggatttctactgggaaactacttgggacaaccccagtcatagctgcgtacacgctgttctgagaaaagcagagtgacatgtgggcatcatttctataaagcctgggagtggacagcgagtattcgacttcatggcggcaagatgccatgactcattccactcaacaaaacgtggaagccacgacttcccacaaccaaatatgcacatgtgacaatatatccattttgggtgctggaggagtgtgggggtactagagagtgctgtaagttctaaaggtgccttcctctccagcaggtttagcttcagggcgggagtggggtaaagggggagtggagactacggcatctaggtccattctcgaagtccctcgcgggtgtggcaggcaacagcggcgacagccgggtcggctggaggggaagaccgaggcgcccccaagctctcggcgtcgcccgcgctccatcagttccagctgtcccgcaggaaccgctgccacgcgctgctgctgtctccgccacctaaggcctaaccaaaggctctcggagaacgtccctacattctttccaacctggcagatggcagctaacggccaaacctctccgggctattcacgtacctggagaaaacgatccccttgcggaggggagcacagaggccaaatcagctcttgccttcacttttcagccacacagcgtgttctcacggccaccggccaaaatggcggtgcccagccgccgcacgcgcaagccataggacgtagtgcgcgcgcgcgacatagagcgtgaggcggaaccctggaggtaggtagggagatatgacgtcattgagctgcgacccttgttcaacgccgttggcgaagccagctgctggaggtgccgagaatctgagtttcggcaagcagccaggtctggaaactgtgagtgtgtgggcttttctccgacgtcgagcgtggtcctagcgtaaacagatgcattcgcctctccggtttcaatctttttttacgtttgcgctttcctcaaggccggtgggtcaggagtggagccttagtcattctaacgctggaggtgtcagtaggaccaacagagtctggtgccgacacggcttactgttgcgcgctcttctaggcctcaacttcctctcaactgtgtggtcagttcagggccgggaatccaatcttttccgagctccatattttatccacttggtggcgtccagtcccaagtccggcagttgaattctgccctaaagatgggctttatttctatctttttttaggtaacaggacattcagttagtaatgatggttgcaggttgaatagtctcgccctagatctcacctaacttgcaggcaagtgacaactagttcataactgaacctattcatctgtttattcattcagtaaattacttattgagcgtttaagcctcaggccttgccaaagtttacagtccgttgtgtctgccgttatttagtaagtatcaagtgcttgtgtgccgattaaagaacaacttcggatacaatgggaggtgtcaaggaaacggtatgcagaactattgcacctattttgaatagcatatataacaatgttcagtagcagtaactgcgctaccaaagcagttttacatattgttcacgatccagtattgaagtgttttttcacatatgaatagacttagtaaaattaacaaaagatgtgaaagatgaggtcaacctttttagaatgggccagttattcacttcaaaatcttgaagccattttcctgaccttatcttctatggtaagagcatatgtaagtgaacttttaacatttttttcttatttttgtgctttttgggacagtgtcttgctctgttacgcaggctggagtgcagtag

SEQ ID NO: 2328 - DNA, 6000 bp, Homo sapiens
cagctcaattcctaactaatgcaaatcccacaataaaggacaaatgatagaaaaaaggcacccatttcaaggtgtaaaaactatttatctcagtatctactaatctgcacatatttggcactcaataaaaaaaaaagacaaacaaaaagaaaaacagaattatcataaacagaaacagacccagagatgacccagttgttggaactaccagacaggaatcttaaataactataactatgagtaagatgttaaaaaaaaaaaacaaaaacctagaaaggtagatgaaatgtgttaacagacaggaatttcaatagagatgaaaattctacgagtcaaatggaagagctacaaataaaaaatataatatcacagatgaaaaatttcttaggcagaattatcagtatattcaataaagccaaagatgaatgcagcagatttgaagacaggccaatgaaaaataccagaattgaaacacaactccaaaaaaagtgaaaaaaaatagagtacccaaaagctgtgggataataacaaatggtctagcatatgtataattggattcccagattcttagaaagataatagagaagcaatagggcaaaagaaataattgaagaaataatggacacaatgtcttttacaacctagtctcaaaagtcatataccatcagttttgccttattctactggtcccagaaaccaatcctgacacaatttggaagcggtccacagaagggcatgaataccagaaggcaaggataactggggaccattttgaaagctagctactactaatctggtgaatggataaacaaactggtacacccatattgtggaacagtaatcaacaataaaaaggaataaactacagatatgtgccccagcaaaacccacaagtgaattatgctaaatgaaagacactagacccaataagctacatacagtatttatatcggcattctgggaaaggcgaaaccaaagggacccaaaactgagctgtcaggggcttggaaaggcccagaagactgaccataaagagacatgagggaactttgtgggatgatggcaatgttatatattcgattataatgctgcttatatgactgtacatgtctgtaaaattcacagaactgtacacctaaaaagggtaagttttatagtatgtaaattatacctcaagaaagtgctcatagaaagacagagaagggaatcttgaggggaaacagaagaggcttggttgagaggatggatacaggagtcataatgtgcaaataataaaagtttctgaaagaaagatgactactaaactaataacattataaagtccctcaagctaaagaaatttctccaagcttgagtctgcaggtgaaaactgcctataaaattatgggttacaagggtgagaaaagatatctggcaaatgccatgaactcaagaataaagagaaaaaccttagatgcttccagaaaaaaacaagttacttaggaaaaaaaaaaaagagaggtaggcataggcctttatatccacaacatggcaaaagaagatagtgaaagagcattcataaatttttgagagaaaaggactgccacccaagaattctatcccaacaaagagtaaaaggaaagtattttggcgtatgttatcactcatttatccaattgagagaaacggccaaaaaaaataaatgaataacaactgaatcatagtagagatagaggaggaaaagagaagaccttatgacatatgtaattaaatctaactagggaatagtaaagaaattggacagagatatatgataaaaaaaaattcagtgcattagaattaaaataaagcatctaaacaaaaggaatattaaaatcagaccagtgtacagtagtatctttatctgcagtttcatctccgcagtttcagttacccttggtcaatcatggttcaaaatattaaaagggaaattccagaaacaaacaattggtaagttttaaactgtgtactgtctgagtagtgtgaagaaatttctcaccatcctgctccatcccacccaagacataaatcatcactttgtccagcacatccaccactttgtccagcacatccaccactttgtccagcatatccacactgtgtatactacctgaccgttagccatcaacatcatctgctcctgatatccaatcatcaacatcatcgtggcttgatgatccagaatcaccagaagcagatgctcctccttctgaagtattgtcagaaggttaatagtagcctaacactacatcacaacacctacattcttcacctcactcgctctcatcacatagacattttatctctcacatcatcgcaggaggaagggtacaatataatattttgagagcgagagagaccactttcacaaaacttttattactttattacttctattgttataattgttctattttattattaattattgttaatctcttactgtgcctaatttataaattacactttatcacaggtatttatgtataggaaaaaacatagtattaatatagaaagggttcagtactatccatggttttaggcatccactgggagtcctggaatgtatcccctgggataaggggagatgcctgtacaaggaaactgcaagtgactatttccaacagcttttttgtttgttagtttttacctggtttgcaagatgagagtgaccaaacagcttgtgacccaatttcccgtactgttccagtcctttccaactgcttggggtcagcaccaggaggtgtcttgtttggtgtagtcatttttaaaatattctatgtagaaaacaagaatgcacacattgtatcaggaactgggcatctttctacaaaagttttttaccaagaaaaatttaatggaactcatataccctgacattaatcatttattctgaagaatgcagttaatataattaaatcactgtaatttaaatcttaggggctgggcatggtggctcacacctgtaatcccaacactttgggaggctgagacaggaggatcatgtgagcccaggagttcaagaccagcctggacaacatggcaagaccccatctctatttttaaataaataaaaatcttaggaattcaggttttgtttcatatgaccagatatgcaaagcagtgagctatagtagtcaaaagagcacagaatcaaagttttggcttcagtatctcctttaatcagcctagactttgagtaggtctgggctttatttcctctcctgttaaagaggttcacttgatgatttttacttctacaatgctatgcagttctataattctgtgcctgaaaattcaaatgacttttagccctagaaaagtcagactgaaatacttttattctaggaatatataaatattgatcctcattttatttacttaattcctttttttttagagacaggatctagctatgttacccaggctggtcttgaacaccttgcttcaagcgatcctcccacctcagcctcccaagtagctgggattacaggtgtgatcccatcaccccactaagatcctcattttaaatattcattgagtgatgcagagaacagtcatacctgccctctagctgtcaaaagttttatttaagacccagcccggtggctcacacctgtaatcccagcagtttgggaggccaaggcaggtggattgcttgagcccaggagttcgagaccagcctggaatatggtgaaaccctgtctctaaaaaaattccaaaaaatcagcctggtgtggcggcacacacctgtagtcccaggggggctgagacaggaggatcacctgaactgggaggcggaggttgcagtgagccgagatcgtgctactgcactccagcctgcgtaacagagcaagacactgtcccaaaaagcacaaaaataagaaaaaaatgttaaaagttcacttacatatgctcttaccatagaagataaggtcaggaaaatggcttcaagattttgaagtgaataactggcccattctaaaaaggttgacctcatctttcacatcttttgttaattttactaagtctattcatatgtgaaaaaacacttcaatactggatcgtgaacaatatgtaaaactgctttggtagcgcagttactgctactgaacattgttatatatgctattcaaaataggtgcaatagttctgcataccgtttccttgacacctcccattgtatccgaagttgttctttaatcggcacacaagcacttgatacttactaaataacggcagacacaacggactgtaaactttggcaaggcctgaggcttaaacgctcaataagtaatttactgaatgaataaacagatgaataggttcagttatgaactagttgtcacttgcctgcaagttaggtgagatctagggcgagactattcaacctgcaaccatcattactaactgaatgtcctgttacctaaaaaaagatagaaataaagcccatctttagggcagaattcaactgccggacttgggactggacgccaccaagtggataaaatatggagctcggaaaagattggattcccggccctgaactgaccacacagttgagaggaagttgaggcctagaagagcgcgcaacagtaagccgtgtcggcaccagactctgttggtcctactgacacctccagcgttagaatgactaaggctccactcctgacccaccggccttgaggaaagcgcaaacgtaaaaaaagattgaaaccggagaggcgaatgcatctgtttacgctaggaccacgctcgacgtcggagaaaagcccacacactcacagtttccagacctggctgcttgccgaaactcagattctcggcacctccagcagctggcttcgccaacggcgttgaacaagggtcgcagctcaatgacgtcatatctccctacctacctccagggttccgcctcacgctctatgtcgcgcgcgcgcactacgtcctatggcttgcgcgtgcggcggctgggcaccgccattttggccggtggccgtgagaacacgctgtgtggctgaaaagtgaaggcaagagctgatttggcctctgtgctcccctccgcaaggggatcgttttctccaggtacgtgaatagcccggagaggtttggccgttagctgccatctgccaggttggaaagaatgtagggacgttctccgagagcctttggttaggccttaggtggcggagacagcagcagcgcgtggcagcggttcctgcgggacagctggaactgatggagcgcgggcgacgccgagagcttgggggcgcctcggtcttcccctccagccgacccggctgtcgccgctgttgcctgccacacccgcgagggacttcgagaatggacctagatgccgtagtctccactccccctttaccccactcccgccctgaagctaaacctgctggagaggaaggcacctttagaacttacagcactctctagtacccccacactcctccagcacccaaaatggatatattgtcacatgtgcatatttggttgtgggaagtcgtggcttccacgttttgttgagtggaatgagtcatggcatcttgccgccatgaagtcgaatactcgctgtccactcccaggctttatagaaatgatgcccacatgtcactctgcttttctcagaacagcgtgtacgcagctatgactggggttgtcccaagtagtttcccagtagaaatcctatagtttttttggtacgcttttgtagcactaggcactttctccccttacccgtttttccttttattgtatctaatactcattgagatcaaggttgatgtctttactcagaatacctttattatctcttcagggcttcgtacattgtaggcatttaatacgtattgtgaatgaatgacagccaaagccgaattcccacctcccattaactacataagcttattttctcttttttgatggtaaaaatctataagaggaagaactgtccaaataacatgttttatt

SEQ ID NO: 2329 - DNA, 6000 bp, Homo sapiens
tccactgtaaatcagatttttgggctaggactggttggagtttaagttaataacgaatactcaaccaatatttaaattagcttcacacttctgccaccaaccaaccaacaaaactcttggggcctcaaggaaagggaaaaaggacaaaaagattgactcacagtgtaagagtttaccaattacaaccaggtgtaggatagcctgttcactagtatatctggaaccctggcagattgaaacaagagaaacaaatgatagacattaccagtgagtggaggtggtataaaccttgccctctgtcagcaattctctctctgggagtggcaagttggatgatgctattttatagaagtggcaaagtaaagagcactgggaatcatatctcagtttcttctatcttgctccctggaccagtaaagttactctgaacttcccttgaaataaaaaaacctagaaataggattacttaccataacaacttaaaagaatacacttaaaaaaagttgcacagaaaaaccaaacaagattgtatagctctacttcatgtatttatgagttgtttcagaaaaagaactttgatcttgccaggagcggtggctcatgcctgtaatcccagcactttgggagcctgagatgggtagatcacctgagatcaggagttcaagaccagcctgccgaacatggcgaaaccccgtctctactaaaaatacaaaaattagctgggcacggtggtacgtgcctgtaatcccagctactcgggaggctgaggcaggagaattgcttgaacccgggaggtggaggttgcagtgagccaagatcactctactgtactccagcctggtgacagagtgagactctgtctccaaaaaaaaaaaaaaaaaaaaaaaaattagcccagtgtggtggtgcatgcttgtacttccagctactcaggaggctgaggcaggagaatcgcttgaacctgggaagtggaggttgcagtgagccgagagcacgccactgcactccaacctaagtgacaagagtgaaactctgtctcaaaaataaaaagaaaagaaaaagaactttgatcttattgtttatgtttcagacacattggaaagagagagaatagaagggattaaaacattctattatgaaaatagtagcatggttctagtctagaatttcctcctgattccactaacatcatagaagtgaaaatgaccttttcttgtcttttgtcttttccccaaaaataacaagaagttatccgaaatagctttgcacttctaattacaattcgagacctttgacatggcaaacagtcttccagtttagtgtgattgtttcccacaaaactgcctcagtaggacttgatacactcaaagctctttcagccaatcatatcctgaaaacagtctcatgaagtgactcatttctcaggctgcacacaactaagggcacagtgttttgttttattcatcctagatacagattatgatcattcttttcaggtggtggactcatctgtgagccctggcaggtgacccaattcagaaagccagaaactcaaaagctgactagatgttttatctttgcatatggagctgggcctaccagattaagatccagaaattcagtaggctgctacagtttaactcgtagctatgcagagttaacagtgagttcaaaccacataaggctagagtagactttcaggaacgtggcttaaataactaaaaatttctcgcctagaatgtagcaagatggagtactaaatgccaagacattgacttttttttctcccttggatttgaatattacatgtctgtaaaagatctggattttagagaatgcttttcttcatatttagtattttaggcccttctctaatcacaaaagattgtaggtaagtatgcatattctcactcataggtgggaattgaacaatgagaacacaaggacacaggaaggggaacatcacacaccggggcctgttctggggtgggaggaggggggagggttagcattaacatgttaaatgacgagttaatgggtgcagcacaccaacatggcacatgtatacatatgtaacctgcatgttgtacacaagtaccctaaaacttaaagtataatttaaaaaaaaagattttaggtgagtataatcagaacttatgccttcataaatacatagtcttaataaaatcatttacataataatttcacaaagggaaaatagtgtagttctataccaaccatttgctctaatttgttattctctattttgtttcaccttgctgcctgctttctagaaagaaggaataacaatatccattctttgaatatgtttgtccccatcatctaacatatagtgcttaattgtgaatgcatggcagaatatatttctgaaaaatctagtagaatagcttaggtatactgctagtccccttccatttactatattgtactaccactattaataaggagttaagaaattttcataaccaagacataggagtgttaaagtgaaaaaatatgcatacattttgacccagcaaacctacttttcgaaatctatcccacagaagtaattataccattggaaacaatatgtctactgaatggagtagattttggtatagccatatcatgaaatatcaatatcattcacaagaattagttgatatccgcatagatgttcatatactattaaatttaaaaatgtacgttgcaaaataatatgtatactatagtcccggctaggcacagtggctcacgcctgtaatcccagcactttgggaggccaaagcaggcagaattacttgagctcaggagttcaaaaccagcctgagcaacatggtagaacccatctctacaaaacacacacacaagaagcctgggcaacatggcaaaaaccctatctctacaaaaaaaataccgaaattagccaggtgtgatggcacgcacccatggtcccagctgctcgggaggctgaagtgggagaatcacttgagcctggaaggcggaggttgcagggagctaagatcgcgccactgcactccagcttgggaaacagaatgagaccctgtctccaaaataaataagtaaataaaagactaagactaatatataaaatataaaaatgcatgcttatgtttttaggaacttagagaaaaatgtagatgatattaattaactgttaacattggtttcgtggaggacagcacagaagagctctgggaaggagacgataggctttatctttgtgtacttgtgttactggcttgttgcaagaagcaaaaacttttttgtttgaaagaaaagtccaataaaatatttaaagaaaaagaaaccccaaagcactcttgtttaaaaataaaaaaaaaaatcaattgtacaggggtatataaaccagaaagggaaatcaggtaatcttcttaggtaacctgctttatttactcatcaatatatcaatggtatctttgtatgtcaataaagtagatcttgattactcttttaaatggctttagagtatttcattgtttggatatattataatttaatcaattctttattgttatacatttacagtatttctagtttttctggttataaacaataacggttatccttgtatataaatcattgctcacttgttccagaagttaaattgctgagtcaaaggatatgcatactgctagcataccttctagaaagactgtagcagtttgtagtcctaccaatagtttatgacatgagcctaaagaattatctaaggaggttagctgactagccattcttcctgtaagcagcaaaaagaatttgcttagattagtaattggcaacatttcacttcactttgatgtacaaaaggatgtgggtagaactacaattgtgcattcagacatgataattcctactaactgggggtaggagggcccacaggagtgtagactagaagtagaaagaatgaggaaaataagtcttttgtagctgtatggcgattgaagaggagataaaacaaactctccagcttttcaggttgggtgacttgcagcgccatcgtctggcaaagccgccaaaatctttcaatgtccctaggaataaagttgccctgagtagggccactcaggatgacgccagatgatatcccttattatagttttaggggaatctcttcctaccttcgccagtcctgcagtgaaaaaatgtacttagactgctgtacatttccaaacccttcaacatacagacaagtaatttatacatacattagatgtaaaggtgtagaaaaccccatacagctttttaaaaatatctcaagacttaaacattcttctgtttcaaccatccaagatataataggaaaagacttgctttttaaagcaaaattgctctttaaaatgtggcatccctaagtagtgcgctttcatgtaaaataaaaaagtccctttctcggtgtagtagctgtgggaaaattttatatgctttatattccaaattggtttcaactagtgagttctctcccgcatctctgcatgactcttaacagctttacactctctccatccttttcatctctcccgtctcgtcctttctgtcttcccgcctgcagagcccgcccctcccgtcccttcgcacagcaccccgcccgccccttcgcacagcaccccgcccgaccctacggttctagcccagcctcactgctccttcccagccgcctccgctgcgtgccgccttccacgcgctgacgtcacacgccagcgccggtgacgcgccggccgctctcccttagtccgcattcgctccagggttttgggaccctaggttgcggagtccttaccctaccctggcctctcgagcagttgtccccataactcggaatctagagccgctgttgcgaggcaggagcacgtggcagtcaagtagcttcccagtcccgaacgccgcccgtccccaccccgccgtggccactagcaacgacctctgtgaagttggagaggcggtaacggaggcactccccctgctgcaccccgccgtttctacggggctcagaaaccagtttgtttgtttcgtcggggtagtgtcgacctgtcttacgggcgtcgcccgagacaggacggagtcaaacccgtggtatcaactgaagacgagtgtcaggtgtggagagtctcagtgccccctttcagtctggactgtgagctgctgctggttagacagtcttggtttctctttcaggatgtcattttcaaaatgcgggatggtacctctgctttattaagccccgtaggaagactgccacacctagactgatgcttattagtcatcaccgttattcctactaacgtcctgtgtcactgaggtgagttccacttgggggaaggaatgacatgcaaaatggtaaaaatcatcctggaaatgagatgtgcgtagaactgcttatattgagattacacagataccttaagtgtttgcagggaaaataccttaatctcatttaaatgttaattctctaagacactctgtattaacaaagcgattcttggacattacggtatttttaaaaactagagcggtaatgggattaaaataataggaatcttagtatggataagcaagcatttgcattgcttatgttgtgtccaatcttaaattactgataaattttaattaggaagcgaatatgagtagtagttagctggttaccctgtaatcttagatttctgtttccatgatttgacacagtttccatatgtaaggcattaattgttgtactactttaagagtttatcataactttttttgcaggcctattttttgttctttaagatctgctttaggaagcagaaatattttttattgccttggtatgtttcattagaaatgtttatgaaggattaaaagtggcatccaatctaagttaatgacctttttttatgatgcagcagtattgtagagctgatggaggggagccaaatttggagagaagtaactccttgtttctagtttacatttgtc

SEQ ID NO: 2330 - DNA, 6000 bp, Homo sapiens
tcctcattttactgatgaggaagctgagattcagataaattaagtaactatccaaaagtcacagagctagtagatggtagagctggattaaaacccaagcggtctgattccagaggctgtatgtgtagacagtaagagatggctgcttctgagtaaatgttcaacactcaacacttgtaattgcattaaaggaataatcacctctcttaactttgcatcattgcgctgcatttgtttttaagagaacttcgtttgcaaaactaaatcaaatacagctctctacatgctaggaagccatgtgtcagttaaaacatagccactctccatgccctcaggcctttgccgtttgatacccgctcctcttgagtatctttgccctcccactttcttcaactgttttcctatgcagctatcagatctctaccatggaaataccaatcacaggatcataaggagcttactctctctggatgtcttcaaagagggctctgtctttttctctggatcccttccagctgacgcagcacagggccacccaaagtacacgcgcaatacacgctgaccaaagaaaagtatatataaatatgagatatgtgttcaagagaagatggaaaattttaataggatggtgagatttcccatatgttgtgattatctttttatataacagaaatatattgataatgggtttttggagaagaatgttcccatattttatattaaaagtctattttgaatttaaaatatctatagaacattatatgtggtatattataaaaccaaaaaagggctgcttacccagtcaacatctccccactcctctgatttttatatgcatttctcagcttctatgttcaggacattacatcagctatatatttctgtcatcacagtgatttgtgttattaaaaacataattcttagctaaaacaaagttaaatttgagataaaccatcatccatataattttgtaagaacattcttatttataggctatacaggtgagtgtcccttatccaaaatgcttaggactagaagtatttcagatttcagaattttggggggattttgtatttgcatgtacataatgagataccttggggctgagacctaagtctaaccataaaatttatttgtttcacatacatattatacatatagcctgaaaataatcttttgcattttaataattttgtacatgaaaccaagtttgtatctagtacttacatgtggaattttccacttgtcatgtttcagattgttggagcactttttaacaaaaactttcatttaaaaaagattattgcttaggagtgggggccagggaggcagtgtataatgacactatctttgttttgctagataagtaagtaatttatgtctatttggagactttatggcaataaatgatctagtaggttagccaatttggttgccctgatggctatctaccaaaaagatttaatttgccccgtgttctacatgatttagtcatcagggacatttgggaggattttttctattgggagatatattaggttaggctgtgatagaaaatagaaacaaacatgcaaaggctcaacagataagaagtttatatcttgcttacatcacagtccaggaaggctcagattttggagcaattaggatttcagatttttagatcagggatgctaaacctgtgactgacacacagcttcctggcatgtaaagaagggccacaagaaagacatggggcatggaacacctcagatgtgatgcccaggagtttagatattttaaggattttaaacatgagaatatctaaacacgatcagatcagttttagaaattttcctaggagaagtgcagaaggtaaattggatttaagaaatgtggagcaattaaatgaaataagtcaggtacagaaagataaatattgcatgttcttagtcatatgtgaaagctaaaaaaaaaccttatagaagtagagagtagaattgtggttatcagaggctgggaagggtaaggggagatgtgtatagggagaggctggtttacggatacgaagaaacagctagattagaggataagttctagtgttttctagaacacatgtaaggtgaatatggttaacaataatttagtgtataggttctaaaagccagaagagaggattttgaatgtacacaacacaagcaatgataaacatttgagttaataaatatgctaataatcaaatatcctgattttgtcactatacattgtatacatgtattgatatatcactccgtacatatatatcactctgtatatatagatcacataaatatgcacagttattccatgtcaactaaaaagggaaaaaatccttccttacaaagatcactgtttggtaagcagtttaattcactgtaataaaagcatctcacaatgcgaaaaaaagtggggggcgtatttggaggtaatgagaagctaactgctgtttgctatcataggagaaaatatgaatctggacagtggcagtggaaattgagaggagggaaagggatgaaggggtactaagttttctctagacctcagtccttgctatctactaaaaaaacctattcttcacatttttctctatctcacatttattattcattaatatttcagaagtaatatgttgggactaatattaatgtattaatactttgtggcaggctctgtaatagtgtttaatatgcttcacctattttaattttcacctttttttttttttttagaaaagcttactttataataaggaatctgagacccagagttgaagcaaattgcccaaggttacacagctggtcagtagcagacacaagatccaaacccggtttgtctgaatccagtgctgacgtccttgtgcctcacctatccgccaccgccaaactgcttcctgttcttccagttgtcactatccttgactcattgcactttgacctcaatcaatcttcttatcttttcttaaaagaaaaacatgtttgctgtctaatcttttcaactattatccagtccatttctctttccatgtaaccttggtcttcagtccatgacaatatctatcttctcacagatcatttcagctgttcagtttttgtgccttctaaatttactcacactaaatattgtcctgaaaaattcaaaatatttctccatcctttattccctggtgctcacctgagtattttgcattattaactacttctttcttcttgaaagtatttctcccacaagagctgcaaacctgtgttctcccagcatgttgccattttaccccagcagttccttttctgtcttttttgccagttccttcatcagaaacttctatgttctgtgcatgccattagaggagctgaagttttgtttggttccttgttttctttttgtcttctactattattccctttcaatatgacccctcaatttactcttcatattacaattttaattatcatcctagagtacaaatatctattttcctgttttaatttctcaagattttgtcaagacctaatttcaaattaatgttaaagacatttgcttagcggcttaccaacaacgcgacaagacacattttacacagtctcctcatacactccttccctgctgagccagccacctttcccagtaaagaaggtaaagaagatataaaaatgattcattctgctgttagtgtcagtcttttgctcaactcccatttcccccaagtatttagattttttttttctttaagaaaataaatgccagctgggcatagtggctcatgcctgtaatcttagcactctttgggagtccaaggtgggagggtcgcttgagccctggagattgaggttgcagcgagctgggattatgccactgcattctagccaaacagacagagcgagatcttgtctcaagattaaaaaaaaaaaaaaaaaaaaaaagccaaccacttacgtttacagaattaaaattgcagcctgccgctgacaacctgagaaaaagagacaaagtcagtggaatagcccttgttatttatgcaagtccgcatacagctagccctggagttcctggagagcaaggaacctctgtcccaaacttgactcagagcttccaaagttggtgtatttcaacaagtaagcattccattgagccaacaatttggtaggctaccagcggctctggagcgcctgttgatgatgacagtttttgtgggggcatctcaatatgacacacaattgacactgaccagaaacacagcgccaaggacactctagtcctagccatgaaatgttatgattccaggttttcaggacagagcagagtccacttctcatctccagtatccgtaaaaatttgtccaaaatgtaactaagaaaacacaatgatattagttacttctgctccccgtcaccctcaaccccactgattacgagatgggaactcacacaaaactttgagacaaaagagcaacaagtttgctttattgtttgcttgttttgttccggagtcggggccgggagggagtgcaggaggagggatccaagcttccaagcctctgctccgctctccttctatccagttggtctttagggcactgaaggaaactcttcttcagaaataaccttttaacttttcttctgtcagctgcctgccaatcacggagccagaggctgaggggaggctttgagccggtctgcgagtccggaaggcaaagatcgcgaagcttggcgctccagaacgctcagggggcaggtgacacagtcgtgggttccccggcgggcgctggcttgacagtttcctccccgcccactggcaggggagcgccccgccgggctgcacgcgcgcgcgcgcaggggggcataaaagccgcggccgcgcggagacgcggagctcgcccaccgcccgccccagcagtggctgcaccatgcacgtgaacggcaaagtggcgctggtgaccggcgcggctcagggcataggcagagcctttgcagaggcgctgctgcttaagggcgccaaggtaagcccggcgcccagccgcggaaatttctctgcccacacactccgagactcgccccgccgcccgaggtgcactggcggagacagggaggccgcgcccggcgtgcccactttgccacttccaaaatttgctgaagctgaggctgtgagcacacctcagaagtggctgggagggaacccaaacctaattgccaaatttcaggtccaggaggggagcctcttgtgtgtttattgtttgtccgtctatttcgtgagctgcgcaggcccgcgattcctctcctcttgtctataggtagcgctggtggattggaatcttgaagcaggtgtacagtgtaaagctgccctggatgagcagtttgaacctcagaagactctgttcatccagtgcgatgtggctgaccagcaacaactgagaggtaagacaggggaatcaatctgtcaactgggaacgtgctctcaacaagcaacaacctgaaggcagcccggccagggggccctgggtgccgcctccgctgcctcctcgagagcagctaccttgaagctccaaaagacagtttggactgatacgtttccttctgacagcccaatagctgtaaaaccgaaagaaaggcaagactgctggagaaatccttttattgtagtcatttggcagcattaatgtaatcaaaattcctttatgtattcaaagacagtgctgctgcagtaattattaaatgattgaaattgcagacaaaacttggaaaattaaagtaggttaagtaaggtactgttgacaaacaacttctcccagaaagctggagtccaatgacaatcaaatgtggcagtgtttttcgtttaaacatatcagaatacaagttcaaggagcatcatcacagaagtgctagatgcttttgaccatatgttttctccggctttttccccaatgagacagtactttaaaataataataatagtaatcataataaagtatacaatgttagaattgtagta

SEQ ID NO: 2331 - DNA, 6000 bp, Homo sapiens
aaaagcaatagtaataaggcagatatctattgaggataaatttgttcaagtctgatcaaataatcaaagggttcttgaaaggagatcttttagcatttggtagcttgataaaaagaaactgggactgaaatctaacagaagacataacccttcattgcagtcagagtgattccccccaccaagccaggaagctcaagaggcctcagtgatttgcactatttttgaatttaggatctttgcttgagctactagggagaaggatttcaatgggacctccaagttgttgtacacccgaaaatatcagtagaaaagttttcaataaacaaaagttccatttagccgaacctacagcagtaagggagagtgccacctggacagggtcttagggtgtcttgggtaagtcagaagcagaatagttgtagagctttggagtctggacacgagtagtttaaggtgggtctttcaaagtggggaattgagtaagattgggcaacgttcatgatctagtagtttaggatcagttaacatctgtaagtgagagtttgggtaagaaaactgtcattaataagcaggctgtttaccagagtcagaatattattatcttcgatatattgttttgccagcatttcttgaagcaaacactgaatttaaatactggattgcagtcttatcttttccaggctaatgtttcctagaagaaacaactaagtcatgtgtacataactggttcatagttttacctaagtcatgttcacagctgatctcaattcttaaagcctatgattttaatatcagaaaaagtagaacttcaaataaaaatatcagaagttaaaaaaatgacattgtatactaccaagaagaaaattagatcaaaatgatatagtatcccattatgttaaaaaataacaggaagaactactgtcagaaacagaaaaacatgtcaacaattataactggagattttaacgtcattcccaaacaagatttgaacattataataagctcaaaattaatacccaacaaaaataaagcacacacagaattagttgcaatgatcagccatgtccaggactacaaagaaagcctgaatgcatttctaaaagcaacatcatttatagcaaaaattaaatataataaaattagaaattgataaaaatcatatatccctaaactaagaaaacacaaataatttgggggttaaaaatataaacaaattaagatatatttgcaactgtttgccaaaggaagcactacgtatcaaaattgagaaatacaagtaaagcagaatttagacaaaacttgtattttattgatcgactgattgattgcagagatggggtcttgctgtgttgcccaggctggtctcaaagtaacttcaagtgatcctccttcctcagcctccccaaatgctgggattacagatgtgagccaccacacatggcccgaaacttgtatttttaaactaaaaagaagaaaaatgaactaagcattcagctaaaaaagcttgaaatgaagcaacaaagtaaaactaacaaagcaagaaggtagggaataacaaatgagaaataaagtagatggtcagaatggatattagagaatgtacaatggatatattatcatcattattttgccatccaaaactatcatctcccatatctacttgggaggctgaggcaggagaatagcttgaacccaggggttgcagtgagctgacatggtgccactgtactctaactgcactccagcatgggagacagagcgagactccatctcaaacaaacaaacacacacacacacacacacacacacacacacacagacacaaaacacaaagaacaaaacctatcatcaaagaaaacaaaaactcaatatgtaaaagaggtgttattctggctggggccctgctacctctctttctccactgactgagcaatgctttttgaataaccagatttagaagacctgttgtaaaataggtcttgcatgaagctagtgatgaactcacaaaccagtgaaaaggactttctcaacctttaaaatctgctagtggcaaaaagtgtttccagggggtaaggaagaaaaaaaaccaaaaagtcctgagcaactattcgtttttaccttaagacattctgtgtgtgtgtgtgtgtgtgtgtgtgtgtgtgtgtgtgtgtgtgtgtgtgtgtgtgtgtgttttaagtagagacggggtttcaccaacgtttgaaaatatttatcatggtctccctaagatggacggtgttagctaggatggtctcgatctcctgacctcatgatccacccgcctcggcctcccaaagtgctgggattacaggcgtgagccaccgtgcccgaccaaccttaagacaaacaactactgcatgattgtttttggagaccttttttttattcaaataaactttttgccagcattttctgactcaaagtatagcagcaggaagataacacttttgtgagaaaaaagtttgaatacagcttactgctgtatttaaatgaaacagtagttaatatgatattaatatattttggatatattttgagtttgttgattttccagtcttcacccgctgctaggcctgtgggtgttggaaatgcctgtggttctcaattttgtttgcctattagaatcctgatgtccaagccttactccagttagaccagttaagccagaaaggcagaaggtgtactcaagcatctgttttttcaaaatctccttttgtgatgccaagtgcaatcaaagtttagaatcattgtaatagcaaatggttgaatggaaactccaccttctattcaaatcctaccccagtctgcccttagctgttcccttttcacagatctatcaatgtctgaagataactatggcaggctgatcaaatatgcatagagcaggaagacagcaagagagtgatacactgaccatgttccaaatcacaaaacatctcaacaggctagatcatggaccgagtctgatgggatggaatttcataaagatacataaaaaagcatcttggatacagtaaacttaactccacaaatacaggggaatttagacgtgactaagtagcagtacatatgaaaaattattgaggaattttgttgactttaagggtagtgtgagtcaacactgtgatttggctgccagaaaataaactcaatccaaggctgtatcaacaaaggcatactgtccattctgcatgctcattacagcactaagtaccgagccatgttctcaaccgcatacttcatgaacatggaaagctaacagtatggttaaggggggaaactggaactgtcatcttggggaataaaagggatatttagccaggagtaaagttagcttagggagaccatgataaatattttcaaaatatttgaaggactcagttgtggaagtgagattagatttattgtgtaaaactccaggagtcaaaagcaatagagagatagaaggaaatgcttttcagcagtgttgctcatcaataaagggagtgaacagccacacagaatggaaggttccctgtcctttgagatatttaagccttcaagtaaattatgggtgaggagtttcaaatctagagttgaaccagataagaaagtctcttcttccggtaagatattatggacctataacatctgtgtacttaaaagtagattgggagtgaaaggcagacttttgatgttctgtacactgttgaaaccccttagcgtggtcctctgtaacctgctcaccctgccccaaggaggcagctagccaatgccaccagcccaacggaaaccccagtgcttttccaatggggaaatgcagtcacttttctttggatgctacacatcctttctggaatatgtctcacacacatctctctttatcaccccctttttcaagtaaaccaacttcttgcagaagctgacaatgtgtctctttactctccacgaagattctggcccttctcttcacctgtcagaagtttaggattccaaagggatcattagcatccatcccaacagcctgcactgcatcctgagaactgcggttcttggatcatcaggcaactttcaactacacagaccaagggagagaggggacccctccgaggtcccatagggttctctgacatagtgatgaccttttcttggaacttttacaacccccaggacatttccaaactttgagcagggctctgggggccaggcgtgcgggagggaggacaagaactcgggagtggccgaggataaagcgggggctccctccaccccacggtgcccagtttctccccgctgcacgtggtccagggtggtcgcatcacctctaaagccggtcccgccaaccgccagccccgggactgaacttgcccctccggccgcccgctccccgcaggggacaggggcggggagggagagatccagaggggggccgggggaggtggggccgccggggaggaggcgagggaaacggggagctccagggagacggcttccgagggagagtgagaggggagggcagcccgggctcggcacgctccctccctcggccgctttctctcacataagcgcaggcagagggcgcgtcagtcatgccctgcccctgcgcccgccgccgccgccgccgccgctcagcccggcgcgctctggaggatcctgcgccgcggcgctcccgggccccgccgccgccagccgccccgccgccctcctcccgcccccggcaccgccgccagcgcccccgccgcagcgcccgcggcccggctcctctcacttcggggaaggggagggaggagggggacgagggctctggcgggtttggaggggctgaacatcgcggggtgttctggtgtcccccgccccgcctctccaaaaagctacaccgacgcggaccgcggcggcgtcctccctcgccctcgcttcacctcgcgggctccgaatgcggggagctcggatgtccggtttcctgtgaggcttttacctgacacccgccgcctttccccggcactggctgggagggcgccctgcaaagttgggaacgcggagccccggacccgctcccgccgcctccggctcgcccagggggggtcgccgggaggagcccgggggagagggaccaggaggggcccgcggcctcgcaggggcgcccgcgcccccacccctgcccccgccagcggaccggtcccccacccccggtccttccaccatgcacttgctgggcttcttctctgtggcgtgttctctgctcgccgctgcgctgctcccgggtcctcgcgaggcgcccgccgccgccgccgccttcgagtccggactcgacctctcggacgcggagcccgacgcgggcgaggccacggtaggtctgcgttagggtttgcggagaacccgagagtttgcgttagggtctgcggcggacccgagaacctgcgcgggggaaagtgtgtgtgctttaagcttgtgtacgtgggatccaaagttactgagctcagtgcacgctgctttggagaaaaatcttcttctttttaaatagaaagttgttactagagaggcaagcaagttacacgagtgaagggcccggagaggtgcccagtgagagatcccgaaatctatttcagactggtttcctctggggcaaccaaggggtcttgaaccctgcccagtcagcggggctctggagagtatgagttcattttggtcgggaaatgctcgtttctttccccagctgattcatgggactccaaacagattctgggacactggtgatcagtcaacccagccttactttcctggagtgttcatagtctgcagagcaccaggcgctgtgagcgactttagaaaaaaagtgtcagggactttagtaaccaggctccagagctttcagagttcacttgaagttggtcagacttgagatgtaacgggagattagagtcagttagatcacaatcaagcaatgcaaggcttgtttcaactttataagctcttcattcctaaaatctggtcatgagatac

SEQ ID NO: 2332 - DNA, 6000 bp, Homo sapiens
atttgtagacttgtgagcaataccaaacacttattttaagccactaagcttggggtggcttcttacccagcagtagctaatacctacacactttcagttatttggcacctgtgagcaattgaatttgggaaccctgttttaggtagaggttttcagagttcactgtgttttagaattactcagaaaatttacttaaaatagagattcctgggcttgctcctagagagtttcagtaaattgggtgagctctaggtatctgcattttgaccagcattgctaattctggcatgggtagtccatggaatacactttgtaaaccatttttttcatgggaacaaatcactaaaatcatggtgtaatctctaatattattcctcctccaatatccgaagagagagaggagagggtttcagcccaaaacgggaatgggctgcacttatctgtagaaattgataaagagaaagatctcccttgcccagcgtctcaaaaactgcattttacattcagtattgtttcttgattgcattaagaaatacactgcagccgggcacggtggctcatgcctgtaatcccagcactttgggaggctgaggtgggtggatcactggaggtcaggggttcaaggctagcctggccaacacagtgaaaccccatctctactaaaaatacaaacattagccggatgcggtggcacacacctgtaaccccagctactcaggaggctgaggcatgagaatcacttaaactctggaggcggaagttgcagtgagccaggattgcgttactgcactctagcccgggtgacagagtgagactctctctctctttctctctctacacatatacatatatatacacatatgtatatatatgtatatgtgtatatatacatatatatacactgcttttaatttacataaaaatatttatgatcatatataaataacaaaaccttggttttaattacaaaatgttgtttggtggctggtggatcaaatcaacgaggattagctagaggcaaactgcaaagacagagtatgaggcaatcaagaaaaacttaaaatacctaaacaatgacaacctgtgtaacagatcctggaagctggacaagggcaactgcccgtgtccattcccgctgggccaatcaatcagctgccagtcattctgccaatgttcaccaaggactgatgtgtcagacaatccttgagctgatacacagcagggacaagccattcctatcctctcttcacggagcatgcattctaatggggcgggggacacaaatgataaatgagataaaatacatatgacgtggtatagtgtcccccaaaaagatatgatcaagtcccaaccctgggtgcctgcgaatatgaccttatttggaaactctttgcagatgtaatcaggttaggaggaagacactagggtgccctaatccaatgccactggtgtctttctgagaagagacatggacacagggaaaatgccatgcgatgatgatgacagagagtggagcgctgcatccacaaatcaaggacacagggaaacgtcatgcgatgacgtgtcagagagtggggtgatgcaccaacaagccaaggaatgccacggtttgccagcaacaccagaagctgagaggagagcatggggcacactcccttacagccttcagaggatacacggccttgctgacaacttgattttggacgttcagcctctaggactgtgagagcatgcgtttgttgttttaagccacccagtttgtgacattttgttactcagctccaggaaactaagggagaaaaagcaaatggggaagggaaacgggatgctgagggttatgtttgcagtttagactaaagagccacttggacgtcctcactaagatggggaggagggaacgcatgtcaggcagatggaacagcaagtgcaaaggccctgaggcaggagtgtgccaggggtgcttctggctggtattgtttgggctagggaaagcgctgggaggtgagggcaggggaagaggggaaggaccaggggataagggacttgcaggtcatagcaaggttgttccattttgctgaatgagaaagccactggagggttttgagcagaggagtggcatggactgaattttttaaaatgtcaactttaaattctgggatacacgtgcaagacgtgcaggtttgttacataggtaaatgtgtgccatggtggtttgctgcacttgtgaacccatcacctaggcattaagccctgcatgcattagctatttatcctgatgctctcccttcccctaacccccaacaggtcccggtgtgtgttgttcccctccctgtgtcgatgcattctcattgctcagctcccccttattactgagaacatgcggtgtttggttttctgttcctgtgttagtttgctgaggatagtggcttccacctccattcatgtccccacaaaggtcatgatctcattcctttttacggctgcatagtattctaagagtggcatgagatgatttttaaaatagtaacatcttttttgttttttaaaaaggatcacacgagcagctgtgcagaatgtgggaaaccagctagaaggcactgctttaaaatggacgggtggcggggaaagaggggtggagggaggaggaggggtagcagttgggttctggttgtttcgggcagtggagccaagaggatgtgttcattgtggacagagagaggagccaggcatgaccaaggattttggactgagccattggaagcaaacagctccagaataacggccgtttgacttgtgtgtgattttctgtagtttactgaatgcacgttctaatccttggtcatgatttccacgtgtacaatatgaaggtatttgaaaacgtctgaaacattcattttcattactaaccaccaccacttgccccaaagcctttgtatgcaacacacggacctttcctgttggggcgatgtttgaagggtcaagtgcttagtaatgtctactcatctgtgctggagacgagggggtagcatttacaacacgcctgtacgaaggccaggtcccgttctacttaaaaggcttggagcccgggcgccactgggctaaggcagcttcagggccctggcccgggagtgcatttgcggggactccgcctgaagacagggcggcagccgcggggcctcacgtcgcccaggctcgcggggcaccgcgatgatcaacgacactggcgtttgctttggacctcacaggatgtgtggttggcgctgtattccaaacagtgccactgtcaacccggcttccatcgcgctcgggacaccgggatggcaaacggcaggctgtggatggcgggcggtttcccactgactcctgcccgctcggtgcagctggaaaaaccgaagccgggggccggacgcgccgcccaccagccgttcctcggctagcactgcccattttgcccagggaattaacttggaagttttcacttcacttttcgcatagaaaatcattttaaaaagcaaaccaaacgcctgtaagcagacccgctagggagcaggactctgccgcgtgtccttcccggctccggagcggcggagccagccacccggcacggcacgctggccgctcaccccgcgaggtgcagggagcacgtgggccgacgcgcggaccccagagagcgcagcgtgacctgctgcacggaccctcggatgagagacctggggcgggatctgcgaccggggcccgcccttacgtcaggagggagggccggccggcgggggaagcgcctgcggtggcgtccgctgcccccgcccggctgctcggaaacttccaccggcggcggtgacggccacgctgccctgcgcacgcgcagcgcggctcaggcggcagcccggtgacaccggccctagcgcgcatgtctgcacgccggggtctgcgcgccgcggcgggccgagggcggcgtgcgggccttccagccgctgcctattccacccaacgccggcctagtcagtaatggctcaacgccaccgcctctccctccagcccctcccagtcgcgtagcttctgacgccgtcctcaccccgcccgcggccgacggggccccaacgcgcaggcgcggtaaccacggcggcagtgtctagtgaggatttgaaatcggtcgcgcgtgcgcaccggcgacacggcccggcgaccgaggccgcgcttcctcctgccgcccccgtccccgccccctcccccgcccctcattggagcggacgcggcggcggccccctccttcccccgcgctgtcgccgccgagagtgtcttttcaccgccgccgccgccgccgccgcaggagcgccgagccagcggcgcgagcgtgactgagggctagccgcacgggcggcggcgcctcccgcgggtccttcagccgctcggcgcctgggcccgccccctcggccccgccgcccgcccttctccgatggcctctccccgcggcccgagtggaacgccgccgccgccgcggcccccgcgcccgccccgcgccgcgtgaagcgggagcccggagaccgcagccgcccgctgggacgcgccaagcgccggagccgcccgccgcggcctgccggggcccatcaccgccgccgccgccccacgccggagcccgacgggagcgcggctagagcaggaggccggggctcggcccgcccgccgccgccgccgccgccgccgccaccggcccaggcccgtccgtccgtccgtgcgcgcgcggccgggcctcggggcgcggcgggggcggggccgcgtcggggcgggcgggcgcgcgggccccgcgggggcggcgcgtggatggatccgcgcgtggcctggatccagcccgagcagaaggggccggccaatgccctgtggatgcagatctgggagacctcgcagggcgtgggccgcggcggctcgggcttcgcgtcctatttctgcctcaactcgccggcgctggacacggcggccgcggcgggggcggccgggcggggcagtggcggcctgggccccgcgctgcccgccgcgtcgcccccgccgcccggccccaccgcgcccgccgcgctgccccccgcgctgctgacggcgctggggcccgcggccgagggcgcgcggcgcttgcacaagtcgccgtcgctgtcgtcctcgtcgtcgtcctcctcgtccaacgcggagtcgggcaccgagagccccggctgctcgtcgtcgtcctccagcagcgcctcgctgggccggccgggcggcggccgcggcggcgccttcttcaacttcgccgacggcgcgcccagcgcccctggcacagccaacgggcaccccgggccgcgcggccccgcgcccgccggctccccgtcgcagcaccagttccacccgggtcgccggaaacgcgagaacaaggccagcacctacggcctcaactacctgctgtccggcagccgcgcggccgctctcagcggagggggcggccccggggcccaggcgccgcggcccggcaccccgtggaagagccgcgcgtacagcccgggcatccaggggtgagtgcgcggggaggccgcgggggcgggggcggggcccatggtcctggccggcgcccgcggtgcagacacccgtcccaggcgcccgggcttttggaggatggatgttgaaggctaaggccaaggcccgactctgcactgaaagttttttttttaaacatcagactcatttatcgtggagtgacttgcccagatcctacaagtaacagtccaagaaaaggggctgctgggtaggacctgcaggtatttgtcttttttactcttgagattggaacgggaaatcgactctctacccctccaccccgcctccgggcaagtgaggaaccccttgtcaaagtggggcgtagataagtgtggagtttcacgtaagttaagttgcagaataatttagcattgccaggaactcgaatcacgtcgaaggtaaatattaacctttttaatttcattttttaaaaaaatttaactg

SEQ ID NO: 2333 - DNA, 6000 bp, Homo sapiens
gtattgtttcttgattgcattaagaaatacactgcagccgggcacggtggctcatgcctgtaatcccagcactttgggaggctgaggtgggtggatcactggaggtcaggggttcaaggctagcctggccaacacagtgaaaccccatctctactaaaaatacaaacattagccggatgcggtggcacacacctgtaaccccagctactcaggaggctgaggcatgagaatcacttaaactctggaggcggaagttgcagtgagccaggattgcgttactgcactctagcccgggtgacagagtgagactctctctctctttctctctctacacatatacatatatatacacatatgtatatatatgtatatgtgtatatatacatatatatacactgcttttaatttacataaaaatatttatgatcatatataaataacaaaaccttggttttaattacaaaatgttgtttggtggctggtggatcaaatcaacgaggattagctagaggcaaactgcaaagacagagtatgaggcaatcaagaaaaacttaaaatacctaaacaatgacaacctgtgtaacagatcctggaagctggacaagggcaactgcccgtgtccattcccgctgggccaatcaatcagctgccagtcattctgccaatgttcaccaaggactgatgtgtcagacaatccttgagctgatacacagcagggacaagccattcctatcctctcttcacggagcatgcattctaatggggcgggggacacaaatgataaatgagataaaatacatatgacgtggtatagtgtcccccaaaaagatatgatcaagtcccaaccctgggtgcctgcgaatatgaccttatttggaaactctttgcagatgtaatcaggttaggaggaagacactagggtgccctaatccaatgccactggtgtctttctgagaagagacatggacacagggaaaatgccatgcgatgatgatgacagagagtggagcgctgcatccacaaatcaaggacacagggaaacgtcatgcgatgacgtgtcagagagtggggtgatgcaccaacaagccaaggaatgccacggtttgccagcaacaccagaagctgagaggagagcatggggcacactcccttacagccttcagaggatacacggccttgctgacaacttgattttggacgttcagcctctaggactgtgagagcatgcgtttgttgttttaagccacccagtttgtgacattttgttactcagctccaggaaactaagggagaaaaagcaaatggggaagggaaacgggatgctgagggttatgtttgcagtttagactaaagagccacttggacgtcctcactaagatggggaggagggaacgcatgtcaggcagatggaacagcaagtgcaaaggccctgaggcaggagtgtgccaggggtgcttctggctggtattgtttgggctagggaaagcgctgggaggtgagggcaggggaagaggggaaggaccaggggataagggacttgcaggtcatagcaaggttgttccattttgctgaatgagaaagccactggagggttttgagcagaggagtggcatggactgaattttttaaaatgtcaactttaaattctgggatacacgtgcaagacgtgcaggtttgttacataggtaaatgtgtgccatggtggtttgctgcacttgtgaacccatcacctaggcattaagccctgcatgcattagctatttatcctgatgctctcccttcccctaacccccaacaggtcccggtgtgtgttgttcccctccctgtgtcgatgcattctcattgctcagctcccccttattactgagaacatgcggtgtttggttttctgttcctgtgttagtttgctgaggatagtggcttccacctccattcatgtccccacaaaggtcatgatctcattcctttttacggctgcatagtattctaagagtggcatgagatgatttttaaaatagtaacatcttttttgttttttaaaaaggatcacacgagcagctgtgcagaatgtgggaaaccagctagaaggcactgctttaaaatggacgggtggcggggaaagaggggtggagggaggaggaggggtagcagttgggttctggttgtttcgggcagtggagccaagaggatgtgttcattgtggacagagagaggagccaggcatgaccaaggattttggactgagccattggaagcaaacagctccagaataacggccgtttgacttgtgtgtgattttctgtagtttactgaatgcacgttctaatccttggtcatgatttccacgtgtacaatatgaaggtatttgaaaacgtctgaaacattcattttcattactaaccaccaccacttgccccaaagcctttgtatgcaacacacggacctttcctgttggggcgatgtttgaagggtcaagtgcttagtaatgtctactcatctgtgctggagacgagggggtagcatttacaacacgcctgtacgaaggccaggtcccgttctacttaaaaggcttggagcccgggcgccactgggctaaggcagcttcagggccctggcccgggagtgcatttgcggggactccgcctgaagacagggcggcagccgcggggcctcacgtcgcccaggctcgcggggcaccgcgatgatcaacgacactggcgtttgctttggacctcacaggatgtgtggttggcgctgtattccaaacagtgccactgtcaacccggcttccatcgcgctcgggacaccgggatggcaaacggcaggctgtggatggcgggcggtttcccactgactcctgcccgctcggtgcagctggaaaaaccgaagccgggggccggacgcgccgcccaccagccgttcctcggctagcactgcccattttgcccagggaattaacttggaagttttcacttcacttttcgcatagaaaatcattttaaaaagcaaaccaaacgcctgtaagcagacccgctagggagcaggactctgccgcgtgtccttcccggctccggagcggcggagccagccacccggcacggcacgctggccgctcaccccgcgaggtgcagggagcacgtgggccgacgcgcggaccccagagagcgcagcgtgacctgctgcacggaccctcggatgagagacctggggcgggatctgcgaccggggcccgcccttacgtcaggagggagggccggccggcgggggaagcgcctgcggtggcgtccgctgcccccgcccggctgctcggaaacttccaccggcggcggtgacggccacgctgccctgcgcacgcgcagcgcggctcaggcggcagcccggtgacaccggccctagcgcgcatgtctgcacgccggggtctgcgcgccgcggcgggccgagggcggcgtgcgggccttccagccgctgcctattccacccaacgccggcctagtcagtaatggctcaacgccaccgcctctccctccagcccctcccagtcgcgtagcttctgacgccgtcctcaccccgcccgcggccgacggggccccaacgcgcaggcgcggtaaccacggcggcagtgtctagtgaggatttgaaatcggtcgcgcgtgcgcaccggcgacacggcccggcgaccgaggccgcgcttcctcctgccgcccccgtccccgccccctcccccgcccctcattggagcggacgcggcggcggccccctccttcccccgcgctgtcgccgccgagagtgtcttttcaccgccgccgccgccgccgccgcaggagcgccgagccagcggcgcgagcgtgactgagggctagccgcacgggcggcggcgcctcccgcgggtccttcagccgctcggcgcctgggcccgccccctcggccccgccgcccgcccttctccgatggcctctccccgcggcccgagtggaacgccgccgccgccgcggcccccgcgcccgccccgcgccgcgtgaagcgggagcccggagaccgcagccgcccgctgggacgcgccaagcgccggagccgcccgccgcggcctgccggggcccatcaccgccgccgccgccccacgccggagcccgacgggagcgcggctagagcaggaggccggggctcggcccgcccgccgccgccgccgccgccgccgccaccggcccaggcccgtccgtccgtccgtgcgcgcgcggccgggcctcggggcgcggcgggggcggggccgcgtcggggcgggcgggcgcgcgggccccgcgggggcggcgcgtggatggatccgcgcgtggcctggatccagcccgagcagaaggggccggccaatgccctgtggatgcagatctgggagacctcgcagggcgtgggccgcggcggctcgggcttcgcgtcctatttctgcctcaactcgccggcgctggacacggcggccgcggcgggggcggccgggcggggcagtggcggcctgggccccgcgctgcccgccgcgtcgcccccgccgcccggccccaccgcgcccgccgcgctgccccccgcgctgctgacggcgctggggcccgcggccgagggcgcgcggcgcttgcacaagtcgccgtcgctgtcgtcctcgtcgtcgtcctcctcgtccaacgcggagtcgggcaccgagagccccggctgctcgtcgtcgtcctccagcagcgcctcgctgggccggccgggcggcggccgcggcggcgccttcttcaacttcgccgacggcgcgcccagcgcccctggcacagccaacgggcaccccgggccgcgcggccccgcgcccgccggctccccgtcgcagcaccagttccacccgggtcgccggaaacgcgagaacaaggccagcacctacggcctcaactacctgctgtccggcagccgcgcggccgctctcagcggagggggcggccccggggcccaggcgccgcggcccggcaccccgtggaagagccgcgcgtacagcccgggcatccaggggtgagtgcgcggggaggccgcgggggcgggggcggggcccatggtcctggccggcgcccgcggtgcagacacccgtcccaggcgcccgggcttttggaggatggatgttgaaggctaaggccaaggcccgactctgcactgaaagttttttttttaaacatcagactcatttatcgtggagtgacttgcccagatcctacaagtaacagtccaagaaaaggggctgctgggtaggacctgcaggtatttgtcttttttactcttgagattggaacgggaaatcgactctctacccctccaccccgcctccgggcaagtgaggaaccccttgtcaaagtggggcgtagataagtgtggagtttcacgtaagttaagttgcagaataatttagcattgccaggaactcgaatcacgtcgaaggtaaatattaacctttttaatttcattttttaaaaaaatttaactgtcaacttagaggtgattcattttttggggggtgttgtgtcctttaattttgtgctgcaattaccataagcatcgcctatggtttataaacattggcttaattcaaagaaaaaaccagatttgtcatatatgtctattctttggaaggtgccatttttattttaaatatttctacatccgcctagagggaattagaggctctacttaaatttagtgcacttacagacggcaaggaatgaaacgaaaggtggtgtgtgtttcggggttggaattgtcccaggtgaggctgttcaggtgtgatgctgttgacgcagcccctttgccattttgggcttttctgagcgtctggaagcaatttatgtgtaggttgtatgtcagtattttaagacttaaatgataatttttccttgcacaatttttccccccaatttaaaaaacaattaaggatttgctggggtatgagggttgttgcatgcagtagagtcctacaaataaccacaattgcta

SEQ ID NO: 2334 - DNA, 6000 bp, Homo sapiens
agttcctgtggggattctgatatacagtaaattttagtatctccagtctgacaaccactttagggtctggaatttcaagcatttaagagtcatggaagagctgatcaacaaattagttcacctccattttcatggctatcacctgtttaaagggtggggtgggggacaagcatttcatgaccataaataaaatgcaattgtcccctttccgcctgttactgacctcattgctgggccatttcctccccaactctttccatacactcactccaagggccaatcagacctgttctagtacaggttggccacagagctttcatcttcccagataaacggatgaagaggatttagttgccagatgtacggctggactggggcctgcagggagaaactgcttagcaaagaaccaacaaaaacttgcagcccagaaccagtcatcagatatctatgtacagcaggtgtggcctgttctaccctaatcctggcaaagctagtagccacctgtcctgacaactgcagacaaaactccttggaatgacaatccggctccactggaggcccaggcttccaaaggcccattgggaatcctctataccagctgtccctcatcctgcatcactgatttcacccttccccactccacaccaattaagcaatctctgttgtaagtccacgtacattggtttccctctgtgcctctccttaggtaataaacataaaagtcaccattctttctctctcccttcagatatatacttttgaagtcagctttaaccatcaagacactgattacaccattttcagagccctctctttcctcagaatctcctttcttgctgagtggaaggaggaagatcttccacatccacctgaatgggaatcacagctcttattttttattgtattttctcctcaacttgacttgcaaattcctgggaaatagcaaagactccggaaacttctgtcttgttcccacagtgccttgcttaaaaaaaattctttttcacttgtggaagggcatatagcaatcacactctatgtcaaaagctatcggcactggacaggttaataaaaatctgttcatcttagcaggaagtatctttcgccatatttggttggtcaagcaccagattgttagggctacattccagacacaaagaagagcggtgaacattaaattttgaagaaaaaaaattttatactaacagggtcagagtaacaatattaaaaacaaaagataaaagtccactagcctccaaaattggtgtcaggaattttgttggcttatgtattgttacgtgtcagtggcatgctaagggttttacgtcattctcatttaatcttcacgacgacctgtgaagtgggtattattacagcactccatttcacagataaaggaactaaggcaaagaaagctcgaataactttccaaggctgataaacgcaagaatgaggattcaaacccagatctgacttcactacaaccctctactgcttttctaactaatccaattcctgatgtatattcccagaccataaattgggcaaagttctctttcctaaagaaaaggctgaaaacaaacgtatttattttcttaattaaaagtggaatgcatctcgaatccgcatgtcttcctgcgcaggggccatgctaatcttctctgtatttccagtttcagtatatgtgctgccaaagcgagcaaccaaccaatcaactaaacaaccaatctatcaacccttctgcaaaggaaaccagatgggagaatttatgaatatacttaaattaccttgggtctgcaagacttcatctttaaatgtttaatctgtttcttcttcgccatcatcccccacctgatttcaatttagactctgatcacctcttccacagatgatttcaacagcctcctaaattctgttgactttaatgtgggaatatatccggaatctgaccaccctcacccccaacaagacttcaagctttggccaggtgtggtggctcatgcctgtaatcccagcactttgggaggccaaggctggaggatcgcctgagtccaggagtttgagaccagcctgggcaagatggtgagaacgcccccgcaacctccatctctacaaaaaataaaaaaattgctgggcgtggtggtgcatgcctgtagtctcagttacttaggaggctgaggcaggagaatcgttcgaatccaggtgaagacagtgagccaagagcaggtcactgcattccagcctgggcaacagagcaagactccgtcttgaaaatatgaaatttaaaaaagaccctaagtttctacccttgatgcccctgcagctgagtctcaacacatcagtgtgtcatttttagaaggttaaatcaggtcccatcacaactctgctcaacattacctccagcctgatctcccccgactctccctttcgctcattccactcttagaatatggcttccctgttcctggaacaaatacgtcacatttatgcaccagggtctttgcagtggctgttccttctgcttggagctcttttctccaagatatttgcatggcacactccttgcctcctttatgtctttgcttaaaggtcactgtccaattgaggctttctctcaatacctggtttaaaagtgcactctatcttcccaccccaagacctgcattccctcttggcttgttctatttttgtttttagccatagctcttatcaccttctaacatactatataaaaatagttattgtgtttattgtattctctcactagaatggatgctccctgagagcagaaatgtttgttgtgcccactcctctatctccagcacctggaacacggcctagcacatggtatgtgctcagcaaatatttgctgtattactgttttaaatagcttactagtaagaaaaactgataaccccaggtcaatgccctgtttatcctatggcttttgcatactccagggttctggttcactctgggaggcactcgttcgcctgcttgaggaactaggggatggggagctattaaggagggaagatacagtaagttctacatttcagtcaatccattctagttcgggggatagacctggggagaagaaggttggaattatgaatccactccaatagttcaggcaagagacgacgagaacttgagaaatagttaccagagaagagggaaagatgcgatgaatgactggatgttggggggcggtgggaagctgactgactctcaggttttcgggttgggtgattaaacagatagtgtcagcagtaatggagacagaacataccaggagaagccaatatgggggtgggagtgggcctggggagatgtctcccccacttaggtgaacgttcacttcgcagtccactgataaataactaaagtgattaaggcaaaaagatcactcaggggtacaaagcaaaaggaatcctacaagaagaccactgtttatgtttctgttaaacggtgaaactgagctggccttgaggcaggcagattcccttctaaggaaaaaggcaggaatgtcttctcatgggttaaaattttcaaggtgattatgcaccagaacatacatatatatatatatatatatatatatatatctaccaagattcctgcatacttgacgacttgccctattttgttgaaaaatagcttcagaattaggcaatcttaaaaggaacccatgctaaagatctctgaacaaaggtttcccaacaacatagctaaatccaccctttgcataactgacatttttaccctcatgtccttacctggaaagttctctcgatttagcttaggcctgcggacaatcacaaagtctttgtcactccctttgctcttcagccgtttccgtggggggctctccgggtggcccaggtttgagagcagttcctgggggatgttctcactgtcgggctcctctttctccagggcggagacccccatgcctgacagcagttcagaagtcttgctggaatcccatccccacgtgaagctggtggcaacgttgctactcaggtctggaatctcctggaggtgcttcctgcagaagtgcacaatacccccggttcctttcgaaaacacacccataaataatttcaaggcaattaaagaagctgcagtttatgcattgtaggaaaccttcacagcagctaacagaatcgcattttttatgtgcctgcggcgagttaccaagaaaacgaagaaatgaaaagaacaaatcgagaaggctttttgacttacgatcctgcagaaggcctcaagaatttctcccagtggagggaacagacaaggagagagacagggcaatcatacactgattgaaaacggtggcagaaaagcccaattagggaagccaaataaaaccacacgctgatccccgcactaaggcatccatccattcacactttccccaagaaggggctaagcaaccattcacttaacagcattactaacaatattagccagtagcgatattcgcggcctaaaagaattattaagagggtccatttcatgctcttcccctttttgcaatccgtttacctgtgcatagcgtccgcaggcccgggagtttaaaatacgtgcattaactgcagagctgctcgcctcccagattcccgctttggcgcgcggcggctccgagcgtgctgctcgggcccccagcagccagacccgctaagcctagcaacgttccatccccactgcgcgcgcaaggctctacagcccgctctgcttcgcggccgcactgaggcccaaggcctgctgggaattgtagtttccgtcccgcttcgtagtccgacgggctcgcccttacttccttcccttgcagctttacccgccttcgagatacccacaaccccccgcgggagcgggactggtcggcccacggggtaggcggggaggcggaagcgggcggcgctacggctgactgggaaatgtcagccgctggactgtagacggattttcctttctcgggagcccgcaggccttctggtgatcgccagcgctgtcgtctctgagcgtggatcccagaacctggacagctgtggcggccgccgtttcccggtcccgtccagacgctgtctggcgagatcggacggtgagcctaaggcggaacgcgtgaggcgcttttgagtctggggtccggggccgagagcaggcggaaagagaggggacccggcagaccccgagtggccgccgctgcggggcccaagtccttggctgctgagtggtgacagtagcccagcccgccggccaggtgagaggctgcgaactgctggcgtcgcacctgttcgtccttttgccaggaagcttcttcctccgtcggggagaaggcggccctaagaattgggtctgtggacgggatccttcctttatctgtaaaataacgcacaacagctaaacacgccgttggaacgagagacaatggtttaattttaggggagccggagaccccagcgggtcctgtgtggtgggaaggctgcgcatgcccttgcagccttgacaggtctcataaatagcaacatgggaataaatgaaaggactgtattttgcaacgagctttacccgtgcacgcagggggcctccagcaaagccatttggttgcttgctgtcgctcagctggctacgtgtgtttgcgtcgccgcctaaaagcgagctgctttcagcctatctctgctgagaagagtttgggggcagtaagagtagggagcgtgacatattccaggtacaatgaccatgcgaaatccattgggcaaactatactacaactgtgaccccgggaaaacagtggaagagggaagggggatgaattctaagcctcataaaaatgaagatttataaagttcataaggaagcataacagcttcatcgcatattagaatattcagtgatgctgtatgacacaccctctggtttccttgaaaaaatgattcgctctgtagtgaaattaaacctcccttgtgcaggtatatgcttgtttcaagcttggtc

SEQ ID NO: 2335 - DNA, 6000 bp, Homo sapiens
catctatttctgttgaggccgaactatattgccttattatgacacagattaggaccagtgatcccatgaaactggagataaaaattggggttttcctaacttgagaaaataatagtttcaaagtccatatctttaaccttgtgccaacattcaagtgatgagttgcaaggtttagggaagaaggagaagaaaggggatgataatgatgataatgatgatgatggtgatactaaaatggggaggtaaataaaaattcagttccatgtgattaagcaccacagtagcaaaacttgattatactcgaaatcaaaatggcaattcattaaaactaccagattttagtgcccgatgtgtgggcatatcgtacccttcaaaacaccagttctgaaagtcttaaacatttaaaatccaattcaatctttttccaatcatcaaaatattattcaatattactttcaaatgcctttataatggtttcacaattagcgtgttaatgttactgactaatgttactgactaaagtactgtttcctgagtactttacggctgataatagtttttcaggccaaataccctttgatggaacttcagaggttaagataattttgtagtttgaagaattccaaatgttttgagagagagagagagagaatgggtaccaagtgatcagaacacaaacaaaacactgacaacaattttgtcaaaaccaaagattctgaaactgaatgaaaaatttctgaccggaacctaatgattcatcattctcaaatactgttaacttaaatatctgagtctgatgaatcattaggttccaattggaaattttatctaacttcacatatctgtatttttactcagatatgtgcaaaataataaaaaccaggagacaactcaaaatcctaattatgaaaaatcaaaagaaccagaattagaagtgaatgattaagtcaacaattttccaccaataattaaatttaaatcttccaaacataatcgttattcacatatttaaagatttcaggtatgagagagttcagtttaggacacagactactgcaagagactattactcccactcgaaaaatgaaaaaaaaaaaaaaaccatcataatattttttaaaggtacctaagagctgagttggcgaaccaaccaggtaacctgaattccaaaatgtgacaagcccctgaggacagtggcatactgtcctgctttaccttttgcaaggcatgaagagaagaggtagcaatcatgtaagcatataagaaaaaagaactaaaattttactgaattcttaaagatttcatacatagaaattgcaagacattttgatagagaataatctgtaaagtccttcctaataataaaataatttcaaaaaacgaatagctaacatttagaatgtgttcactaaattttaagcattgtattaatactagtacctgccaagctttatcaaattagacctcacaacctagtaagaaagggctgttcgtttccttgcttaacagaaaaaaaacagtgcagagaggttaagtaacttgtccaagttaacagagctggtgaatggtaaagctgggattcaaatagaggcatctttactacagagcctggatcataattacatgtctcttctctaatctagacatagtttcttaatgcaatttaaattgcttaatgatttattttgttcagtcttcacagggaacaaattagaaactttctcccatttcttttagatatatcaggacagaatgcttagtcatgtttaataaagaatttaacgcaaactttttacattacagattatactactattacttgatttaagggtaatatatgactgtactctacatgggaaaagtggaaaacatagagtaaattagaatccgtttgttcttgccccaagctgcctatcttagagcattaaattacaatgaattaaagatctacttagttccaagcaccattcattcatttagcaaatatttactgaacgcctactatatggtgagctctgttcaaggggctggagatagaaaaatccaagcaaagtccctgcccttaaaaagtctagtgggaagaaacaggcaattaaaaaaaatacattagggggtgataagggttatgtaaacaggtagctgccaccaccacagagactatcagttctggaaatacattattcaagattagtttggctacacataacagaaaagtccaatatagtacagacttatacaatgcagaatttatttctcgtgtaagtcttgagataggtggttatggcaagttagcagattatcagaggcccaggccccttctatagtccacatccttagcaggtggctttaatccttatgttccaggacagatgctggaactccaggaatcctatcatcatctagacagcaggatggagaaacaaagaagggtggaccgtcttccttttaaagagatgtaagaatcggctgggcacggaggctcacgcctgtaatctcagcactttaggaggctgaggtgggtggatcatctgaggtcgggagttcgagaccagcctgaccaacatgcagaaaccccgtctccactaaaaatacaaaattagccaggcgtggtggcgcatgcctgtaatcccagctactcaggaaggctgaggcaggggaattgcttgaacatgggaggtggaggttatggtgagccgagattgcgccattgcactccagcctgggcaataagagtgaaatttcttctcaaaaaataaaaataaaattaatcagaaaaaataagatacatcagtagcaatcacaatgcagttctttatgaccagatagcaacctctatgtacctactaatctcgtcttcaatggacacaattccttacgttaaaaagaatctaatgtaccaatttaaacttgcatttattatattaaggcaatagtcatgattagaaggaaggcaaaaaaaaattattcccatattaggaagatgaagtatgtctgttaccggggcaaactatcaaactgaatttcaaaactgacaggctctccctgaagtcctagagaggatcttgtgttcactaattcagatgttgcaagtattctagttcccaggtaactcctagtaaaaccaagactgaacaaagatatttctcatctttaaatttagaatcatctcatcgattaaaccttcctatctatgagatctatatctgaagtgggctctcccaattattttacatctcaaaactgtttattctcattatggcatcttaaatatttttgtttattctttctcctccattagcttacaggctctctctgttttgttccctttcctgaaggaaactataattttttgtgtcaaaaatattttctcctatgagttgcaatcttcagggaaaggacgtagcttcaaacaaaggcaaatgctttctccttagccaaagtaacataaaggtcactttctgtaaaacatcaggatattgcattttaaaatgctttccatataacattagtttgatgaacggcttagcctaggattctgcacctagttccaatcaaaaccaagttgtgaacagatcccttctttacaccaatctcatctttcaagaacgagctaaaggttcatgaattccttcctcaagaggcagttacttttcaagctaaggaccaagcttgaaacaagcatatacctgcacaagggaggtttaatttcactacagagcgaatcattttttcaaggaaaccagagggtgtgtcatacagcatcactgaatattctaatatgcgatgaagctgttatgcttccttatgaactttataaatcttcatttttatgaggcttagaattcatcccccttccctcttccactgttttcccggggtcacagttgtagtatagtttgcccaatggatttcgcatggtcattgtacctggaatatgtcacgctccctactcttactgcccccaaactcttctcagcagagataggctgaaagcagctcgcttttaggcggcgacgcaaacacacgtagccagctgagcgacagcaagcaaccaaatggctttgctggaggccccctgcgtgcacgggtaaagctcgttgcaaaatacagtcctttcatttattcccatgttgctatttatgagacctgtcaaggctgcaagggcatgcgcagccttcccaccacacaggacccgctggggtctccggctcccctaaaattaaaccattgtctctcgttccaacggcgtgtttagctgttgtgcgttattttacagataaaggaaggatcccgtccacagacccaattcttagggccgccttctccccgacggaggaagaagcttcctggcaaaaggacgaacaggtgcgacgccagcagttcgcagcctctcacctggccggcgggctgggctactgtcaccactcagcagccaaggacttgggccccgcagcggcggccactcggggtctgccgggtcccctctctttccgcctgctctcggccccggaccccagactcaaaagcgcctcacgcgttccgccttaggctcaccgtccgatctcgccagacagcgtctggacgggaccgggaaacggcggccgccacagctgtccaggttctgggatccacgctcagagacgacagcgctggcgatcaccagaaggcctgcgggctcccgagaaaggaaaatccgtctacagtccagcggctgacatttcccagtcagccgtagcgccgcccgcttccgcctccccgcctaccccgtgggccgaccagtcccgctcccgcggggggttgtgggtatctcgaaggcgggtaaagctgcaagggaaggaagtaagggcgagcccgtcggactacgaagcgggacggaaactacaattcccagcaggccttgggcctcagtgcggccgcgaagcagagcgggctgtagagccttgcgcgcgcagtggggatggaacgttgctaggcttagcgggtctggctgctgggggcccgagcagcacgctcggagccgccgcgcgccaaagcgggaatctgggaggcgagcagctctgcagttaatgcacgtattttaaactcccgggcctgcggacgctatgcacaggtaaacggattgcaaaaaggggaagagcatgaaatggaccctcttaataattcttttaggccgcgaatatcgctactggctaatattgttagtaatgctgttaagtgaatggttgcttagccccttcttggggaaagtgtgaatggatggatgccttagtgcggggatcagcgtgtggttttatttggcttccctaattgggcttttctgccaccgttttcaatcagtgtatgattgccctgtctctctccttgtctgttccctccactgggagaaattcttgaggccttctgcaggatcgtaagtcaaaaagccttctcgatttgttcttttcatttcttcgttttcttggtaactcgccgcaggcacataaaaaatgcgattctgttagctgctgtgaaggtttcctacaatgcataaactgcagcttctttaattgccttgaaattatttatgggtgtgttttcgaaaggaaccgggggtattgtgcacttctgcaggaagcacctccaggagattccagacctgagtagcaacgttgccaccagcttcacgtggggatgggattccagcaagacttctgaactgctgtcaggcatgggggtctccgccctggagaaagaggagcccgacagtgagaacatcccccaggaactgctctcaaacctgggccacccggagagccccccacggaaacggctgaagagcaaagggagtgacaaagactttgtgattgtccgcaggcctaagctaaatcgagagaactttccaggtaaggacatgagggtaaaaatgtcagttatgcaaagggtggatttagctatgttgttgggaaacctttgttcagagatctttagcatgggttccttttaagattgcctaattctgaa

SEQ ID NO: 2336 - DNA, 6000 bp, Homo sapiens
acaaatgtaaatcagactgatcatttactaattgtaggaccatgggcagttttctaaacctttccagcctcaggttcctcatctgtacattgtagataattattgtttctacttttgggcatgttaaaagattaaatgagatattatggggacagacttaactcctggcaaataagtcctcaaaatcttagctggcaatgctacatcaagcaatgatctctcctaatgatataactttgggaatagaaaaaaatatgccttaaaacataatgcaacttgacaaaactcaattcaacaaaactgactccagatttacaccaaaaaaaaaaaattacacacaagacaaatacctaaaattacttttattacttaatttatttgggcaaaatattctaagcacataaaataccctttaaaattacaatgatggccttaagagacatggagtttaaaattccttttaaatcaaccagaaacactaaaatcccactctattttcataccaggaaaatacaaccaagaaacaggtatcctctctctcaaagacaagaaaaatgcactttgaacttagataattgaaaaagtaacaaatggtgtcagtgtcagcactgagcaatacctagcttcaagaccagagctcacacatttcttaaagcaacataatctaagaaaatactagtgtcagggaatcccttatcctccggctgacttactacatgaatctacacaaatcatatggtctcttaagtgtcaagtatttcatcattaaacggaaagctggtcacttctctcacagggatatcagaatatttttaaatgaactcaggtcaccttgaaaaaggactagttttaaaatacgaagaattattataaatgacaactgctgaaaaaacgaaaaactttgcttaaaaagtccatcttaaaacaatttttaaaggctatataagaccataaattaccaccaaacctaacctagtacgctcaggatattaaaataagcatgttcaactgaacagttagttgtcagccttctataaaggttcctagtcaattatttcccattcatttttatggcaagtaaatgtgataaacagaattaaagttacatttctctaaaaggaattactgtttacctcacactccctaatcacttcacataaaactgaaatcttaatttaaaattttagaatttcttccaaattatgcttttcctaataagcaccagaaaggaggattaaatgaaattaaataaaactcaaactcctggtttttatttactcttatattattaattactacatcttattttgagaaagtaaaaataccacaatggggtatttcaaacatgtaacacagatatgttcaaatatttctatgacagtttgatgatggattggtaccaaaaaattaaatatgaaattagttgaagaagccttagaaaatacatttttcggctgcaagtaaagaaaattttgtattggtatagcttgctcatatttttgaaatttaataatgattactatgaagaaccaagtttactgccatagtaaaaactttcactttacatccctaaaaagaatctcaagtagactgtttttcttttttcaagtaatgtataacttttccttaaaagcagaaaatattataatgatctctagaacaggttcaaaaatgttctcagataactttagtaaacaaattgttgaataactttaaaaaggaagcatcctatatacacttctcaaacattgaaaattatctatttaatgttcaactctgatttactttcattatttacttgaaatctcttttcaagtaacaaaagttattgacaactcttcagagttaagagaaacaataagcgacattgttgaaatttcctttaggtgtatgagaaaatatttctccaaataatataactaggattataaggttactggaacacttctgatttctcctttcactgaattttaatttttaatggaaatagatgattagccactagtgaatattccaaccaacagaggggaagcagaacactctacactctttagggaaacaaactattctctccaactaggttatcagagatttaaagttcaagtttaaattttacaatttgaattttacacaatgttttctcctttaaaaatgacgtatttaattggtttggaccaaacaaaacatatttttaaatttaaagaaatgtttatgctatcataatgaaagctatcacacaacctatattactcacaaattactaaatatgtagaattgggaaaataagttgggaagaactaattcactataacaattccaaagtctcaggaaaaaaaagaatcaatcacataaacccatctctaacacacttattcaaacatctgcataagacaacctctaaaaataagttgcttcagttcgtgaaaattaagcaagcacaactcctctattatctttagtaaaaatatgtttatcccttgaaataaaagttgtagagacaatcacaggaatatatgaaggccttttaaacatttataatgaagcccttaccacctccatccccaaaaaaacaaaccctctgctttcttaagatgtgaagtattcctcccgtctgcattccctccctggcatgccccccactcgcacacccccccacccgcagtaggcctgaggccccgtagcaaacagtgtctaacaggagcaggcagcacaaagacaggaatgggagattagtgggagggagggaggccgggattggggctcagcaggagcttcaggctttttaaaattcaaactgctccctgaccaatacaaatcacggacacgctactgactactacacggatttatagcattaaaaacatgcctagtacgtgacagctatattaacttcattcttttaaacatttatccgtacgtttgcaggaaatgtgaaacaatttattgtaatcaggacgctaaactcaaaaataacctccacaaaataacttattctacagtgacaataatttaatgacacaaaaaatatgaaccaatgtaacaaacactagtaaaacaagggatttcgctgagcagtgctgcttcattttaaccaatgaaagttttccttcagcgaatatgaaacaaaatatcaaaacgtgtaacccaggtacacttttctagcaatttgcctgactgaggaattttaaattggtgtttcccccttataccaacctacattatgaacgcctccataaacaagctcgaaacacttaacttactcatgaactagaacttgtcaagttagaactgatatttttctccagcatttacagatacatttaacctattaaaatgacacctctctcattacacagtcaaacatcatggcacaaacagccaatgacaatcctgggacctcaagaagaactgccctgacataaaaggatggcaccttctacaattttttaacctcccaaggattttaagtataacttaatttcttttttggaaaaagaaaagaaaagtggttttacccgtatctcagcacaattctcagaacacttaaaattctttgtatgctcctacacgttttggtcaggaagtacctgagtgttttacgtatagtcgcttaaaactgcccttacataacgcatacaaatagaaagtggcagagtaaacctgtcaagtactttatacttgtctttgaataaaaagtccatgtgcaacaacacactgtcaaaacaacaagataaaagctcttggggagggggagatgtgcagtgtctaccacagtatgtttttctgtattaaatattcatgtggacgatttaattctttaaaaaagaaaatgagtctttatgaactttccaacgtccaaacaagttttagaaagagaaagaattaccactggatccgcgtctgagtatttacgtttgtctcactaactgaaactacttcctcccttcatggggtcacagggggaagaagggaggttgtttgtttcactgggacgttccccactcccggaccgggaaagttgtaaatatggggacgatcagggcacatttgctgttagttgtattgtttccgcctccccactagctacggctccactcccgggcgaggcctgtcaccgaccagcagtcgctccgctcagcccggagctctcctaatccccgagctcaagtagattccgctggcccgcggcctgcactctccgccgggcctacgcctccccggccgcccagcaggagcccagtccccgccaccggagccggccgggagagggtacaaaaccaccgctacccaaggcggctgccaccagagaggagcgaactctagactcgcctgtggaagagacctggggccgctaaggaaacggcggggaggggagcgaggaggagagacgctgaggacctggcgccggcgccgccgccgccgccgccgaaataaagagcaggaatttacctgggcgaatcggcgtctgaatccaaggggaggccgaggccgctgtggcgagagactataatccgggccgggagggggggtggctacggctcctcttccgtctcctcagtgcggggaacatgtagagccggggggagaccagccgagaagacaaatcgttgcttcttcttcctcctcctcctccttctcccacatagaaacactcacaaacacccgaccacgggcccgagctaccgggggggcatcgccgcgggcccgggaaccaattctcctgtcggcgggggcgtccctccctgcggcttggtggtgtcgggtgagtcggtaccgacggagggaggggggggagggcggggggaaggagccctgtgtgtgtctctctctcgttccgtctctccctctcagaacaaaatgccgaccggaagtgcagctgcaggaatgactccctccgccggcgccaaacactaacaaccaccccctcttccccactccacttccgccaccgccgcagccgccgctgccgccacttgggctcgcgtcctcggccgcgccgcgcggcacccgggcccagcagccgggaggcggcagctctcctctacgcccgtcccctcagggcggctgtggatgttgccagtattgtcgatgcttcagagcgacgtttgccctgcgacacaggcgggccggctctcctctgtctttattttcctggaggccgacaggagcggggcccgagttcggtggtggtcgtgagcgtggggggcactcaggcccggacgggctctcaggtcgccgacggcggcggctggaggccgcgctggctgtcccaggtcgtcgttagctttagggagccgatctccgggcggccccacagaggacgcccgcgattcgatggcgatgatgcccgttttaaatggtgtccctgcagccgggtggatggatggatcgtacaccttgccttttgagagccgggaccttacgcccgactgcgtgttatttctgcgaataagaacgcaacctttggaggtgaagacgactgtcggctggattgaattggaatcgtgtttgtgatgatgcgtttatttctggaaatacgcggtctccgctgcttttgctttttgtcggcagaggtttgggttcttctctaacggtcaggataaaggcctgtaggcgacgctgcgcgagcgagaagctcgcccgcggctgcccgggcgcccccctctaggtgtgggtggagccgagcgcgcggggagaaccgccggccccgactcagccaccggtgactgcgggcgacccgcgggcctgcggccagctgatttcaaacatcgttttcctctttaggttcggaaaactgaggcgctggacaaggctggaatacaatatgtgattatacgtacagtactatggttgttgtagtttttaaattgtaaaacaagaagtaaccattgttccaccgttctctattaagtttgtgtaaattaaaaaggggctattttcggtaaaaagtgcagtaggtaagcggaattttactcaaccgggacgaaattcgtgttatat

SEQ ID NO: 2337 - DNA, 6000 bp, Homo sapiens
gtggtaccataatccacagtttaaaacactggtctggagcagatgctttgactgcaaggtaacctactcaagaatgctgttaaaatgagcaccataagcctctcttcatacctattttagatgttttaagtttttaacagattttatattcttccttcataaatacagtaattttttaaatgatgtttttccagattagttcagtattaaaatacttgactagtttaactctggttcacatgcagagtatgtgtaggttccagaaagattaggctttcatgaaactttatggtcttaaataattttacattaaaatacttcagaagtgcattttttgaggcccttccctctgtgtaattcttatgcattacacagtgaaacttgtagtataatgtggaactggtcactttgatttagtaacataaggtatagatgcatgaaaacataaacagtaaggccaggcacagtggctcacgcctgtaatcccaacactttgggaggccgaggccgggggatcacgaggtcaggagatggagaccatcctggctaacacggtgaaaccccatctctactaaaagtacaaaaaattagccgggcgtggtggtgggcgcctgtagtcccaggtactggggaggctgaggcagaagcatggcgtgaaccgggaggcggagcttgcagtgagccgagattgcaccactgcactccagcctgggtgacagagcaagacttcgtctaaaaaaaaaaacaaaaaaaaacaaaaaaaccataaacaatataggagtgtcataggattataaatagatggcatggataataaaatctacaagtttagagaaaattcgtaattataggtgagaagtattaatgaaaggacaaagcttgttcttaaaggatcagaataggccaagatgaaaaaaggcatccatgggaaaagaactgttcatttctataattttaacaaaatagataatctatgttgaataaaatccataaatactatttccaaatttgattaaggtatttactttgaaaacctgaaacaggaacatatttacagtgttaagtgatttgataattttgtagttctgccctaaaaatcaatatccttaattaacccttcatcagtttcttaagtcatctgtcatcctgaaagcaagttaattattctaaatgttaaataattttggtagtgtctaatctataaaacatacatacactaccagttttttttctacctttaacaaattcgttcccataaaagacaattttatcactaacaaaggataactggcaggcataaaatagtgagtagaaaatgattttctaaaatttttcatttctatcattttatagcaagttgcatttatcttaaagataaatattcttcaataaaaataacaattcaaatttttcagttgtagaaattcctggtgatgacatttgatacaaatagtttatccctgaaatccatttaaaatttttaatcaaatcttctgcaattcattgatcaagaatacatacgagactatccagggatatttctagcaaagaaaactgagtcatgcaactcagttcttgaagcaaggaggcaatttaaagtcagaataaaggtttactgggctatcctcaatggacaagtggaggatgtaagtcacctgatttggaacataaaagacttaaaaatgtaagagcaaaacaaatggatggtattgggaaaaataattattaagaaaaaaaaacccaagacaatgaaatgaagaaaacactaatattagattaacagattctatgtaagatctcaacttggatacttaaatttatgcaagcaaaataccatttgatttaatagagaaatactgtgatatgaattgaaacaatttctttgattctataacctggaaaaaaaatggtataaactatatacaagttaaaaccctcaaaggcagtgttgttttcattcactgccatgcatgagatgtctagcataaagctaattagcgcctaataagtcctcaataagggaagaaactaaaaaaacttaaaaattttaaattaaatgacacaataatgccaagactttccaaagcagattgactgtagcagctgcagttacctggacatgcaaaattactagtttaccagtaacatttaagaaagcagacaagaagataattgtgcttctattagcgaattgaaataatggtattttgaaactgagtgaaaaacacattctgagtcatctgtattaacttaaagctgttctgaagattaatgggaaaaataataatgaatagacgattggatttactaaacaatgtttgattaattgtattaatggttataaaatacctatcaaggctgtcttttcttgtccaaaaattcaatacatgaaatatgaaaatttgtaataccatagccaaagccttattgcatagcttctagcttactgatatatttacttattttaatttaaaaagcctgtttttccagccactaggaaataagatttctcacgttttatagtactcaaaaatcatgattaagtatatctaatgctaacctaagtgtaagcaaacagcaaactaaatggtgaattaaaatatccacaccaagcctgacctcagctttcattgaaccttttcttcagaagaaaactaaaaataaatttcactagcatttgctttgcttgacagcataattgagtagcaaccaaagtagccacatgtggtcctttatgtaaggccttctagcctcagaaacacacaccttttgaattagcgtgcctggtacccatttgtgcccaataaatacttgctgaatgaacttttccaatagtgctggatttgctctgagccaaccaaattctcacttttaatgtattttgaaagacagaggacgacaagatgaagaatgcagtttgagactcagaagagcaaacataatcggcccagtatggatatgatcatttgatgcactgtcctcgggcatgctcatttacagaagcctaaaaacaaattttatccctcatttgtgggtttctggtgttgtggagggctttccaatgtttagaagcaatatatttttatagaattctgtaataaacgtgttttaaatcttttataaagctctctgtagcatataagtacatattaaagacagaaatgggggagcatcaaggcccttataatcgcattcattccttaaccacatactacgcatctactgtgtggcattctaggcgggggccgtaacaccagtgcagaaaaacacaacctcttgtcctcttagagcttacattgcactggggaaggagagataagaagataaacaagtatggatatgtagactgtccaaaggataaaatgagaagggggctagggaactttcagtttaaaagtagccgcggaagcaccgagtgacacgagcaaaatcctgaaggtgaaggagcaagccctgtggacgacgctcagggaagagtcctactcgcaaggatgccagggcaggcccgcccccaccctcaacggcgcgcggggacttctgccgcagtcaaggctttggctcactcccctcaagacgggaagccattcgcagggcctagagaaaaggagtgacaggatcttggccccctgagtggcctgaggcaaaaggaataatctaagcaagttttcctacttacttttagcgcactggtacacacacaaatacacaatacaattcatataacacgaatttcgtcccggttgagtaaaattccgcttacctactgcactttttaccgaaaatagcccctttttaatttacacaaacttaatagagaacggtggaacaatggttacttcttgttttacaatttaaaaactacaacaaccatagtactgtacgtataatcacatattgtattccagccttgtccagcgcctcagttttccgaacctaaagaggaaaacgatgtttgaaatcagctggccgcaggcccgcgggtcgcccgcagtcaccggtggctgagtcggggccggcggttctccccgcgcgctcggctccacccacacctagaggggggcgcccgggcagccgcgggcgagcttctcgctcgcgcagcgtcgcctacaggcctttatcctgaccgttagagaagaacccaaacctctgccgacaaaaagcaaaagcagcggagaccgcgtatttccagaaataaacgcatcatcacaaacacgattccaattcaatccagccgacagtcgtcttcacctccaaaggttgcgttcttattcgcagaaataacacgcagtcgggcgtaaggtcccggctctcaaaaggcaaggtgtacgatccatccatccacccggctgcagggacaccatttaaaacgggcatcatcgccatcgaatcgcgggcgtcctctgtggggccgcccggagatcggctccctaaagctaacgacgacctgggacagccagcgcggcctccagccgccgccgtcggcgacctgagagcccgtccgggcctgagtgccccccacgctcacgaccaccaccgaactcgggccccgctcctgtcggcctccaggaaaataaagacagaggagagccggcccgcctgtgtcgcagggcaaacgtcgctctgaagcatcgacaatactggcaacatccacagccgccctgaggggacgggcgtagaggagagctgccgcctcccggctgctgggcccgggtgccgcgcggcgcggccgaggacgcgagcccaagtggcggcagcggcggctgcggcggtggcggaagtggagtggggaagagggggtggttgttagtgtttggcgccggcggagggagtcattcctgcagctgcacttccggtcggcattttgttctgagagggagagacggaacgagagagagacacacacagggctccttccccccgccctcccccccctccctccgtcggtaccgactcacccgacaccaccaagccgcagggagggacgcccccgccgacaggagaattggttcccgggcccgcggcgatgcccccccggtagctcgggcccgtggtcgggtgtttgtgagtgtttctatgtgggagaaggaggaggaggaggaagaagaagcaacgatttgtcttctcggctggtctccccccggctctacatgttccccgcactgaggagacggaagaggagccgtagccaccccccctcccggcccggattatagtctctcgccacagcggcctcggcctccccttggattcagacgccgattcgcccaggtaaattcctgctctttatttcggcggcggcggcggcggcgccggcgccaggtcctcagcgtctctcctcctcgctcccctccccgccgtttccttagcggccccaggtctcttccacaggcgagtctagagttcgctcctctctggtggcagccgccttgggtagcggtggttttgtaccctctcccggccggctccggtggcggggactgggctcctgctgggcggccggggaggcgtaggcccggcggagagtgcaggccgcgggccagcggaatctacttgagctcggggattaggagagctccgggctgagcggagcgactgctggtcggtgacaggcctcgcccgggagtggagccgtagctagtggggaggcggaaacaatacaactaacagcaaatgtgccctgatcgtccccatatttacaactttcccggtccgggagtggggaacgtcccagtgaaacaaacaacctcccttcttccccctgtgaccccatgaagggaggaagtagtttcagttagtgagacaaacgtaaatactcagacgcggatccagtggtaattctttctctttctaaaacttgtttggacgttggaaagttcataaagactcattttcttttttaaagaattaaatcgtccacatgaatatttaatacagaaaaacatactgtggtagacactgcacatctccccctccccaagagcttttatcttgttgttttga

SEQ ID NO: 2338 - DNA, 6000 bp, Homo sapiens
ctgatactttgaatgccactgttctaaaataaatggaattggttacttatttttttaataaagttcacacaaattctcattgttttaaggtatttttttcctttatagttgaaaattaatctaagttactgttcatgaacactttaatgtgttttcctccccttaggttaacataaaagataaagtacttgaactattgatgtattttacaaaacactcagatgaagaagtacaaacaaaagctatcattggtctaggtaagtctaaatttctttataatttgtagctatttgagagggatagagcatatttttaaatattgtgaatctaaattgttgatttactttaatatgtttctattagcagtaggatttggtgtatagaatgtaggtctgaggattaaaacaactgggttgcattcttgtcatggccattgacttcctgggtaaccttgagcaagccatttgtctgttcatcagtttcttcattagtaaaatagagataacaatactttcttctacccctcctccatagggtatcttaagaacatttattaaagccctttgataaagaaaaataatatagaagaattctgtgctctttgcatttttttaattgttctttttcattgcaaagctttgtcactacaggaagctgccacatctggttaaaacaatgatcagtctacactgacttatttatataaaagcaaatagtaagcaacccagaaggaacaatttggatatatacctgttttataatgtttttccaggaaggattgatgtaataaaaacatgttttgcaattgttaggcaggtctatgtggcttatatctaggaaggaattagaatatgaggaaataggaggtgaatggcattaaagtacctgaattgaatgcacttcaaaaaaatacaagaacagtctgtccaggtttttggtttttgttgttgttttttttggtacaaatacagttggccttccatatccatgggtttcacatctgtggatttaaccaccaaggatcaaaaatactgagaaaaaaaaattacacctgtactaaatatgtacagactttttttgttattattctctaaacaatacaacagcaatttacatagcatttacattgtattagatataaataatctagagaagatttaaagtatacgagaggatatgagtagattatatgcaaatactaccccattttatatcagggacttgagaatccacggattttggtatccctgggaggttctggagccaatcccccatggataccgagcaatgactgtacacgtaaagctacccaatgagattaaaaacttatttggaaattttattttggtgttatgattaaggtttatactttaatctgcatgagtagttatttatattagtcttttgaacaaaaatgagtaagaaaagattctaacttacccataccttattaaatcatgtttatgatttctgtaaataaattgaaaccttatcattttattcctcctccatccctttttgaaaattacatatagcacatagagtaaaaattcagacatcatttactaaggagttaaattgatgcaatattaacttcaagccaatgtgtaccttcagatattcagtctggacataatttatacggagtggcaaaactaatagtgttacaagtatttcagagtacaaaaagatgaagttttaacttaagcagcgctattcagaaaatattgcctctagaccagttaataaaagacatcttgcctgggccatagttatcctgagtgaccttgggctagttatctgatcactctatgctttgagtttagtttgttgtttgttaccaataatacttgctatcatcagagatcttcattttttcctcaaataaacattatatacaaataaacatggatgatatattgctacttattaacccgtggttataggattcagcattgtggccttattataatgccatatgaaaaagaaatggaagatatttttagctctggtttattatattgtttcatcaaatgaatatattttaattttttttttaaaataatgtcaatgtagtaccttctgctggggatctgaaaaatgtttgcagacattatttcttaaatcctgaaaacatccctgtgaggtaggtgggtggtaaatattattatccccattttacagatggagaattgaggcacagagagattatgtgactcacccaaggtcacactacaagtcagtggtggagccaggaatagaacccaagactcctgactcctaatccactcccctagccactaggccctgctccctcctcaaggtttcctcttgtgtgaaattctcctttgaaatgcaatttcttgtttttaattcatggggaaagaagtacctgctctaatgcttctctaggtaaggccaccagcatattcttccagtcattttaagttttaattttttgaaataaggagccgtttatataatttattaacatatttattaaatgttttatttaattttaatatgaatatatgatgagatttttcccctctcccataggatttgcctttattcagcatccaagtctaatgttcgagcaagaagtgaagaatctatataataatattttatctgataagaactcctcagtcaatttaaaaatacaagtgttaaaaaacctccagacctacctacaagaagaagatacacgtatgcagcaggcagatagagactgtaagtgaaaatatatttttaaatttcatagctacatttatattataatggctttatcttctttaatctaaatatctaaatttccttatttgttagatgaagaaattcagttaaatagcagtccttatgctgaggtctatagctgggctttagcatattcttaaattctctaaaatagttttaaaattgtatatgtgtgtaaacattaacattttgagggaggaaagagattatagttctcactgggttctcaaaggggcctctgacacagacacacacacacacacacacacactcacacacagattaagaaccattgagccagaacactagctgtaacgttttgtgattttggttatggcctaattttgaaatatttagtaaagttagtataggtgctcttaatgtgtgtttatcctttgcttgcttttgtagggaagaaagttgcaaaacaggaagacttaaaagaaatgggtgatgtttcctcagggatgagtagttccatcatgcagctttatctcaaacaggtgcttgaggcattttttcacacccagtcaagtgtacgccactttgccctaaatgtcattgcattgactctaaatcaaggtcttattcatccagttcaggtaagcatgttttatggcagcagcacttactaaaagagcaagattagttgtaatttgatacattgtgattatagagaataagtagttcttcgttcctcttactcttctttgtactaaactcttaagaatctggcagttttagataatctcttgggttatgattactgcaaaatacccatatattcataatattgtctctgttataaacttgtaatttctattggcagaacatatactcaaattatttttctaagtatgggtgatatatttgttttaattcatatttacttttgtccctaagatccaacaatctataatgtgaagagagttaactgggtttaaaagtataatctgttcaacagggtggagtcttagtccacagaaaagtaaattatataaactcaattccttcatctttaagttgggtataacaccaactactcgacacctcatagcattaatatgaggacacaacgacgtaataaagacattagtgttactgaagattggcagccaatgctgatgtagtagtatataccatctgatggtcaagagagcaccataggctacaaaagtgtatgtattaagtaagcagagtctatacccttcaagatttttattttgggtatttttcatggaacgttttaaaaatatgatttatttaaacatactgtggtcttccctgtgtcctgaaacaaaacatgttaacaaatatttatcctgttcttcatgactccgggctattatcataaagaatcatacattataatgaaacagtagtacattgagactgtcacctttttaaactaccgagggttctttgttgggtgctttttattatatatgccttttaaacttttttttttaatttcacacaaaggagtcaggtgcagtggctcacacatgtaatcccagcactttgggaggcagaggtgggcggatcacttgagtcaggagttcaaaaccagcatagccaacatggcaaaaccccgtctctactaaaaatacaaaaattagccaggtgtggtggcacatgcctgtggtcccagctacatgggaggctgaggcaggaaaattgcttgaacccaggaagcagagaacccaggaagcagaggttgcagtgagctgagaccgtgccattgcactccagcctggccaacagagggagactccatctcaaaaaaaaaaaaaaaaaaattcacacaaagaaattgcaaaagtgatacgatgaattcctttattctcttcacctctattcaccatttgttgacattttgccacaattgctttctctctctccctttatacatctgcttttttctgaatcatttggtaggaagtttcaagtaattatgattctttaccactaaacacttcagcatatattttctaagaacaaggacattctcttacaaaaccgtaatataatcattaaatttgggaagtttaacactgatacaatattatctaatatacagttcatttgcagattctgctagttaaccaagggcgttctctatagcctttttcctcttctttttttttgaggcaagatcttgctctgtttcccaggctggagtgcagtgatgcagtctcagcttacctgcagcctccgcctcctggattcaagcactcttcccacctctgcctcccaagtagctgagactacaggtgtgcgccaccacctggctaatttttgtgtttttgtagagacggggttttaccatgttggccaggctggtctcaaacttctgagctcaagtaatctgcctgcctcagtgtcccaaagtgctgggattacaggcatgagccaccgcacccaccttacagccttttttctttcctgattcgagatttaacatgatcatttctttcatttagtgccatgtctgtattttaaagttaggtttgttgttgtttttctggccttcacattgctttttaattcagactcacttaacatagtagtactgttttttgactctagaagtacagtgaatatgactgttatcaactctctgttcctcaaagccacatctgaaatcaactttgaaaaacaattatattttcgtagctttgagtatggaaaacaaattactgtttgccctatattatctttacaaggcaaattcagtcaagctttaaaaactactggattatacatttgtagtctatatcataatcttaaatagatattcttagtgtgagaatgctttatgtttaaagaacctaaaatttacaatgaaattgtttaaattttatcacgtcagtatttttgctggtgctccagtgctttctggatttaagctgaatctcaaaagatctgtcattttaaaaagaacactaaaacatagactttataggaaggcctataaggttaaattcatatatctcagatatatgaaaagttttgacatatgtctaaatagagaatttttactaccatgatatctcgtaatttttttttttatttccagtgtgtgccatatttaattgctatgggcacagacccagaacctgctatgcggaacaaggctgatcagcaacttgtggaaatagacaaaaaatatgctggattcattcatgtatgtattttaacattttataacctaaatttaaacatttttcttgagtaaagcat

SEQ ID NO: 2339 - DNA, 6000 bp, Homo sapiens
agtaactgtgtgtaactgatctccatataggttaaactcttagtagcacaatgatataactagaactttcatgtatactttctgatatggtatggatttatcataaagattccatatactctaagaaaacttcaaggaatttcacatggatgcaataaaaaatttcacctcttctcttgagatagcatagtgtaagtcattataaaattaaaaaaaatgggcctaagattattttataaaattccatttctgttcccccttttccctttttgttacacctgtctccctttccctttttcccccctctatatttctctccctcctcctctccctctgtctctctgtgtctctccccactctctccgtgtgtgtctgcttatctctgtctaacattaagtgaggtgaaagtgccctgtattttttctaaaaaaggttttttggttgggtttctagattatccgctaaacatgtgtgctttttcttaaaatttacagaaaacagacgtgactatgctcttgtatatagcagacaatctagcctgttttccataccagacacaggaagagccgttgtttataatgcatcatatagacattacactctcagtttctggtagtaacctactgcagtcattcaaggaggtaagttacacacattactattcttaatccatctgtcaaagtgcaggcatgctgttttcactgttttgtttctcattattctttttatcctcttcacgagtatataaaatctttctaagtgaacttaatgaaatctgggcaatacttgacttgggagaggatgtacattgccactttacctctatttagaaacatctaaaatagatatatggattgttctgttgataagccatcacatttatttctctcactttaagcactgaccttaagtgtttgcatccattcatacattcatttaaactccattttaaaacattattctgtaaatcttgtaatgctgtaatcacaacattacacatgaaaatatatagcttatttacacttaaacagaaaatttatgacaccattgactttcttatccctcaactacagcaccgttatagagtttgcatatgtgtgcccaaaatctttgctaaatttcttgttgaaccttccattgtttctgtcatgacttttaggaggaatgtaatttatttaattataaaagtacctggtgtagcactaggcatatagtaagcactcagtaaattctttacaaattgaatattctcatgtatctaatgatccaagtagatctcattttataaaattgtattgctcacaactcagccttgtcagactagtaaatcagacagattattttagatgcctcctgagggctggaattacagaggtgtcttaaacccttactacttgaagtatagaccacacaccagcagcagtggtttcacctgagagcttattaaagctgtagaacctcaggccccacccagatttgctgaaacagaatctgcatcttcaacaaaatccacagatgttaatgtgcacatttaagtttgagaagttaataatttcccaggagctttagccctcatgttctcttattttacctacttactggtatggctatctttgtaaatgtttcttccacttttgaagaaatgttgttataatgtgccccacacacacacaccacacaaactgcttaagtccagttgactttgtttctaagagctaacattttcataaagtacaaagaaacaggatttaagtcttcagagaaaattgcttattatcttgccgaaatgttcttgaaaaggagagtttgctagaagctgggatgtccaagattactttattctcctcagttaaattataattactgcttttcctcataatgacttacctatgcaccaaattgatacttttataactatcttttattactgtccttagaagaaaattgtttccctttgaatgatatttcagaaggatttttttgaaggagtggttgtaggggagggggtggatattatatataattttatttagttttagaaactatcccctaagattacatatccagttgttgatataaagtcaagaggtttataaaatattagtttaaggaagctttttcaagctgttgaatggagcatacttatatttactagtggcattttgtttttattgtttatcaaacgattttttctttcagtctatggtaaaggacaaaaggaaagagagaaaatcatcacctagtaaggaaaatgagtcaagcgacagtgaagaagaagtttccaggcctcggaagtcacggaaacgtgtagattcagattcagattcagattcagaagacgatataaattcagtgatgaaatgtttgccagaaaattcagctcctttaatcgaatttgcaaatgtgtcccagggtattttattacttctcatgttaaaacaacatttgaagaatctttgtggattttctgataggtaaggttacataagcagtgagagaaaaaacttcactctgttcaaataataaatatttgggctgggtgtggtggctcatgcctgtaatcccaacattttgggaggctgaggcgggcagatcccctgaggtcaggagttcgagaccagcctggccaacatggtgaaacgccatctctattaaaaatacaaaaattagcctagtgtggtggtgcacgcctgtgaccccagctactcaggagactgaggcaggaaaatcgcttaaacctgggaggcggagattgcagtgagctgagattacgccactgcactccagcctgggcaacagagcaagactctgtctaaaaaaataataataaatatgaaacccagttttgtttgcatgcttactttaatgttagaaatgttccttttttaaaaaggagtttattctcttctattgctggatagtattctattgtgtaatatgccataatttatttttattaaagggaaaaaaacatattcctatacttggtgataatgcattacaaattgaaggacttattttgttgatttccttaaaaagactcaagctaaccttaaaatagattacaagtttaagtttttaaagagctctgaagtaacagatgtaaaccaactaaacagagctccagtagaactcaaatagtatttaaagtactctataaagtaagagagagaaaaggtacagctattataaacaccctgtagttttacccaccagtagtcattaaagatacctcttttctgcctgtaaccatggaattttggtcattttttacattcattgaaatctaagattaggaatcacaaaatcaaatgttaataggctacctggtcaatggccaactggaaagagtgtgttgcatgtaaagaggtcatttaagtggacctgtctcaagtttccataagcttgttgccaaaggagagggtaggcataatgtggctagagctcccactttttcaggagacactagaaatccagatttttaagaggaatatctgtatttgcaacagggtctcgctctgatgcccaggtggagtgcagttatgcaatcataaactcctgggctcaagtaatcctcctacttcagccacctgagtagctgggagtacagatgcatgccaccacacccagctaattttttttattttttacttgtagagatgatgtctagttgtgttgctcatggtagtcttgaactcctggcctcaagtgatcctcccacactggcctcccaaaactctgagattataggcatgagccactgctcctggccttataaggaatatcttgatgttaaatgttggcaagatgcaaaataatttaaaaccttgtaaggttttgaggcaatgctaaggagttggaaagatttttaagcagagttgttaataacctgaaacaggtttataaacaatcattctggccactatatagaggatggataggttgggggtgggggagcaactagtagaaagaggtaaaccagttaggtggtattaagtaattgtattgaagctgtcctaggatcacaatagtattaaaaatagacatgagaaactaatttcattaatatggtgcttcctacctataattggatttctccaaatacgttgtttccatagttttaaagtttttggttttgttttcccaaaacagtaaaattcagaagtactctccatctgaatctgcaaaagtatatgataaagcgataaaccgaaaaacaggagttcattttcatccaaaacaaacactggacttcctgcggagtgacatggctaattccaaaatcacagaagaggtgaaaaggagtatagtaaaacagtatctagatgtgagtagtaaaaccaaaagtttttacttctcataagggcttttttgacaagtaaatgtggggggccggtggggagataactatctccttcacattgaatataagcttcatgaactatcaagataatttttctctatcttattttaatgagttactttaagcttgtctttcccattgcacccatggcatcctaattattttttcttaggaaacagcagcccacgaataattttattttagcaaaaatgaaagattataggaaaacctgtgtgtgttttgtagttgtcccctggtatctgcgggaaattggttccagtccccccatggatacccaaatcctccgatattcaagggcctgataaaaaaatggcgtagtgggctgcgtgaggtggctcacacctgtcattccagtgctttgggaggccatggcaggtggatcacttgagctcaggagtttgagaccagcctgggcaacatggcaaatccccgtatctataaaaaatacaaaaaattacctgggggcagtggtgtgcacctgtagtcccagctactcaggaggctgaggcaggagaagtgcttgagcctgagaggcagaggttacagtgacctgagattgcaccattacaccccatactgggtgacaggagtgaaaccctgtctcaaaaaaattatttaaaaagcatagtatttgcatataacctacatacatcctcccatatgctttaagtcatttctagattacttataatacctaatacaatgtaaatgctatatacatagttgttatactgcattttttttaagttgtattttttattgtaatgctgtttgttttgttttgagacggagtttcactcttgttgcccaggctggagtgcaatggcgcgatctcggctcaccgcaacttctgcctcccaggttcaagcaagtctcctgcctcagcctcccgcatagctgggattacaggcgccagccaccacgcccggctaatttttgtatttttagtagagatggggtttcaccatgttggccaggctggtctcaaactcctgacctcaggtgatccgccggcctcccaaagtgctgggattacaggcatgagccaccatacctggccagtgctgttattttttattgtggcattttccaaatagtttttgatccactgtgggttgaatccgcaggtgcggaatccggggatacagagggctatgtttttaattcagaaaaatacatggcttatatgtcataaaaggtaaaactgcaagcagtcattctcttaccgtgtttggctattctgttcctttcttttctgataaccaatattattactttttcgtatgttcttatatgagtaatgccaatatatatatatgtagattttctcacttatcaagtatgcaaatgtatgtatataaaatgtgctttaaaaatagagacagataatagactagaggttaccaaggaccggggaaggaaagaacggggagttattgtttaatgaggacagctgtggtttccagtgattaaaaaaaaaaagaaacagctctggaaatggacagtggtgatagttgtacaatatgccaatgaattatacatttaaaatggttaaactggtaggctggacatgctggcttatacctgtaatcttagcaccttgggaggcctatgta

SEQ ID NO: 2340 - DNA, 6000 bp, Homo sapiens
aatattagaacgcagaaacccggatcaaattataaatctacttttctagaaagtctcatcagttttctagaggtgaacttataaattcagattctattaaaaaattggggtattctgaaaatatggggtattcattactttttgattgtgctcatctcggaagcattgataaaatatccccctttgccaagtatatatcaatatttattttagctaacccagctggtacttaataattcaacactattttattacttttctctggttaatctattgcagcaaagatataattgcttttccataactaaacccctaactctttttatcatttctactctgccatcttagacatattagaatgatgaatggtcaatggtaagaaagggagtagggaggaagaaaaagaatataaacaggacaggtgttgcaaaaattagggtaatagcctaaggtctatcacaggagttccaaattctggtctaccatggagtgacctgggaatcagcttattcatctataaaatacatgtgttggattcagttatagctaagattcccactggctctgaagcaatgcacaccactatctgtgggataacacctcttttctgttcacttgaagctcctggtttaaaaacaataagatatcactccttcattcacccaaatgtgagtgattattagcatcatttctagctgcagcctgggaagtgcacaagtcctaatgatgacttaaaactggcatgttctgtgtccaaaagggaaaaatgggctgtgacacatactcataaggtctgcaccacagggtgaaaaaatgaggcctgcatatgtctaaatttttgaacagcgtggctgacttttgaccttacttagcattacttgaagcagcttactgacgctgccaataacatcatacataatagggcacacatcttgtaactgaaccataggtagtgctgagcaacataaagaatccaggcaatacatatgtaaaatgtaaactgctcaaacacaatagctactgaaggatctgctagtacatacactgattgcttctctgaggttcaagagccaggttttaggattcttcaatggctgctgccatggtcttgttttaaaaagcctcaatcatttctcaagacatcacacgtaacaaaaggctgcatctatttctctcaatacagagctagcctgatagtagcagatatgtttaagggcatagaaataaagtatgccttccagaagttggataaaagagaaaaacagcctttgagaattagtaggtaccactctaatctgaagcttgtactgtccttttcaatcctagcaaagaaacaattaataaaggaacccattaagacctgattattgcagctaaaaaaggaaggtagaatttcagtcctttgaagtaactgagaatgattcaggcctcattacagagatataatctacattcatacatttatgttagtgattcaaatctattgggagagattgaattccgttaaatagtgcatctttcctgtggaacttttctcaggctttctcgggctaacctaagaggtgacctaacaatgcaaagtagtcgggtatttagggattcaactgtgctgtaaaagaaaggctgcacagaaaagaaaaagaagaatgagatataatctaaaaagctatgtcagcttttcctttgggctgttttgtaaatgccctcttgtcatcacgctgtacagaagagcagcgaaggggctctagaactttcaaacactgcacctgctgcaaccagattttaatatgaaagtttaaagacatcttttccctcattttagacagaaaaaacaaagaaactcctagctaaaagatctgaatggcttcttctactggaacataaagttggtagatgtgtgtatgagagagagagggagaaagagagactagctttggattggaggggcacatgtctagggtgagtttaacaaaaattcttaaaccccaaagtggcatcaatagtgttggttcctattgtacagaaaccccaaaataataacttcctgtgttttgtaacttttcacagcagaatctttattgtatggtttcatcaaacataatttttaaaaaatgtagttttaattagttgtaaaatcaaacatttggattcttctggaccattgggctgaaacccaaatccatgggaaacactacactgtctttcaggcatttgtcctctcaggtataaaactgtgaactaaaacattgaaattcgcactgttggttcatttttcagtatcctaaagaaaaagactcgcttgatgtgtgctctttatttgcttaactttccaattaatatctacagaaattagagctaattatattaaactttaaaaacctattgtaatgttcaccacattgttgaactcttctaaataagcactgcatgagttataactaatgcaattaaaatcctgattctagtattaaatgattctatttcaaaggatttgaatacacagaaaaatataagaacattcatgtaaactcatttttcaagtcactaaatacttaattgagcaatcattcctaatgctcatctctaacgctaattcttttttctttgcatttcctctggttcacaaccaatatggaggtcaaacgcacatcatagggatcctagcttgtgtgaacacagactcttctaattagttccctccaaattacagttgctgttgttaaactcccagttcaccttgaagtgtttctctgtcttacattggcagcctaattttaggttgaaacatatgaaattaccacttttgtaggtacaaaaccttaaaatgttggcaattttgtgggcttcaacaaaacacaaatgtctaactgtcctatgtgacatagatagttcattccagtacatgtttaggcattccttctagttaaacgttccctagtttagagtcattcttaaagaagtggtcctctaggagctgtttcttattcagattggaatggattatcacagtatttccttttttgtgcctcttaactcttggcaaaggtttcttagccttggacttagttctgtcaatacctgggctgtgagctagtttctgcgagcaagggaggagttggggtggcctgaaagagtgtgaaaaggagaggaggactagtagtgcagtgatattgtaaaacagagccctttaaacattaaatgtgaagatagaaaaaaaaaaaacctcccctttatgacaaagtgcaaaggaaattgcataaaaaagaaaacagacagcaggctattcagccaaattatatggtaaaatctttgcgatcgccataaagtgcgtttgctttgaagtgcacgcatgattcagtgaagggctcatgttagcaattagaaatcggttatttgggtccctgatttcatttgcgccgagagaggcaacttttaagggtgacgataaatctccctgagcttaaaaggcagagagggccaaagtgtgaactttttacttcagcaacggaagcgagaaatcagtgattcattaaagaggagacctccttggaagctggcagcagaggaggaaaggacactaattatgtcttccttttctgtgctcgttctgaccagtttataacctgctgctttggacggtttaaaatcctcagcatcttctgctttctcccagccctctcctcttctgggagtgagaagggaggaaaagtcagccaagcaccaggctccaggtggctctcaagtacttcactgccaaaagaaatgggggtggggggaggagatcctacgctggaaagcaagtgagaaaggggctccccagaagggattggttcaggctggaagacagcaaaattcggaaagcgggaagataccgtcagcgccgtggcccgcgctgcaagcataggacgctttagcagcgaattagacagagctagaggcgccggcggaggctgcggccgcaacagccgcggcgaggaagggacctggcagcccccgagctcggtgcaaaggcatcgcgctctctcctcgctcccctgctcccccacccccttctctgcccctttcaccctccctctccctggcgttcccagcagcctagggtttcagatgtcccaccgccggttgaccccctcccccctcttctccacccctgcaaatgaggtttgaccagcagaggcagagcccacctctggcttagaatcactgacatttagactccaggcttcaacctgtttacaagcggactttccaaaggaagggggtgggagatagggccatacaaaacaccagccgccgtcccccaaaacaaaaagtgactttcggcagccttcaaatcggcaggcaccactaaaaacagaaaggaagagagggaagaaaacaacggcgactgggcagctgcctccacttctgacaactccaaagggatatacttgtagaagtggctcgcaggctggggctccgcagagagagaccagaaggtgccaaccgcagaggggtgcagatatctccccctattccccaccccacctcccttgggttttgttcaccgtgctgtcatctgtttttcagacctttttggcatctaacatggtgaagaaaggagtaaagaagagaacaaagtaactcctgggggagcgaagagcgctggtgaccaacaccaccaacgccaccaccagctcctgctgctgcggccacccacgtccaccatttaccgggaggctccagaggcgtaggcagcggatccgagaaaggagcgaggggagtcagccggcttttccgaggagttatggatgttggtgcattcacttctggccagatccgcgcccagagggagctaaccagcagccaccacctcgagctctctccttgccttgcatcgggtcttacccttccagtatgttccttctgatgagacaatttccagtgccgagagtttcagtacaatgtggaaatggatactgacacattgtgcctcagcctttccccacctgcccggctgctgctgctgctgctttttgttgctgttcttggtgtcttccgtccctgtcacctgccaagcccttggtcaggacatggtgtcaccagaggccaccaactcttcttcctcctccttctcctctccttccagcgcgggaaggcatgtgcggagctacaatcaccttcaaggagatgtccgctggagaaagctattctctttcaccaagtactttctcaagattgagaagaacgggaaggtcagcgggaccaagaaggagaactgcccgtacagtaagtaacaaatgcatgctcccctccttccaattatccacccccagcccacacgggggggaaaaatctgttccagatgtggccagctaaatatttacgtccccaacccctgtaaaatgattaagtggaatactttcacactaattcaccccccaacccccgtgtatacattgtgctgccgcatcccctcccctaagcgcgctcccttcacatcccccaccccttgccgctctacccaccccttccctccagcctgtcactagccggaccacgcagggcgctcaagagagttgttgcagtgcaaagatgcccctttctctctccaccgcctttcccacctcatccaaagagcaatttttccttccttctggaaatggctcaagtaaacacattttgtttcttttccctggcaatcttgttaagagttttgggacaggctcctcaagctgaaaataattatccgctgtcaattataggggctttgtgggaactttatttaagaaagaaaagtcaattccactctctccccacccccatccctttaccccactacctctagatatgagcgaaaagcatttttctggttttgatttttgttttgttttgttttgttttgggtcccttatgttagtttgagtgattgcagtccatgaagttagcttttcaggcaccaccgctgctatttgtcttctgcctgccttccctcttggtaacatgatgctcatgtctgca

SEQ ID NO: 2341 - DNA, 6000 bp, Homo sapiens
cttccaccttcataaatcctcaatgctcgtgattaaatgctgccggttataaattatgcaaccaaattctagaaacaaccacaactgaaataagataccagtggaagccataaattgtttttcttcacagaaaactcttgtgtcgttattagaagatcacttctgagttcctattttcctcaacaattatttttttctcacttcatttagcttcctacaataagctctagtcctggttaaaaagtaataatcccagataataatctatcattttatatggtaaagtgtctttttgatttgcaggtttattttaaaattttcttaatatgtatggcttaagtctctaagacgtcgccctttttagagtcatatatcagaagtttctgcaacagtccaatttatcacaggtatttacaatcaaattattttattacacatgggaacaattaaacatttggccctcagctgtaaacaattactatataaaatgacattcatggatttttcttaaatagtcatgtattcctaatgacctctgttaacatgagtgagattgatgtatgtgtattttgtgtgtatccataagcaattatattcccaaatatcaaaagagagagtttacctagagaatacactaaccttgtctgatatcatgtggccacctgcaatgacacgtttaatgtatttgtttttctgcaattgtcattttatttctgttccaatttaattctaaagaactgcgggtgttcacagcaagaagcaagtaaagatttggataatttgttttttagagatttgaggtgtcaaattctaataaattgatattaatgttggaagtagcagaaaggtacaataagaaaggagagatacaaccaataggctggggcttgaatcctggttctgcccatgtctagttgaatgaccttggacaatttacttttttcagtatgagttttcaaatttgaaaaatgttgatagttgtaggactattatgactattaaatgaagtgtgtatttaaagagataaagcctatactacatactctttacatattgatttctctattgcctcccattcttctttcccagaaaggcccaggagccttttttgtgagtttccctttttggaatatctattcttaattgtctcaagtttagggtacattttcctttcactagatccctcttttctacaaatgacaaccatgggagaagctcacagctgttttactcacatccagaaataagtcaactggtcccagttgcaaggatacctaacagctgtatccagcctttctaagaggtcagaactaaagccgagtggtaaggtttcaagggcaaagctctagatgtaaagaatgataaaacaaaacctaaatgagcctacacatatctagtgacagatacaccacagctattctaaattattcaagctttctcagacttctagcaggagaaacataattcatctctgctctctttattctactctcatatcatggcaaagaagcaaacaaaaagtatagccccccaccctcaaaaattataataatcacccatatagagaagagctttgttaacgcatgtagtctttttagaaccatcgaatttctgggaactagctttgaaagtagaagttaaaaatgattttgcaatacttatgaatgattgtcttacttcccttttgttagcattctgctggcaaaaagccagaaaacagttgtttaattacccaggacaacaaaaacatataacctcttagataagctgttactgtattttagcagcaataatactagggtcaaaagtaacaaagaaaattaatcttcaaataagcaaacctcaaaagaacagctttgtgtattgagaataattaataacttgtttaggaaaatgttactgaaatgtggtttttggaaaaggaattgacactcttcagaggttagagatcctagtatttaacaagctaccatttggtggacagctggctggctaccctgtaggcatggtaaaagtttgttcacatgttattatgcaacgtttagacaatatcttaatgataccatgtagttcagctgaatcagtccagctggaaatcgtagcagcatttagattacctggccacatgtgaaattaaggctttttcaatctctaattttcacttgctatgttttgacacagatgttcttggaaagcctaaattatttatggtttgacaatatttagcagagtgaacccctcccctttcactgttaaccgttgattaagattgcattaccatataagatatttagcttgtcattataacaagtaatatatgttatcacagagaaaataaaatattagtatattttggacagttaggatggaacttttctacaccccttttatacaatatatattgtatacttttcttctttgcagatagttcttattgtaaagatgaaattcagtgtgtactgtggaaatcattttactctgcagctaatcacacgtgattattattctagaaaatagcaatttaggttgtgtaaactaaaacagagcagatttgaccttaagtcatatcataaagacatttaaagtatagcacaaacattttttaaaaagaaaaatgtttgctcaaggataacactctgaaactttatcatattcttttgagttttctccatgaaaaataagaaatgagtccatcagaattttttgttgttgttgttaattcccagctcactctgtccagcccaatgtttggatagcttcttccccatcctgctaactgaatgacaccacaactattttattttagaagtaaataaagtttttaaatttttaatcgaaaaaccttaaaggttatatacataggatctaatgaattcgggtaacaaatgatttttaagcaaaaataattgtcatcattatgacattatttcagctactttctttgaatcagataatgtggtacttaatatctttagtatgaaacataaaatgaaacactttaaaagcacctctacacgtatttttattacttataaacatattgtgaattttagtaaatagaaccagtggctgaggagaaacagaagttaatgttgaatgtgtgtgcatccccacagaagaaaactaaattcttaattcttgtaaatttgtattcaaaaataaaatgctaaattctggtcaactgtcattcccattagtacctggtactttctaaaccaaggaatcttgaaatgtttgactgacgtatttaagttaactgacaagacaatctatgcttagaattcctgaacaactaacacaaaaatgtcccctttaaaggtgacttggaatttaccattgagataatgccaaatggtcactaaagatgtttaaacatcattgtctactgtcttcagtgtgccattacagagccttgggttcctttcacataacaatcaatagtggatgaataagtctcaccacttgaaagtatctgagaaaggaagtcaacagagtaatctgggtttgctgggttgattcaagaagagacacaatatccacccctcttcttctagttctcttcccccaaccagcccacacccctgcaagaaagaaagaagggaaagagagaaagaaggaaagagagagggaaaaggcaagaccaaaatgtagggatcccaggcataatttacgctgaggagaaaatgtcacactgtgggataaaatatagccatggaaacagacttatgacttttactttgaaaataaaagaatgacaatgaaatttgtgtgaggtctgtgtgaatccagtcccagatgtttacaatgctgtagtagtatggctctgcaatatgagaggtttcagaagaaacagtacaacaggacaccacaaagcagtgcatacgctattgacaatgcagacatgagcatcatgttaccaagagggaaggcaggcagaagacaaatagcagcggtggtgcctgaaaagctaacttcatggactgcaatcactcaaactaacataagggacccaaaacaaaacaaaacaaaacaaaaatcaaaaccagaaaaatgcttttcgctcatatctagaggtagtggggtaaagggatgggggtggggagagagtggaattgacttttctttcttaaataaagttcccacaaagcccctataattgacagcggataattattttcagcttgaggagcctgtcccaaaactcttaacaagattgccagggaaaagaaacaaaatgtgtttacttgagccatttccagaaggaaggaaaaattgctctttggatgaggtgggaaaggcggtggagagagaaaggggcatctttgcactgcaacaactctcttgagcgccctgcgtggtccggctagtgacaggctggagggaaggggtgggtagagcggcaaggggtgggggatgtgaagggagcgcgcttaggggaggggatgcggcagcacaatgtatacacgggggttggggggtgaattagtgtgaaagtattccacttaatcattttacaggggttggggacgtaaatatttagctggccacatctggaacagatttttcccccccgtgtgggctgggggtggataattggaaggaggggagcatgcatttgttacttactgtacgggcagttctccttcttggtcccgctgaccttcccgttcttctcaatcttgagaaagtacttggtgaaagagaatagctttctccagcggacatctccttgaaggtgattgtagctccgcacatgccttcccgcgctggaaggagaggagaaggaggaggaagaagagttggtggcctctggtgacaccatgtcctgaccaagggcttggcaggtgacagggacggaagacaccaagaacagcaacaaaaagcagcagcagcagcagccgggcaggtggggaaaggctgaggcacaatgtgtcagtatccatttccacattgtactgaaactctcggcactggaaattgtctcatcagaaggaacatactggaagggtaagacccgatgcaaggcaaggagagagctcgaggtggtggctgctggttagctccctctgggcgcggatctggccagaagtgaatgcaccaacatccataactcctcggaaaagccggctgactcccctcgctcctttctcggatccgctgcctacgcctctggagcctcccggtaaatggtggacgtgggtggccgcagcagcaggagctggtggtggcgttggtggtgttggtcaccagcgctcttcgctcccccaggagttactttgttctcttctttactcctttcttcaccatgttagatgccaaaaaggtctgaaaaacagatgacagcacggtgaacaaaacccaagggaggtggggtggggaatagggggagatatctgcacccctctgcggttggcaccttctggtctctctctgcggagccccagcctgcgagccacttctacaagtatatccctttggagttgtcagaagtggaggcagctgcccagtcgccgttgttttcttccctctcttcctttctgtttttagtggtgcctgccgatttgaaggctgccgaaagtcactttttgttttgggggacggcggctggtgttttgtatggccctatctcccacccccttcctttggaaagtccgcttgtaaacaggttgaagcctggagtctaaatgtcagtgattctaagccagaggtgggctctgcctctgctggtcaaacctcatttgcaggggtggagaagaggggggagggggtcaaccggcggtgggacatctgaaaccctaggctgctgggaacgccagggagagggagggtgaaaggggcagagaagggggtgggggagcaggggagcgaggagagagcgcgatgcctttgcaccgagctcgggggctgccaggtcccttcctcgccgcggctgttgcggccgcagcctccgccggcgcctctagctctgtctaattcgctgctaaagcgtcctatgcttgc

SEQ ID NO: 2342 - DNA, 6000 bp, Homo sapiens
tctctactaaaaatacaaaaaattagccgggcgtggtggcgggcgcctgtaatcccagctactctggaggctgaggcaggagaatggcctgaacccgggaggcggagcttgccgtgagccaagatcgcaccactgcactccagcctgggcgacagagcaagactccgtctcaaaacaagaaaagaaaaaaaaagaaggtttttcaagggacttggggcaggggagaaatatgattagcttaagataaagcttattgccttttatggctttattattggatctctacttctttgcatagtgcatgacacttgctgggtgcaaagacatatgttaaatgaacggactggagaaggaatagatggagattatcaggttatcgttattgtttaagaagagggcaggtgtaatcaacacagcagaggggaaaatgtatttgataggtggatttgggcatatgggggaagggaaagagttaaggaaagctgactttgcctctgctccaccaggaagatggtgatactggcaacggcacacagagggaggaatagatagatggtctgggcagaatgggaataaggaaagattctcaattctgttttggattatgttgcatttgaagttctggaagaatatctagtgaaaacagattttcaggtctagagcattcatgaaccagcttttctttgagaggggatcattttcatatgcctgatttcatccattgttttatacagatttgaattaatttcattttaaaattttctttgcattgccttaaaatggtagagaactaccttatttgggcagttaccctatgcaagaacgaccctaaggaggatgtgaaaggaaaaatgccctaaaggaaataagtggttggaagtgatcttaagattttcatgcagtgaagctgggcaaacctttccctctatccttgttaatttgggtatgaatggagaaataattttaaaggacagaccctgtactgtacttagaaatcaggcagtaatagaaaaatatgcatatacacgaaccacttgtaatcgaaaaaataagtaataagccatgtaaccagaggtgatgtgctactttattgaccactcttctgactgaggcttttacactgctggaacctttgcaatttaaatttttggagccctttgtaaattaaatttttggatagtctgcatcaagagggcttcattcgtccatccatgctctcgctatactgagcgacgttacaccggggagcagagagtttatcagtctgggacgatgtttttccttccctttctttttcttcgtggctgacttccttgcgccacctgagtgcggttatcctaagctctccccttctgcagtctaacgcctgccccgcacaggctggagctgtatcagcccccactggcgtggcgctttccctcacactcccagctcgcgttccccaacccctgctgggcggggaaggcgtgccccagggacagttggagcaaactcccaaccgtccctttggcccagtaggcgcgcgcaggggctgcagggcggcgcgcagaagctaggggcgggagcgggcgcgggcgcgggcgtagccaggcgcgagcgggctgagggcgaggcaccagcctggagcagggcggggagtaaccgcgggccggaggggcgcgcaaacctgccgttggcgctgggaatggggagctctccggtttgcactgctcggaaattagttgaatacagtgaattagagaaaacaagttgaaaaatgataagtataatgagatctcatttgtggggaaagatccacagggccagactctatgtgtgcacgtgcaaatacattgaaaagggtctgacgaaggtcggggaaggaggaggttgggagagcggattgaagggagtgtacttggtatattgcacattcagtgcatatgccgctgaagcgagcccatgtatatggcatatttttgagatatttaacattcttgatgtttagaatgaaagtgtaattgaaaaaaaaaagagatcgcatttgggaagcttgaatatcctcttgcttcccattgatagggacctactgagattctcagagcaccggcgactttgagagttaagggaagcttttccaaattctttctctcccttcctccactagtccacctcccctcgctcctgtcgcctttctttcctcaaaatccttcttattggcctttgtccaggagtcttcctcacagcctttctcattgtcacatcctccctgcaaaacccattctcaaagaggaaacatttgaaagatagtaaagctactcttaggcgcataaatatttgaattggacattgttcctaaaccatatttgataaaaattaagataatatgtttacaggatgtttctgttttccccaaacagtcttaccaaagtgctttttaatagaatgaccacatgatgttaaatatttttcattttgaaataatttcaggcttagaaaaaagttacaaaaatggtacaaataattccattatatccttcactcagcgttcacaaatcttaacattttatatagctatagtacaataatcataactaggaaatcagcattactactactctattaactaatctgcagatatggatcaattcaaatttctacagttatctaaccaatatcttcttttttgtggtccaggattcaatccaggacctcgcaatgcatttggttggcatgtcttgtttcttttaatctgtgacagtttcttactctttctttattgatgactatgatacttttgaaaagtactggccaattttgtggaaagtcttttaatttgggtttgtctagtattttctcactattaaggttatgcattttgtggggcaaaaatatcacagaagtgatgtgtccttctcatgaggcacagtatgtcaacatgtctcactaatggtgatgttaactttgatcacttggttaaggtggtctctgccagttttggccagtgaaaagttgtgattttattttttgtgtttaattatagggggaagtattctcatcatatgcaaggtaattttagtattcttgacagttattactgtaatatttgccaagtggcgagtttctgtttccatcattctgaagttaagttttaatctgaatattcaactgcataattacttcctaaagatatttgactaatactttctctacttcacactaggggaaaaaaagacatttggaggctgtgtatatgtatgctgtggaattaatggctataatggaatttataaatgtatttttacagataattgcattctaaatgaatgattcactattcttagtacttgtaagaaattggattctaaaaatcccaatttacatggatttatgagcttattagttgaattgcttttattctgtgtttatacaaaatggttaaatgtaaactatatttaaaaatagaacaaagataatatgtccttcatattatttccaatatactttgagttttagttggcatttgcaaaactgatcatttaaattaacaatgcatctgactctcatccaataatagtttacttttatttagtcttaatgtttgctgaaagatttactggaatttggaatgagtactccactgcaaggaaaatagacttcttgtgggtgaaacttagagatcttttaatccactagttatttgactatcaaacattttgatatatgtcatttgaagattaagttaccctatgcagcattattattgtacatagaaaactggtctaagattgggtcttagttctaatgccattttttcttgctttcagtatgaaggaaagcaggggagtgagttttaggtttttttttttttttttttttggatcactgacccttttgagtatctgctatctatgaactgtttccccagaaaaacacacaaactcacattgccttagagcaaaatacaatccaatgtcaaaaatggttggggggttagcaagggagggacaaacaggctgccaggctgtcagaggcttcccagatgcagtgtcccctcctgccatatggcacaactcggctctcttggcagctcagatgggcagctaaggctgcacagcccatctggttccctgtcatttcccgccagacctcttcctcaaccctcaatatcttcctctccccctttatcacggagtccccagtgtgctcagctttctggccccctcttcacgccttatgaggtcctgcctgtcactggttctttcactacctcttcacctctctcacctaccccctgctaaggaacagggctcagaagcccgagtgagaggacctgactactcccaatgtatagagcagggaataatttattgcataaatatgtcaacgctctcccttttgatcggcatagaaatcttgccacgttttcttgccttctgaaaacgaagagctgacgaacacgcctcacatctatagctgacacagcgattaccaacggacagaggccggagagctgtgcacgctcggatcctgcaaaggcagggtgtggttggagaaagagaagtgggtgcagaggaacagggatcagggccgttataaggaaacattcttgtttctgaaaatggaaagatcgtgaactcccagaacccgcttcttcgcccgccaacccctccgcctcctgccgcggtggcagcccccggcgccaggcccagccgcaggcccgccacggctcgcggcaaagcttggcgcccgggtgcgcgcctcggccggaggcggtggcggggcggggcccagagagggccggcaggggcggggccgcggcgcgcgccggggaatcccacccgggctctgacgacaccgcggcgccggccaataagaagccggcgagggggattcccgcgccgactgccgccccgccggctttttaaatggtaccctggggaacaccttgcagcggcggtgggaggagtgggggacctggagggaggtggtgaaatagaatggtcctgggggacgggactccaggggtttgacgattaggcgtcaagactgacttagacctgggaagaaaaccagaggcagtcgagcagagaggccaaacgccaggcagggcgaagtcagccggagatggagtggaaactggagcgcaccgcgcctcggagggtccgcacggaagaggagatgctgtgggtgagtaacacccttttctgcattctccctaactctctaatgcggggccgaaggccccgttcataatatctgtttaggaccaagaggtggtacgaaactctaagccctggtcgtaaatttgagtgatgtaatttagttatattctgaaggtgcctagttgccaaaaaaaaaaaaaaaaaaaaaaaaaagtgtaatctgacaagcacaagatctagaaaaattccacacctgaaattatgattttcctaaatagtttctccctcaatatgttatctgtgttttcaaaggaaagtatcatgcgtgtgctctccaaagacttgaagcagaagagaagtcaagattccgccaacgtgagtccagggcttgttcttgttctctgttttaattctgatcttgaacaaacgaattcttggtaaataatgtatttgtaggaagtttgagctggtctgaaaatatgagaattttagtatcttattacatactaaaaaaaatttctttatgaaactgaagatcccagacaaataatgcaatcgtttgcatctgaatcgtactttctagtttctgcctccacagcaaaggataaagctgggatgtgtcaggtaggcagtgtattgctagcggctgttaatgattttaacagttgctagttgcactcctctctgttgcattcagaagcacgccccccaaagaaatggaaatggtgccatcttgtggacaatgtggagaagtggcataaaccatggttcttaacgtgagcaatttaaagttgatccaatgtagtacctgttctccttgaaagaccaaacccaaaggtctttagtgtctcctgta

SEQ ID NO: 2343 - DNA, 6000 bp, Homo sapiens
gctggaactagaggcacatgccaccattcccagcgaatttttgtatttttgtagagacagggtttcaccttgtcgcccaggctggtctcaaactcatgagcacaagcaatccgcctgcctcagcctcccaaagtgctgggattataggtgtgagccaggacacccagccttaaagtaattttttaaataaaagacttgctttgggaagtcgtagttaactacgacttgctttgggaagcctttccaggccaggctaattgctcctactatgggtttctgtgacatcagggctgccagatgtcaggatgcccagttaaatttcaatgtcagataaacaacacatcatcttttagtataatatgttccctgctattatatactaactaatgaatagttttttcttataaatatgtcccatgcaatatttgggacatactcaatgctcaacatttttttatttgacattcgaattaaccctgtgtcctgtattttatctatcaaccctaaatccagtaaatcctctatcagtaatcctttaccacgcagtaatcatttaaacaagtgcaacaagtggttctttgttcccccaactactatgcagctctgtgagggcagggccgtgcagtcttacagttttagacccagcacctggcacagcaggcattccagaagactgaggaatacgtccatcaagccaaagctcaagtaccacctgttgggaattgactctaactataggcaaactccctgggagtgcaaagcattttcagcgtggtgcaaagacagtctcacgtccacagacggatcaaatgatggtgcttttttttcagaatagctccagtgtggccgggcgcggtggctcacgcctgtaatcgcagcattttgggagaccgagtcgggcagatcacctgaggtcaggagtttaagaccagcctggccaacatggtgagaccctgtcgctacaaaaatacaaaaattagccagggatgatggcaggtgcctgtaatcccagctactcaggagcctgaggcaggaggatcgcttgaacctgggaggcggaggttgcagtgaccccagatcatgccactacactccagcctgggggacagggcaacactccgtctcaaacaaacaaaaagaatagctccagtgtgataatactgttgactccccaatgacagctttaaggtgacccgaatattttacgttcaaaaaggacattgaattttcacatctattttacttgaccctcaaggcaaataataatatccatatttaacagatgaggaaatggagactcagagggggaaatgtcttgcctaagataaccaataagagagccacagttttaccctcaggagttgacttcactaattagattttcaaaaaaaagaaaaaataggctaggcatggtggctcacgcctgtaattccagtacttctggaggctgaggcaggtggatcacgaggtcaagagatcaagaccatcctggccaacatggtgaaacctggtctctactaaaaatacaaaaattagccgagtgtggtggtgcgcacctgtagtcccagctactcaggaggctgaggcagaagaatcacttgaactcgggaggcggaggttgcagtgagcccagatctcaccactgcactccagcctggcaacagagtgagactccgtcttaaaaaaagaaaaaaatagatggctgggcacggtggctcacgcctgtaatcccagcactttgggaggccaaggcgggaggatcacctgaggttgggagttcaagaccagcctaatatggagaaacccccgtctctactaaaaatacaaaattagccagcgcggtggcgcatgcctgtaatcccagctactagagaggctgaggcaggagaatcgcttgaacccaggaagcagaggttgcggtgagctgagatcatgccattgcactccagcctgggaaacaagagcaaaactctgtctcaaaaagaaaaaaaaaatagatgaaagcataattagatttaaaaaaaaaaaaaggaaaaaggagttgacttcctgctcttttcactttaccacactggccacctgggccaatatgaaaaaatcagaattcctggattctttcttctcacccagaaagcttctctaggaagaagtctggtatctgagtcctctccacaggttcaattgctcctcccataatgttgctcctcccaacaatagtctgagagacagtaaggcctggcaccactcccagtgtttcttagctcgtctcccatgttagagatgagattatttatttatttttcttttgagacggagtgttgctgtgttgcccaggctggagtgcagtggcatgatcttggctcactataacctccccctcccaggttcaggcgattctcgattctcgtgcctcagcctcccaagtagctgggattacaggtgtgtgctatcacccccagctaatttttgtatttttagtagagatggggtttcaccatgttggtcaggctggtctcaaactcctgacctcatgtgatccacctgccctggccttccaaagtgctgggattacagtcgtgagccaccacgcccggcccaaatgacattatttagggcagaatagagagcttgctcagagttatggggaaataggaggaacagtggtcagaacccaaaatccattccttttctttcacctgcatctctaggagacaccatcccaccatctactaaattttcatagacagaaacttgtactttgagcagacacatttatcagctttcttctggaatgaggttaggtggctgaacctgctcttggtttggcacccagtagcctcgcctctggaaaacaccagggttgagggtacctgagctttctgccgttgctaagtgcctgtgaggttgattatgggctacttgtgctcctgcagccccttctcctatagggtcagagaccctcaggaagattcactcaggccacagaagggctccagcttctaccaggacgggagtctgtggactaaacccgaggcgccttgaggaaactgccacgcccggtcggcctgggcgtccccattccagctttaatttccctgagtttatcaccctgaaggagcggacgcaggaagcagggaaaaaccaaggactgggctgccggcggggcagaaggccagaagctaatgacctaaaacggaacaggctgtgagcaattcgatcaaactcgaaatgcaactttccaacaatgttcttaaaccgctgtagccccagcttgcttggcttggggtgaaaagtgtgggagaaagtcttcacggcctgcagacttgcttgccgactgaggttgatccggcagttttccgttttgttttgagcgcgaaagcgtggctggctggtggagctccaatctattccgcagcacaaacggcccttctgaggctctgctccccgaggctggcggaaggaagggcactggctactccggtacccaccgaaacaaaaccgacaaacgcaaccgaattaacactattgcttgtttgggtcactgaagaaaacttttcccgtgtcgacagaattctagcccgactttcgtttggaactcaggatcagacctttacaaaattaccgacctgggttagaggtgcccgcacgtgtcgagaccatctggccaaggacagagagatgccccctgggagaatgttttaaccggcgcagcggagccgcttggctgcgcccgccgcagccctactcccactccgtgcaccgggctccgcagtgacccgggctccgcagtgacccgggctcccgcagcgacccgggctccggttgcccaggtaacgcaggacgcaggcgcgaaaggcgggtgcctggcgcgcgctgcagctccccctccccccggcgggccgcggaggcgacgcgctgcctgcgccctgaggcgagtggttctccagccggaaaatcgcggctccggtgccgctctgggctcagccagtgagaggccgggggtgtggtagagagaaggagccggccgggtacttaggaccgcgccagcctctgagcccggcctccttcgcactttcgagtgcgcgtttgctgcccgccgcagcccgggcgttgaaggtagtaaagcggccacccggccgcatcatggtgaccccctgtcccaccagcccctcgagccccgccgcccgagcggggaggcgggacaacgaccagaaccttcgcgccccggtgaagaagagcaggcgtccgcgcctccggaggaagcagccgctgcatcccctgaacccgtgcccgctcccgggagactccggcatttgcgacctgttcgagtcccccagctccggctcagacggcgcagagagcccctctgcggcgcggggtggtagccccctgcccggcccggcccagcccgtggcgcagctagatctacagaccttccgcgactacggccagagctgctacgccttccgcaaggcgcaggagagccacttccacccgcgggaggcgctggcacggcagccacaagtgaggtgctggtagagccagctccacgccgccgctcttcctctcctcccaggctctctcctctcctgccggctcggccctccgagcgcccgggcccgcgacagcccaggtcccgccccgagtcgaagcacaaggggccgtggaggggcgtcaccggcctcattttacagatggagaaaagtggggcgtagacggcttgagggacttgccccgtcccaagctggctactggggcacggtagagaggaattcgtttccgggttgagtctggactcctaccgaactcgggcaagttatttaacacccctgagcttctttcttcatctgcaaaatggaacccctccccttcctttgaattgctgagcccattacgcgaggtaacgtgtacgacgctctctgcacagcgccaggtcccaatcccggtgttccggctcagcacggcccacgcgtttcccagtttccattgcgtttctctttctgaaatcttcttgcccctctcctgggaagctccccgattcttcttggcccttccttcccttccacagtccctctccaccctaagcccagcgggcccgcctcccccctccttcccggcaggtgacggcggaatcccgctgtaagctgctcagctggctgatcccggtgcaccgccaattcggcctctccttcgagtcgctgtgcctgacggtgaacactctggaccgcttcctcaccaccacgccggtggctgcagactgcttccagctgcttggggtcacctccttgctcatcgcttgcaaacaggtacctggggtatcaaacaggtacacgcggcatctggggacgcagccaaactcccccgccactccctggccgcccgtctttccagcgcgcacgattcagtgctgggttcccagaactcattttatcagacatttgcatacgcatatatcccttagccttaacttcacaatttctccacaaacgaaaaatcctgtcactcggcttccaaagaaatagcctaatagactaatagctgtaatcagtcccaaatagctcttttggcacctctagtctagcctccgaaaaagccttcaaaatttcccaagctttttttttttagttggacagtagttagatcaactgcgctggaagtacgctctaggtcacttacgtggaagcagtggagaggcagagccccggctgtctctctggaagggatggggaaagtccgggcgtcatactggggtgggcctggggcccgggaagccgcaaagcggggttgagtgcgccctgtgttgcaggtggaggtgcacccgccgcgcgtgaagcagcttctggccctctgctgcggcgccttctcccggcagcagctctgcaacctcgagtgcatcgtgctgcacaagctgcacttcaccctgggtgcgcccaccattagcttcttcctggagcatttcacgcacgctcgcgtggaggcggggcaggctgaggcctccga

SEQ ID NO: 2344 - DNA, 6000 bp, Homo sapiens
ccttttcttggaagcagtggacaggagtcctagatataaaacctagccctgagctttgaaggtaaatttaagaaggcttttatatccaagttaaatcaattaaaataggttttatccaatattaagagttagaaaaaaatgtaaaaaccatcccctgaattaaaagactgcctacaactgagatgctatactaagaaaagctcctttcaaggtttgttttgctaaattccatgatgcacagtggagccatatacaagtttatattgaatattttcattaatcagtcaaaatcttggggatattgttttaactaagcaacatttgagaacaaaaggtaaccactggtatttacatatgttcattcattatttaaataatgtcttttggtacttgcatcctgattaagctccatctttacattgaagacttaattgaatggaaacatggaactttctttttgaccttaaacagactgacaggtttcactgttttaactgccaacccacttgcctaagtacataagccagactcacagacctccttgaattcacctaaccttcaacatggagccccctttgtaatctatttcctaaatctttagaatctaatatcctatctccatcctcattacccacaattgtctcttgcctgaattactgcacctaactgggcttcgacctttgcttctccaatctcttttccacatatcagctagagtaatttgatattttgttttttttttttttttttttaggcaagatttggctgtgttgcctaggctggagtacagtgatatgatcttggctcactgcaacctctgcctcccgggctcaagtcaccatcccacttcagcctcccaaatagctggaactagaggcacatgccaccattcccagcgaatttttgtatttttgtagagacagggtttcaccttgtcgcccaggctggtctcaaactcatgagcacaagcaatccgcctgcctcagcctcccaaagtgctgggattataggtgtgagccaggacacccagccttaaagtaattttttaaataaaagacttgctttgggaagtcgtagttaactacgacttgctttgggaagcctttccaggccaggctaattgctcctactatgggtttctgtgacatcagggctgccagatgtcaggatgcccagttaaatttcaatgtcagataaacaacacatcatcttttagtataatatgttccctgctattatatactaactaatgaatagttttttcttataaatatgtcccatgcaatatttgggacatactcaatgctcaacatttttttatttgacattcgaattaaccctgtgtcctgtattttatctatcaaccctaaatccagtaaatcctctatcagtaatcctttaccacgcagtaatcatttaaacaagtgcaacaagtggttctttgttcccccaactactatgcagctctgtgagggcagggccgtgcagtcttacagttttagacccagcacctggcacagcaggcattccagaagactgaggaatacgtccatcaagccaaagctcaagtaccacctgttgggaattgactctaactataggcaaactccctgggagtgcaaagcattttcagcgtggtgcaaagacagtctcacgtccacagacggatcaaatgatggtgcttttttttcagaatagctccagtgtggccgggcgcggtggctcacgcctgtaatcgcagcattttgggagaccgagtcgggcagatcacctgaggtcaggagtttaagaccagcctggccaacatggtgagaccctgtcgctacaaaaatacaaaaattagccagggatgatggcaggtgcctgtaatcccagctactcaggagcctgaggcaggaggatcgcttgaacctgggaggcggaggttgcagtgaccccagatcatgccactacactccagcctgggggacagggcaacactccgtctcaaacaaacaaaaagaatagctccagtgtgataatactgttgactccccaatgacagctttaaggtgacccgaatattttacgttcaaaaaggacattgaattttcacatctattttacttgaccctcaaggcaaataataatatccatatttaacagatgaggaaatggagactcagagggggaaatgtcttgcctaagataaccaataagagagccacagttttaccctcaggagttgacttcactaattagattttcaaaaaaaagaaaaaataggctaggcatggtggctcacgcctgtaattccagtacttctggaggctgaggcaggtggatcacgaggtcaagagatcaagaccatcctggccaacatggtgaaacctggtctctactaaaaatacaaaaattagccgagtgtggtggtgcgcacctgtagtcccagctactcaggaggctgaggcagaagaatcacttgaactcgggaggcggaggttgcagtgagcccagatctcaccactgcactccagcctggcaacagagtgagactccgtcttaaaaaaagaaaaaaatagatggctgggcacggtggctcacgcctgtaatcccagcactttgggaggccaaggcgggaggatcacctgaggttgggagttcaagaccagcctaatatggagaaacccccgtctctactaaaaatacaaaattagccagcgcggtggcgcatgcctgtaatcccagctactagagaggctgaggcaggagaatcgcttgaacccaggaagcagaggttgcggtgagctgagatcatgccattgcactccagcctgggaaacaagagcaaaactctgtctcaaaaagaaaaaaaaaatagatgaaagcataattagatttaaaaaaaaaaaaaggaaaaaggagttgacttcctgctcttttcactttaccacactggccacctgggccaatatgaaaaaatcagaattcctggattctttcttctcacccagaaagcttctctaggaagaagtctggtatctgagtcctctccacaggttcaattgctcctcccataatgttgctcctcccaacaatagtctgagagacagtaaggcctggcaccactcccagtgtttcttagctcgtctcccatgttagagatgagattatttatttatttttcttttgagacggagtgttgctgtgttgcccaggctggagtgcagtggcatgatcttggctcactataacctccccctcccaggttcaggcgattctcgattctcgtgcctcagcctcccaagtagctgggattacaggtgtgtgctatcacccccagctaatttttgtatttttagtagagatggggtttcaccatgttggtcaggctggtctcaaactcctgacctcatgtgatccacctgccctggccttccaaagtgctgggattacagtcgtgagccaccacgcccggcccaaatgacattatttagggcagaatagagagcttgctcagagttatggggaaataggaggaacagtggtcagaacccaaaatccattccttttctttcacctgcatctctaggagacaccatcccaccatctactaaattttcatagacagaaacttgtactttgagcagacacatttatcagctttcttctggaatgaggttaggtggctgaacctgctcttggtttggcacccagtagcctcgcctctggaaaacaccagggttgagggtacctgagctttctgccgttgctaagtgcctgtgaggttgattatgggctacttgtgctcctgcagccccttctcctatagggtcagagaccctcaggaagattcactcaggccacagaagggctccagcttctaccaggacgggagtctgtggactaaacccgaggcgccttgaggaaactgccacgcccggtcggcctgggcgtccccattccagctttaatttccctgagtttatcaccctgaaggagcggacgcaggaagcagggaaaaaccaaggactgggctgccggcggggcagaaggccagaagctaatgacctaaaacggaacaggctgtgagcaattcgatcaaactcgaaatgcaactttccaacaatgttcttaaaccgctgtagccccagcttgcttggcttggggtgaaaagtgtgggagaaagtcttcacggcctgcagacttgcttgccgactgaggttgatccggcagttttccgttttgttttgagcgcgaaagcgtggctggctggtggagctccaatctattccgcagcacaaacggcccttctgaggctctgctccccgaggctggcggaaggaagggcactggctactccggtacccaccgaaacaaaaccgacaaacgcaaccgaattaacactattgcttgtttgggtcactgaagaaaacttttcccgtgtcgacagaattctagcccgactttcgtttggaactcaggatcagacctttacaaaattaccgacctgggttagaggtgcccgcacgtgtcgagaccatctggccaaggacagagagatgccccctgggagaatgttttaaccggcgcagcggagccgcttggctgcgcccgccgcagccctactcccactccgtgcaccgggctccgcagtgacccgggctccgcagtgacccgggctcccgcagcgacccgggctccggttgcccaggtaacgcaggacgcaggcgcgaaaggcgggtgcctggcgcgcgctgcagctccccctccccccggcgggccgcggaggcgacgcgctgcctgcgccctgaggcgagtggttctccagccggaaaatcgcggctccggtgccgctctgggctcagccagtgagaggccgggggtgtggtagagagaaggagccggccgggtacttaggaccgcgccagcctctgagcccggcctccttcgcactttcgagtgcgcgtttgctgcccgccgcagcccgggcgttgaaggtagtaaagcggccacccggccgcatcatggtgaccccctgtcccaccagcccctcgagccccgccgcccgagcggggaggcgggacaacgaccagaaccttcgcgccccggtgaagaagagcaggcgtccgcgcctccggaggaagcagccgctgcatcccctgaacccgtgcccgctcccgggagactccggcatttgcgacctgttcgagtcccccagctccggctcagacggcgcagagagcccctctgcggcgcggggtggtagccccctgcccggcccggcccagcccgtggcgcagctagatctacagaccttccgcgactacggccagagctgctacgccttccgcaaggcgcaggagagccacttccacccgcgggaggcgctggcacggcagccacaagtgaggtgctggtagagccagctccacgccgccgctcttcctctcctcccaggctctctcctctcctgccggctcggccctccgagcgcccgggcccgcgacagcccaggtcccgccccgagtcgaagcacaaggggccgtggaggggcgtcaccggcctcattttacagatggagaaaagtggggcgtagacggcttgagggacttgccccgtcccaagctggctactggggcacggtagagaggaattcgtttccgggttgagtctggactcctaccgaactcgggcaagttatttaacacccctgagcttctttcttcatctgcaaaatggaacccctccccttcctttgaattgctgagcccattacgcgaggtaacgtgtacgacgctctctgcacagcgccaggtcccaatcccggtgttccggctcagcacggcccacgcgtttcccagtttccattgcgtttctctttctgaaatcttcttgcccctctcctgggaagctccccgattcttcttggcccttccttcccttccacagtccctctccaccctaagcccagcgggcccgcctcccccctccttcccggcaggtgacggcggaatcccg

SEQ ID NO: 2345 - DNA, 6000 bp, Homo sapiens
tatcctttttaaaagtggatgagctctcccttagagcagtttttccccccgatggatgctgtgtactttccttggaatgcttaaggccctaagctttccttcagttgaaatagcttatctctagcagacagtaattcctttcctgagcccagccattgggaaggggaatcccaaagaaaagattttctgcctttcacagagaatcattcagagaatcacaacagggaacttgaagctatactatcaataaacattagttaacttactctctaaggtggtcttggaattcagttaattgttgcagactcacaggcagccttgtttaaggtggggttttagttcttctttaatcataactgaaaagttaagtccatcttagtgtaacgtcctgcgggaggattttcaaaggaaactaatctgtaaagcatagaatgagagtaccttgtagaataaatggaagatttggctctgtgtgtgctgcttatatgaaacaaaattaaatactcagtgattaataacaaagatgaattgttgtttgtgattgctgaacactctgatcatatacctgccatttcacccttctgtatgcacacagatgcagaattccagagaaaatactttttaaacagattattaaggaaatatttgacaaaataggtaactacagttgacctttgaccacgcagggttgactgcattggtcaatgcaattttttttcaataaatatattggacttttttttgaagatttgcaacaatttgaaaaacttgcaaactgtgtagcctagaaatactgaaaatttttatatatgtcatgaatgcataaaatatgtgtagacactagtctatttttatcatttactaccataaaatataaacaaacctatcataaaaagttaaaatttatcaaaatgtaggcacacacttacagaccaaacatggtgctatttgtagtggggagaaatgtaaacaaatgtaaagctacagtattaaatcataactgcataaaattaactgtcatgcaaactgtactactgtaataatttcatagccactgcttggtgcaattgcagcgagcttaagtgttgccagtattcgctttaagctgtgtaatgctaatcatctctgagtgagcagttcatctctccagtaaattgcgtattgcagtaaaaagttctctctcatggttctcacgtattttccatcatgtttagtgcaatactgcaaaactttaataacactatggcatccatacgaagcaccactggtgatgctggaagtgttcccatgaagcaaagtcatgacattacaagaaaaagttgaactgcttgatatgtaccatagactgaggcctgcagctgaggttgcctggtatttcagacagacaattcatcttgtaaacagacaatgtaaacttatggtatggacatagtacattactgtgaatgtagtttctcttccttatgattttcttaataacatttatttctctacttactgtaggaagacagtacataatacatataagatacaagcaatgtgttaatcaactgttttatgttatcaggcttctggtcagtagtaggcttattagtagttgttcagttttgggagagtcaaatgttatatgctcacatagttggttggtgcccctaaattccatattattcaagggtcaactgtattgacaagtgtatcctggattccatcctcctttcttggttttgtagagacaaggtctcaccatgttgtccaggctgatcttgaacccctaggctcaagcaatcctcccgcctcagcctccaaagtgctgggattacaggtgcgagccactgcaaccggccagattccatcctcttaaggccagtgtattaggtggctcattcttacagtatgagtaagcaggacttatttagccatcaaaagggtccttttattgcctgtaatcctctactctctatataacgctccaaggaatgagactatatttccgtctcctatcaactcagcctcagcatatgttatctctagttatctctatttttcccttccaacaaaagctgctttggggaaacaatctgatgaattaggtataaatgactaataaggattaaaatattacttttcccaggattatggttttgtgctagagaaaaaaactacttaaagggataaaactctaatggcagaatttcaggtgagttggagggtttttgattataggtacttttctagcctagatggtagtctgtcagattggtcctgagtgtgagtataaattttaaaaaggctaggaccagggcaagtcttagcctaaagcagtggcttgatcagttaagtttagagaggagggttaggtttactcgaatctatggcatcacatttaaaggggtctcgaatcaacctgagattagaagcaacactggaatcccagaatctagctggttttccactagtatgggagatattccatcctgggatgctttaggagagtgaccctttcagttcagagctatgccactgagttctgatcaggcgcaaaacggtttttgaaaacggagcaagaaatcttcccagcgatgattacaaatagcttgtacaatatgctaactttagctttttatgcaatggttaagattcattttcacatagatatccagcttggtaacactggcatagctgctgccatttcctagcttccagcgaatactcttacctctaattcagcactgaatatatctgaacacttcagtactacctgtaaatcttcaacttctgctgtatgctaaataacctaacatctgtattaattccagcagttcttcaagtagttaaaaatgctcccaacctgaataaaatgacttgaatatcttcggcgttatttcaagtgtttgcaactaatgtacaactcattttggtaaatgattacttggtggaatttatgaactctttccattggcaagccaaaaaaaaaaaaaaaaaaaaggtctgtaggggatatagctctttattcaaacttggtaataaataattatctctagaatacagacggaagaactgaaccagggacttcagggacccagaggctaattatcatcactgtacacagttaagtgcagcagagaatgggggtgacgaatggttcgctccgcattacgctccttctctgggtaaaacaaggccgtcttttctgtgaacatatttaaagcaagaactgcaaaaactgtgcaatgttatggttgaggctttctatttgccatatgtgttgacagaatgcttaagagtctctctccgcaataaacgcgaaccctgccaggctgaattattagggccagcgcaattcaacgactgcaccaccaccgaaccgctggggttggaagcctgcgtcgcatcggagcgtacccatgtttcttctaacaaaggcacgatcttgaggccatttcgcgggcccttttcccactcccagcgccagctttgtctccccgccggtatgaggctgagacttggaggaggctgagctgcgccgctggggaacaagctcgaagggcgggcgtgggaagctgcaccgcgctgccgctgtggtttcctgcgacctgaccgtgccattagaggaagttggagtgctgcagctgcaagagatacctgctgccttcaaatcagggctggactccaacaacccctgtgcaccgattactgtcgtacaaagaaactccatcggccggcgcggcggaggcctgtgggctctctatctctctggctgggcgctgggccgcgagcagacagcagggtcggcgttgccagcgttccccaccctggggggctcgggagtccgggagtgcggggtcggggagcgggcagggagcagcgggcaggcctcgaggggcctgggccagagtgggcctcacggcgcgccttgcacgcgaacccacggccgccggctgcccctcccccggcccccggcccgctgcccccagccgccgacgtcggcccgcaccgcccccgcgcgctgactggcccgcgcaggcctcctgcccggctgttggcggttggggcgaagccggcgggaggccgccccgcccccgcccccgccgcagagtcgcggcgcgcagcctcttcacccgtcgcggccggggcggtggcgctgttgccgccgcggcctgtgaggcagtaactcccctccgcccctgccccattcctcctcctttctctccgctccctccgtcctccctcccctcgccgtctctcgctcgagtgaatgtggcgcggcggcgcgggacgcagtctcggcccctgccgcggccccgcaagctcgtgaggagacggagctgcctcctgctcccgccccctgcgcgtctcggggagccaccgccgctggcgaaggagaacaagcagggcagcggagggacggtggcgggaaaacgggagagggaggagaagagggttcgagggcgagtagggaaagcggggagggacggacggaaggacggacggcccgacggacggcccggggagggggccgctattgagcctgcccgactcctcggctccggctccgggtggcggcggcagcggcgtcgcggacgaagggcgcggcaagcgctatcgagacaataaccctgccgcccggctctgggggcaacggagaggaagcggtggcggcctagcgcggccgaggctcgccgagcgcccgggcagcgtcctcgcccccgccggccgggtgctgctgccgtccggtgtgccgggcgcgccggttgcccggaacccgaggctcccggcggccgtcccctcccctccccctctccggtgcgcgcggagctggttttccgggttcccctggacggagctggatcctgcttctcgccaaggcaggaagtgagtttcgcactgcaattccgggcggtgtcacgagtgaaaagttttgtttttttttttttcggcggagatcctcgttggggctgggaaactcctgcaaaactcgagaccaggaagccagcccgcaccccaacccccaccaaagccacctactcttcttctgtgggaggccagtccacatccgctctcacccgagagagatattcagctggatccaaagtgactgatgaagggaaggaaatcatgtcaagcgaagccttgaaaaagctgccctgagacggtgtcccgccgaaaggtaattttcacgaaaagtgtctctgagtcacaaagttcatgggactttgtgactcggaaaagagatgattctttagtgtttttcactcttctccaagttgccctaaaccctccttttctcatatcgaagcggttaataattgaggggctaaataatcgaactgcaccccaccgcgtcccttctcccccctgccccccccaccatctggactttgaattttttggaagaggttgtaagaatgcggtgggacgaaaagtttttagtaatccgaagaacgattgcctttgttcagcacaggggccagaagttttggctttctggaacgtatagagtgtatattaagttgctcagccaggcaccttctgtttgggaagaaagtttggtcgctgcagtgagtgatttgctgttattgagatggctgccgcgtttgtttatactcataccgattatattggcgcttgcgttaattgtatatagaggtatttatttttatttttttatttccaaccctgatcagtatatttagttagattttagaaaccaaaaaatcttgccattcttagttgtttttcagggtgagtaatatatttctttagttgtgtgtagtgtgtgtttttcagacgtttagcgccgtataacttgtttaattaattgaaagcaaggatcgactaggcttttcttgtaactgatccattacgaagaaaaaaggagtaaggactaagaatagggagagataattaaacaacattaacaacctgtaagacgtttaataggacttctgtacagttcagaacagacgatgggaggggaagtaaaacgcttaaaacgatttt

SEQ ID NO: 2346 - DNA, 6000 bp, Homo sapiens
tcttttagcacagtaccttatgtatagtaggtgctcgttattttattgattgtatcacaaaacatttttttacactccgtccaacctctgccagccattctttcatataagacaatcttagactcttagagatcttgaaggatatgtatcctttccctcacccctcccctctagcacctgagtatctttacatcatcttcctcaaatgtttagccgtttgtctttatggcatcaatgatacttattatcaaggtggcccttggatagcttgggttcattttgtagtagtgatacctagaatttgttgagcactaattgcttaggtactatactaaatattttacgtgttattatctaattgtcacaataacccccatgatgaggtggaagtggagtgtatctaagaaagaacttaacaaccatctattttaatggttaagttaagagctcaaaacctaaatacactgagatcaaagttagagtccatttgctactgttaactgtaaatacaatccggactacttgagctgtgctcctaagatctcagaacatcaaagatatccttaattcatataatcatctatggatatgtctatatacactatttctgtgatttggctagaattcagttagttaaaaaaaaatttgtagcactactttaaaaaaatactacttgttatactacctattatagaatatgaacacttgtctgtttctgttcatgtaattgctacacacacaaccaccttacatactgagagtttaccattcataaacaagtttatgaaatgttttaaaaacattaagaaagagctgacctttgaaaattccttgatttgtttggtgattatatgtttgtggattgaattgcttatttttattagagtagatgggaaaaaattccatatatgtatgaaataatttcttgcccagttgagttcagaaaggttgtaaatgaattttcattatcagtttttcaaattgtaaatgggtgaaaagtatattcattgaaattaactgaccttagaaaacagtacataataatatcaccttgtcagtaactaaatcgaattcttttttttttttttttttttttttttttttttttttgagacggagtctcgctctgtcgcccaggctggagtgcagtggcgggatctcggctcactgcaagctccgcctcccgggttcacgccattctcctgcctcagcctcccaagtagctgggactacaggcgcccgccactacgcccggctaatttttttgtatttttagtagagacggggtttcaccgttttagccgggatggcctcgatctcctgacctcgtgatccgcccgcctcggcctcccaaagtgctgggattacaggcgtgagccaccgcgcccggcctaaatcgaattcttaataaccccagcattggttactttttgaaaaattatatcaccatctaaaaattatttaatctttgtattaggactgaattttcaggggtgcttccaattatcaatataatttattacctcatatatagaaccaggatggtataattgccatttgtcatcactgaaaagaatttcacacaattcttggggaatttatcattaatcttaaatttgttttgtttcagatgatacaaaggaaacagattctttatcagatgaagttacacacaatagcaatcagaataacagcaattgttcttctccatctcggatgtctgattcagtttctcttaatactgatagtagtcaagacacctcactctgctctccagtgaaacaaactcatattgatattaattccaaaatcaggtgtgtgaacctcttttacagttttttatttatacaataaatagaagtagtaaggcagataacaaatacataaatatatagggtttaataaatattatagaagtggttccagtaatatgttttatttccccatttttattgctgattttccatttagtttttatacatttccatcttaaattagatttttaaatggggaagaatagactagattctcaatctctggttaaaaagttgaatatttatatatttttagatatggcaacataaacagcatatttgaggtaatttaagttgaaaggagtatttttatagttagaaatgcagaatcattttgaggggctgccattaaagggttcattcagatactcttgactggtggtgtatatttggcttaggcttaattttgtaggacacactcactgagagagagataaatgttaatttgtatagcctggaatttagctgaagtctaaaacacattttattatttaggctcttgagaaattggttgtctataatgttggcagtgggtttgaaaagaaaaaaaaagaagaaatttggttatcagagtaaggccctgccattctaccatagtgttactctatcagctaaactctgttagaaagatggggattggctgggctgagcatggtggcttaaacgtgtaatcccagcacttcaggaggctgcggcaggtggatggcttgagcccaggagttcgagaccagccttggcaacatggtgaaaccccatctctaccaaaaaaagtacaaaagttggccatgtgtggtggcatgtgcctgtagtcccagctacctgggaggctgaggtgggaggattgcttgagcccaggaggcggaagttgcagtgagctgtgatcaccccactgcattccagcctgggtgacagagctaggccttgtctcaaaaaaaaaaaaaagagacagattggggttggctggatgtggtggaatgcctgtaatccgagcactttgggaggctaagatgatagattgcttgagtacaggagttcaagaccagcttgggcaacatggtgaaaccatgtctctacaaaaaaattggccaggtatgttggcacatgcctgtagtcccagctactcgagaggccaaggtgggaggttaacttgagcttgcgaggtttaggcctcagtgagtcatgatcaggctactgcactccagcatgggtaacagaattgagacccggtctcaaaaaaaaaaaaaaaaagatcggggttactactaaaccaaaagtttaatgtgtggatatttttaatagtcatttagagttgttcttaaatttcaggcatatttaagtaaaatttgtatatattaatgcgtgttgttggaaaagggaggtgaattttatgcctgaaaatgagtttaggtactgtgtaattataatcacaatcaatcatttatttctattctttgaatttgaagctatgagctgctgtttaaaatactaatttttataacctcctagatattatcgtattaatttgttgaataataaaattttatttattgttgggaaagcggtatgatattttctaaatcctgcttttaatataatgaaataaagcctaagcaaggaatacagcaacacctttttgtgctgtatttctagtaatgaaagttatcttttttgtaatgggaagaccagtattagggaatttttgtggaaacataacttgaatatgtatacaagaggacacaaatacttaatatcacaggtagaaataaaatattttgtataattttggaatgacacatttaaaagtatttaccaaatacagctagctacttagaagagtgattagacttcatttatctttctatgccttttacatatttgatgttaaactttggacaattattcagttctttgctttgtacaattttcttacctatatatttgaatgtaataacaactgtgtacttcgttaactatggttaatttggttaataatgtaaggcttcaaaattaactgtaaaaatgtcctttgctctttactccactattcatgttactaggtttctctccatatatctgccctccctcaagcattttgtttttttagcacattcatgaaaagatgcagcaaacattaaaattttattcatagttcagccctttaaattattttgtgacaaatcagattgagtgtattgatgaaaattaatcttggtattatctatgaattttaattgtattacttgtctccaactgaatataaagctcttttaactattaagataatattttaaaattacatgcttgataataaatgccttttgtctttgacttttattaacttttttaacttgtctacctacacaatttatttattaatgttccctgttactaagaaaactcggctttattatgtttttcataaaattatctttattttaggcaagaagatgaaaattttaacagccttttacaaaatggagatattttaaacagttcaacagaggaaaagttcaaagctcatgataaaaaagattttaacttacctgaatatgatttgaatgttgaagagcgattagttctaattgagaaaagtgttgactcaacagccacagctgatgacactcacaaattagatcatatcaatatgaatcttaataaacttataactaatgatacatttcaaccagagatcatggaaagatcaaaaacacaggatattgtgcttggaacaagctttttaagcattaattctaaagaggaaactgagcacttggaaaatggaaacaagtatcctaatttggaatccgtaaataaggtaaatggacattctgaggaaacttcccagtctcctaataggactgaaccacatgacagtgattgttctgttgacttaggtatttccaaaagcactgaagatctctcccctcagaaaagtggtccagttggatctgttgtgaaatctcatagcataactaatatggagattggagggctaaaaatctatgatattcttagtgataatggacctcagcagccaagtacaaccgttaaaatcacatctgctgttgatggaaaaaatatagtcaggagcaagtctgccacactgttgtatgatcaaccattgcaggtatttactggttcttcctcatcttctgatttaatatcaggaacaaaggcaattttcaagtttgattcaaatcataatcccgaagagccaaatataataagaggccccacaagtggcccacaatctgcacctcaaatatatggtcctccacagtataatatccaatacagtagcagtgctgcagtcaaagacactttgtggcactccaaacaaaatccccaaatagaccatgccagttttcctcctcagctccttcctagatcagagagcacagaaaatcaaagttatgctaaacattctgccaatatgaatttctctaatcataacaatgttcgagctaatactgcataccatttacatcagagacttggcccagcaagacatggggaaatgtgggccatctcaccaaacgaccgacttattcctgcagtaactcgaagtacaatccagcgacaaagtagtgtgtcctccacagcctctgtaaatcttggtgatccaggctctacaaggcgggctcagattcctgaaggagattatttatcatacagagagttccactcagcgggaagaactcctccaatgatgccaggatcacagagacccctttctgcacgaacatacagcatagatggtccaaatgcatcaagacctcagagtgctcgaccctctattaatgaaataccagagagaactatgtcagttagtgatttcaattattcacggactagtccttcaaaaagaccaaatgcaagggttggttctgagcattctttattagatcctccaggaaaaagtaaagttcctcgtgactggagagaacaagtacttcgacatattgaagccaaaaagttagaaaaggtaattgaacatgagtttttcattattttctttatgaacttaattattttccttaaaaatgatgaaacaagattctctgaattactgattatctctttatattctaggtgtttttctctggtactgggaatagagttccaaatttaaactcagccaggacaattgggatgataatgtgtgtttctatcctctccttcactc

SEQ ID NO: 2347 - DNA, 6000 bp, Homo sapiens
atatgaacacttgtctgtttctgttcatgtaattgctacacacacaaccaccttacatactgagagtttaccattcataaacaagtttatgaaatgttttaaaaacattaagaaagagctgacctttgaaaattccttgatttgtttggtgattatatgtttgtggattgaattgcttatttttattagagtagatgggaaaaaattccatatatgtatgaaataatttcttgcccagttgagttcagaaaggttgtaaatgaattttcattatcagtttttcaaattgtaaatgggtgaaaagtatattcattgaaattaactgaccttagaaaacagtacataataatatcaccttgtcagtaactaaatcgaattcttttttttttttttttttttttttttttttttttttgagacggagtctcgctctgtcgcccaggctggagtgcagtggcgggatctcggctcactgcaagctccgcctcccgggttcacgccattctcctgcctcagcctcccaagtagctgggactacaggcgcccgccactacgcccggctaatttttttgtatttttagtagagacggggtttcaccgttttagccgggatggcctcgatctcctgacctcgtgatccgcccgcctcggcctcccaaagtgctgggattacaggcgtgagccaccgcgcccggcctaaatcgaattcttaataaccccagcattggttactttttgaaaaattatatcaccatctaaaaattatttaatctttgtattaggactgaattttcaggggtgcttccaattatcaatataatttattacctcatatatagaaccaggatggtataattgccatttgtcatcactgaaaagaatttcacacaattcttggggaatttatcattaatcttaaatttgttttgtttcagatgatacaaaggaaacagattctttatcagatgaagttacacacaatagcaatcagaataacagcaattgttcttctccatctcggatgtctgattcagtttctcttaatactgatagtagtcaagacacctcactctgctctccagtgaaacaaactcatattgatattaattccaaaatcaggtgtgtgaacctcttttacagttttttatttatacaataaatagaagtagtaaggcagataacaaatacataaatatatagggtttaataaatattatagaagtggttccagtaatatgttttatttccccatttttattgctgattttccatttagtttttatacatttccatcttaaattagatttttaaatggggaagaatagactagattctcaatctctggttaaaaagttgaatatttatatatttttagatatggcaacataaacagcatatttgaggtaatttaagttgaaaggagtatttttatagttagaaatgcagaatcattttgaggggctgccattaaagggttcattcagatactcttgactggtggtgtatatttggcttaggcttaattttgtaggacacactcactgagagagagataaatgttaatttgtatagcctggaatttagctgaagtctaaaacacattttattatttaggctcttgagaaattggttgtctataatgttggcagtgggtttgaaaagaaaaaaaaagaagaaatttggttatcagagtaaggccctgccattctaccatagtgttactctatcagctaaactctgttagaaagatggggattggctgggctgagcatggtggcttaaacgtgtaatcccagcacttcaggaggctgcggcaggtggatggcttgagcccaggagttcgagaccagccttggcaacatggtgaaaccccatctctaccaaaaaaagtacaaaagttggccatgtgtggtggcatgtgcctgtagtcccagctacctgggaggctgaggtgggaggattgcttgagcccaggaggcggaagttgcagtgagctgtgatcaccccactgcattccagcctgggtgacagagctaggccttgtctcaaaaaaaaaaaaaagagacagattggggttggctggatgtggtggaatgcctgtaatccgagcactttgggaggctaagatgatagattgcttgagtacaggagttcaagaccagcttgggcaacatggtgaaaccatgtctctacaaaaaaattggccaggtatgttggcacatgcctgtagtcccagctactcgagaggccaaggtgggaggttaacttgagcttgcgaggtttaggcctcagtgagtcatgatcaggctactgcactccagcatgggtaacagaattgagacccggtctcaaaaaaaaaaaaaaaaagatcggggttactactaaaccaaaagtttaatgtgtggatatttttaatagtcatttagagttgttcttaaatttcaggcatatttaagtaaaatttgtatatattaatgcgtgttgttggaaaagggaggtgaattttatgcctgaaaatgagtttaggtactgtgtaattataatcacaatcaatcatttatttctattctttgaatttgaagctatgagctgctgtttaaaatactaatttttataacctcctagatattatcgtattaatttgttgaataataaaattttatttattgttgggaaagcggtatgatattttctaaatcctgcttttaatataatgaaataaagcctaagcaaggaatacagcaacacctttttgtgctgtatttctagtaatgaaagttatcttttttgtaatgggaagaccagtattagggaatttttgtggaaacataacttgaatatgtatacaagaggacacaaatacttaatatcacaggtagaaataaaatattttgtataattttggaatgacacatttaaaagtatttaccaaatacagctagctacttagaagagtgattagacttcatttatctttctatgccttttacatatttgatgttaaactttggacaattattcagttctttgctttgtacaattttcttacctatatatttgaatgtaataacaactgtgtacttcgttaactatggttaatttggttaataatgtaaggcttcaaaattaactgtaaaaatgtcctttgctctttactccactattcatgttactaggtttctctccatatatctgccctccctcaagcattttgtttttttagcacattcatgaaaagatgcagcaaacattaaaattttattcatagttcagccctttaaattattttgtgacaaatcagattgagtgtattgatgaaaattaatcttggtattatctatgaattttaattgtattacttgtctccaactgaatataaagctcttttaactattaagataatattttaaaattacatgcttgataataaatgccttttgtctttgacttttattaacttttttaacttgtctacctacacaatttatttattaatgttccctgttactaagaaaactcggctttattatgtttttcataaaattatctttattttaggcaagaagatgaaaattttaacagccttttacaaaatggagatattttaaacagttcaacagaggaaaagttcaaagctcatgataaaaaagattttaacttacctgaatatgatttgaatgttgaagagcgattagttctaattgagaaaagtgttgactcaacagccacagctgatgacactcacaaattagatcatatcaatatgaatcttaataaacttataactaatgatacatttcaaccagagatcatggaaagatcaaaaacacaggatattgtgcttggaacaagctttttaagcattaattctaaagaggaaactgagcacttggaaaatggaaacaagtatcctaatttggaatccgtaaataaggtaaatggacattctgaggaaacttcccagtctcctaataggactgaaccacatgacagtgattgttctgttgacttaggtatttccaaaagcactgaagatctctcccctcagaaaagtggtccagttggatctgttgtgaaatctcatagcataactaatatggagattggagggctaaaaatctatgatattcttagtgataatggacctcagcagccaagtacaaccgttaaaatcacatctgctgttgatggaaaaaatatagtcaggagcaagtctgccacactgttgtatgatcaaccattgcaggtatttactggttcttcctcatcttctgatttaatatcaggaacaaaggcaattttcaagtttgattcaaatcataatcccgaagagccaaatataataagaggccccacaagtggcccacaatctgcacctcaaatatatggtcctccacagtataatatccaatacagtagcagtgctgcagtcaaagacactttgtggcactccaaacaaaatccccaaatagaccatgccagttttcctcctcagctccttcctagatcagagagcacagaaaatcaaagttatgctaaacattctgccaatatgaatttctctaatcataacaatgttcgagctaatactgcataccatttacatcagagacttggcccagcaagacatggggaaatgtgggccatctcaccaaacgaccgacttattcctgcagtaactcgaagtacaatccagcgacaaagtagtgtgtcctccacagcctctgtaaatcttggtgatccaggctctacaaggcgggctcagattcctgaaggagattatttatcatacagagagttccactcagcgggaagaactcctccaatgatgccaggatcacagagacccctttctgcacgaacatacagcatagatggtccaaatgcatcaagacctcagagtgctcgaccctctattaatgaaataccagagagaactatgtcagttagtgatttcaattattcacggactagtccttcaaaaagaccaaatgcaagggttggttctgagcattctttattagatcctccaggaaaaagtaaagttcctcgtgactggagagaacaagtacttcgacatattgaagccaaaaagttagaaaaggtaattgaacatgagtttttcattattttctttatgaacttaattattttccttaaaaatgatgaaacaagattctctgaattactgattatctctttatattctaggtgtttttctctggtactgggaatagagttccaaatttaaactcagccaggacaattgggatgataatgtgtgtttctatcctctccttcactccccactgtttctaacaaaaatgtattaattttatatgtttatgtgtctgtctctttgagattgtgcacacatactaaaaatacacgtacctctgttcagcattttctgaactttgctattaataattgttgattatctaaatttaaaaaatagtttactatatagttaagacaataacaaaaaatgtattgcaaatgtaaatatttcatctaatattttttccccagtccacagtatatgaactaacattgtcactgacacagatggcttctggcatggcatttattcttaacttttctgaatttctacatttctgacctacttaaactcagttaagtgtttctgtggctctagtgttgcttagcaatagttgattaaataactaatgctcgtgttcaatttataattttatgtgtagatgttcatcttttgaaaggagttaaaaatgtagatacagatatatatccttgtaaaaccaatatgaatgccatagtcatatggcccaagtgtacaagacatgatttttctttaagatttaactttatacttactcactagattttacccaagcattatctttctttctttattaaatataaaatgtgttcttaaaaacaggtgaacatacaacttcaattagccatttttaaaaattccttaaataaaattttcagaaatgcctaaaatatattagt

SEQ ID NO: 2348 - DNA, 6000 bp, Homo sapiens
agggacatggatgaagctgtaaactatcattctcagcaaattatcacatggacggaaaaccaaacaccacacggtctcactcataggtgggaattgaaccatgagaacacttggacgcagggtggggaacatcacacaccagggcctgtcagtggggttggagggctgaaggagggatagcattaggagaaacacctaatgtaaatgacgagttgatgggtgcagcaaaccaacatggcacatgcatacctatgtaacaaacctacacattatgcacatgtaccctagaacttaaagtataatacaaaaattttaaaattttaaaaaaagatcacagtgaatgggtacaaaagtactattagatagaaggaataagatctagtgttccgtagcctagatctggcctagggtgactatagttaacaataatttattgtatatatttatatatttcctttttttttttttttttgagaaacagtccgctctgtcgcccaggctggaatgcagtgacgcgatctcaaatcactgcaacctccgcctcccaggttcaagtgattctcctgccttagactcctgagtagcaggaattacaggcttgtgccaccatgcctggctaatttttgtatattttgtagagatggggtttcgccatgttggccaggctggtctcgaactcctaagctcaagcaatccctgagctcaagcaatccttgagctccttacaggcatgagccaccatgctcggccttttttaatttttttttgagacaaggtcttgctctgtcaccccggttggagtgcagtagtgcaatcacagctcactcagcctcaacctctcagactcaagcgatcctcccacctcagcctcctgagtaactaggactagaggtatacaccaccaatcccagctaatttttgtattttttgtagagatggggtttgccaggttgcccgggctgatctcggacccctgggctcaaatgatactcctgctttggcctcccaaagtgctgggattataggcatgagccaccatacccagtctgtatatttccaaataactaaaggagtggagttggaacgtttccaacacaaataaatgataaatgtttgaggagataaatatcccaattactctgatttgatcattacacattgcatgcttgtatcaaaatataacatgtaccccataaatatgtacaactattatgtatgcataaaaattaaaaataaacatgacaaaatgtactattaagaatattagtccaaaaaacaaataaaaacaacaaaagaagaaaaaaagaaataattaaaaaaaataaaaagaagaatattagtctgaggccaggtgcggtggctctggtgaacccagagattaaggctgcagtaagccatgtttgcgcccctgcaccctagctgggtaatagagacactgtctcaaaacaaaaataaaactgggcaaaggctgggcaaagtggctcatgcctataatattcccagtgcggccgggcgtggtggctcatgcctgtaatcccagcactttgggaggccaaggcgggcaaatcacaaggtcaggagtttgagaccagcctggccaatattatgaaacccggtctctactaaaaatacaaaaattagctggtgtggtggtgggcgcctgtagtgccagctactcgggaggctgaggcaggagaatcacttgaactcgggaggcagaggttgcagtgagccgagatcgagccactgcactctagcctgggcgacagagcaagactccatctcaaaaaaaaaaaaaaaaaaaaaaaaaatatatatatatatatatatatatatatattcccagtgctttgtgaggccaagagtttaagatgagccttggaaacatagtgagatcccatctctacaaaaaataaaaaataaaaaaattagctgggcacagtggctcacacctacagtcctagctacttgggaagctgaggcagaattgcccgagctcaggagtttgaggttacagtgagctatgatcacaccagtgcactccagcctgggtaacatagtaagaccctatctcaaaaaacaaaacaaaacaaaaactaggcaaaatacctgaacagatacctcaacagagaagttatacagattataatcacagaaaaagatactcaatatcatatgtcattagagaactgcaaatcaaaaaacaatgagttaccactacacacctaataggatggctacaatttttttaaaaactgacaacaccaaatgcttgtgaggattgctgatgggaatgcaaaatggtagagcagctttggaagacagtttggcggtttcttacaaaagtaaacatactatatgatccaacagtcttgctccttggtattcacccaaatgagtttaaaacttatgtccactcagccgggcacagtggctcacgcctgtaatcccagcactttgggaggccgaggagggtggatcacgaggtcaggagatcgagaccatcctggctaacatggtgaaacctcgtctgtactaaaaatacaaaaaattagccaggcctggtggcgggcgcctatagtcccagctacttgggaggctgaggcaggagaatggcgtgaacccgggaggcggagcttgcagtgagcctagatggcgccaccgcactccagcctgggcaacaaagcaagactccgtctcaaaaaacaaacaaacaaacgaaaaacaaaaacaacttacgtccactcaaaaatctgcacacagatgttagtagcagttatattcataccaaaacttggacgcaatcaagatgtcacttagtaggtgactgaataaataaactagtacatccagacaatgcaatattattcagggctaaaataaaatgagatcccaacccatgaaaaaaacatggaagaaccttaaatgcatatttgagtaaaagaaaccattctgaccgccaggtgcagtggctcacgccttcaataccagcactttgggaggttgaggcgggtggacattatacgtcattatatatttgtcaaaacccgtagaagacacaacacctagagtgaaccttaatgtaaactatggactttgggtaatactgtggtgtcaatgtaggttaacagattataattaaagtacaactttaatgtggggtgtcaatagtggggaaggcaggtgaaatgctctatactttctgctaagttttgctgcgaacctaaaactgctctaaaaaataaagcatataaaaggaaaaatttggccgggcgtggtggctcacgcctgtaatcgcagcactttgggaggccgaggcgggcggatcaccaagtcaggagatcgagaccatcctggctaacatggtgaaaccccgtctctaccaaaaatacaaaaaattagccggccgttgtggcgggcgcctgccgtcccagctactcgggaggctgaggcaggagaatggagtgaaccctggaggtggaggttgcagtgagtcgagatcgcaccactgcactccagcctgggcgacagatcgagactccgtctcaaaaaaaagtaaaaaaaaaaatttttaaactggaacacagaggataagtaatcctgcttcgccccttgcctctcgcccctgcatggggcgaggaaggattgatcaaacccagaaagactgagtgagaatggatgttgaacacagaactgaaggatgaatgggagttacctgaatagaacccaggggcttgaatgcaagaagaggcgggcattccaggcagaggagagcaagggtaagggccccacgggaggcattcgagtaggagggtgaactatgatgacagaagactcaataacgatccaaagaaaccaaatgattgggcgccttctttcggatccgtgacttccagcgccaggagtctctattggctcttataccgttgctctatgggatagcaatgtttttgtccttcagcctcccctccaattgctgagctgctggtgtgttttgaggagtagaaggcaaaaagaaccctcttgtttttctttggatctagagagaatctgagcaaatgacaaagcaaatggggtaaaatgtctttttgtttagtttttcctgattttcccatgagaggcaaatacatgttaaggatagttgaatctgagtaaagggcatagaaatattccttacaagatttttgttggcaactggtctaagtatgaaattatttccaaatagaaagctaaaacaaacaaaacaattggccttgggaaactggacaatcttgaagtaatcaagtaatattgttaagggacaatcagtgttgtgaaaacaacacggatacaccccctccctccccctcaaaaaaaaaaaccctaaattcagttcccccgttgctaatgtgtgaccctggcaaagtcatctaagtcgctgagcttcagttcctccaacccagagagttgttgcaacgatcaaatgaaagaatgtctattaaagcctttcatgaactatattattgctgctaccgtagaaatggaaagtgtgcaacactagatccaaaactacttttgacacttctgagactgtggccgcgcctctgtcaccttccaaaggccactaggcctttcctgagctggcattggcaacgcacactcttgcccggctaacctttccaggtgggcggcgcactggcttcactgctctccaggtggccgctgcagctgcccgagagcgcaggcgcagaggcagaccacgtgagagcctggccaggccttccggcctagcctcactgtggccccgcccctctcgaacgccttcgcgcgatcgccctggaaacgcattctctgcgaccggcagccgccaatgggaagggagtgagtgccacgaacaggccaataaggagggagcagtgcggggtttaaatctgaggctaggctggctcttctcggcgtgctgcggcggaacggctgttggtttctgctgggtgtaggtccttggctggtcgggcctccggtgttctgcttctccccgctgagctgctgcctggtgaagaggaagccatggcgctccgagtcaccagggtgagccgcttcggactgcgaactaacgcggccttcttagctgctgcctgctctccctgcctcgcctgcgggagcctcccgagcgggagagggccgcaggagcgatttggggaggaaggtgggaggggactcaccaagagagcgccgaggtgggcccaggcctggtgagagagtgtgggggacgatggatggagggaggaaggtgagaaagagaactggacggatattggataaatgttttggggaggtggagagtcgactgggaaccttttgaaaaagtgatagagggtccctgagtgggcccgccagcaactctgtaacccccttcccagagagaaggtgtctgcaattggaggctttttcggtttcctttcaaatgtaaattctcggtattttagggctggccaggactaatcagggaatccctcaattggtaaatgtagaggtcggcggaaactgacttgtcacggccgcagagtagactctgggacccatgttttccctcggaacccatttttagtcggctttctttctgggaacttctccttgtgccccaccttaattaacccttgacttactcgagccttcgtggatcagctcttaaagtggtcttgcttctttcagaactcgaaaattaatgctgaaaataaggcgaagatcaacatggcaggcgcaaagcgcgttcctacggcccctgctgcaacctccaagcccggactgaggccaagaacagctcttggggacattggtaacaaagtcagtgaacaactgcaggccaaaatgcctatgaagaaggtaactctcttcctgacctaacttctgtaagagcccgccttccaactgtggcctttgatgcagaaacatttcattctctctgtttcatctacaggaagcaaaaccttcagctactggaaaagtcattgataaaaaact

SEQ ID NO: 2349 - DNA, 6000 bp, Homo sapiens
caatggcacgatcttggctcactgcaacctctacctcctgggttcaagcaattctcttgcctcagcctcctgagtagctgggattacaggtgccagccaccacacccagctaatttttttattatttttttatttttttatttttagtagagatggagtttcacgatgttggccaggctggtctcgaactcctgacctcgtgatctgcctgcctcggccttccaaagtgctgggattacaagcgtgagccaccatgcccgaccttatttctttactttgtctactaaattcagagtcctttgaggatgccatgaagtcaatgccttgtagagtttgacttcaagaaggtgctcaataaatgtttgaacaatgggataaagggagcttgaaggaaatggttaatggcgatgaagttagttaatccttagtagtcaggatagaatttgtgttgagtagtgagaagcagtttatattatgaaataaagactaaagactgaattgtcatttatttggactaacttcacatgttgctgataaaaattaattacttctcagtttcctttgcagcaaagtctagaatgtgaatttatttgcttccaactttaaactgactcactctaagttggcatttcactgtttttttttttgcccaggctggagtagaatggcgcaatcatagctcactgtatcctcaaactcctgggctcaagtgatcctcctgcctgggcctcctgagtagttaggactgtaggcagctgccttcatgcccagctaattttttgtagagatgagttattgctatattgcccaggctagtctggaactcatggtctcaaaggatcctcccacctcagccacccaaagtactgggattactggcttgagctgttatgcccaacctcattctttttaattgaggaattaaatgatcacttttttcttttttaacagagacagggttttgctatgttgcccaggctggtcttgaactcctagcctcaacctcagcctctcaaagtgctgagattaaaggtgtgagccaccgcgcccaacccaaatgatcacttttgatgttaatcacttcctaaaaagaaatggaataaatctgaaaagatacttttcctttaaggaaatgaattgtatgccgattcagcagaatactagcttgagttggtaccaataacctgaacttcatgcccaaactatagtgcttacttctatttgctatttcaagatatctctttgtttcaaggttgatactgcctctccaagcccaatggaaacatctggatgtgcccctgcagaagaagacctgtgtcaggctttctctgatgtaattcttgcagtaaatgatgtggatgcagaagatggagctgatccaaacctttgtagtgaatatgtgaaagatatttatgcttatctgagacaacttgaggtaagtattatcattcgttttttttctaaactgcatctaactttatgaaagtattttccatcaatagtttataataatacaagcaggacgtgggcagcatttcttaagagatcgcactttcaaattctccttcatggaatacctataataaaaagtcactaaataaaccaatggagtctatttgtcactttgtgcaggaaagttcgaagttagggtggatactactatcgctttctaaaggaaaatccacagattgaatttgatatgtatatatgcgatctccaccacgtttggaatggttaagtcccaaactctgcattttaggtgataacgggtcaggaagtggatgaggatgtagaatatactcaaagactacagccacccctaacacaaggcattttgtgttagtgtggctgatgtgcatccagttgttggtgaaattatttgtgcccaaaaggagtacactcaaaagctacttttttggttcacttcaatttgatcccacttttgaaactttctattaatggcatttgccctttccctacaaatacaagcactctttatggcagcataaacatagtaacataaattatactgttaccacatttacgtagtttttttgttgttgttgttttgtttttttgagatggagtctcacactgtcgcccaggctagagggcagtggtgcggtctcagctcactgcagtctctgtctcctgggttcaagcaattctcctgcctcggcctcccaagtagttggggttgcaggcacacaccaccatgcctggctaattttttgtatttttatttggttttggtttttttgagacagggtcttgctctgttgcccaggctggagtgcagtggtgcaatctcggctcagtccagcctccgcctcgggtcaagtgattctcatgcctcagcatcccgagcagctgggattacaggtgcccaccacaacacccagctaatttttgtacttttagtagagatgaggtatcaccatattggccaggctggtctcgaactcctgaccttagatgatctacccatcccggcctcccaaagtgctgggattacaggcctgagcaaccgcacccagcccccagttgtttctaatgtgttgtcttatgtcatcactgacatgttcatctcttgcctgctcctttttggcctctcctttttctataggattcttctgcaagacttctttgccaggagcagccttctgcttttagtttcttcttccatctttctagtgctttttaaagttgtgttctaactttggaggattcaatttagtaaatgtgctgtttcttttttttttttttttttttttgggacagagtctcgctgtgtcacctaggctggtgtgcagtggcacaatctcggctcactgcaagctctgtctcccgggttcacgccattctcctgcctcagcctcctgagtagctgggactacaggcatccgccaccacgcctggctaattttttatatttttagtagagacggggtttcaccgtgttagccaggatggtctcaatctcctgacctcatgatccacccgccttggcctcccaaagtgctgggattataggtgtgagccaccgcgcccagcctgtaaatgtgctgtttcttgatgcttcgttcttgttctgtgcaaggccatttatgcaaagcaacccctcaagtggcagaggagctgagaaaccaaggaattaggcagataaatggagtttgctggtattgggtgactgatgagggggaatttacagacataagtatggtctttgatggctgtaagatgtagatctctgcactgtaacccctcgtacccacggcttgggtatgtatacattttcttgggcaaagtatacatgctctagaatcaatgtgtgggtggctgacagaatgctgcagacatcacagcctataatgtatacaataatatcaagggctgttttggaggaaaggccaaacttaaagtgaataggcagaagtcacattgaattagtatttaaaataaagtcactgttgtccccacagttcttagctatgttgctgttgggatttaacccaggagcaggcaggagtgttgtagtacatgggttccagctgccctgggagttactgatattttctctacataaagctcaggttctaagtttagaggcttaagtgaaaagatctgagatgataatgtagtatctttatttggaagggagtggaccagcagcagttgtggtgaagaatatcgtaagacctgacaatataaaaaagctgtcatactgtcctatctaatgtttgccttttttttcttttttttttggggtggggagacagtctcactctgtcacccaggctggagtgcagtggtgcaatctcggctccctgcaacctccacctgccaggttcaagcaattctcctgcctcagcctcccaagtagctggaactacaggtgtgcgcaaccatgcccagctaatttttgtatttttagtaaagacaggttttgccatgttggccaggctggtctcgaactcctggctgcaagcaatctgccaacttcagcctcccaaagtgctgggattacaggcgtgagccaccacgccagccttcatgtttgctttatttcttggtgatggtgttgtttgtggttgaccatatgaataattgaattaagaactgatatagattataaatgccccagtgctactgtaggaactaactgatctttctggacataaatgtgtcacatggagtcatgtttctaagaataatcagcattttcttttgcaggaagagcaagcagtcagaccaaaatacctactgggtcgggaagtcactggaaacatgagagccatcctaattgactggctagtacaggttcaaatgaaattcaggttgttgcaggagaccatgtacatgactgtctccattattgatcggttcatgcaggtgagcatttcagtaagagttttcccttccaggattctagccgagtcataagaaactgatgttttcaggccagtctgggcgcagtggctcatgcctgtaatcccagcgggcgggtggatcacaaggttaggagatcgagaccatcctggccaacgcagtaaaaccctgtctctactaaaaatacaaaaaattagccgggcatggtggcgggcgcctgtagtcccagctactggaggcggaggttgcagtgagctgagatcacgccattgcactccagcctgggtgacagagcgagactcaaaaaaaaaagaaagaaataaactgactttttcaactaaaatctttcttgggggatatggtgtcattaagattttgctatgggagaatgtctttctacctctccttcatcatagctctgtgtctccttttcaaacattttattcaccctattgaaattcccattgcagaataattgtgtgcccaagaagatgctgcagctggttggtgtcactgccatgtttattgcaagcaaatatgaagaaatgtaccctccagaaattggtgactttgcttttgtgactgacaacacttatactaagcaccaaatcagacagatggaaatgaagattctaagagctttaaactttggtctgggtcggcctctacctttgcacttccttcggagagcatctaagattggagaggtacaggtttcttgagaaacctctccgtatgggtacattagggggaacactgctgctgaccaagcacgttgaattcaactgacctgtattatacctaactacatggggaagggataaagttgttctttatttctagtcaggctgcatgttaatattaggactttccatgggcatttgagagtttgtagacaaacatttgtagttaaagatacatatgggcatgcaggttagtgccaaaggaaaattttctgaaagaaactcagtaacatgggttttgtttcaggttgatgtcgagcaacatactttggccaaatacctgatggaactaactatgttggactatgacatggtgcactttcctccttctcaaattgcagcaggagctttttgcttagcactgaaaattctggataatggtgaatgggtaagctgtgtcccacagaactcctaagcttttaaattttaaagagtgactaaatacagaacttttgttattaaaaggcaattcaagtggttcataaatatgggatctactgaaggaatagttaaaaaagatgtcttagaatgtttccacatctttttgtttttgagacaaggtctcgctctgtcactcaggctggagtgcagtggtgcagtcttggcccactgcaacatcagcctccagagtagctgggattacaggtgtctgtctagtttttaaatttttttcatgtcagatgggtaatatgcccacattgtaacaaggtttgagggtggcacgtttcacatgttcacatgaacaccaaatcatcacacttatgaactacaaaagagtcgcccaccagcctgggcaacatagcaaatcctcatctttacaaaaaatatataaaatatatatatatatatatatatatatatatataca

SEQ ID NO: 2350 - DNA, 6000 bp, Homo sapiens
tttaaaactgacaaaggggttttggtaggagtggcgtggaacaaatgaagtagtgggttatcttcttcaaaaagctcttaagaggccgggtacggtggctcacgcctgtaatcccagcactttgggaggccaaggcgggcagatcacctgaggtcgggttttaggaacagggcgccaaatctggccataaactggcccaaaaactggccataaacaaaatctctgcagcactgtgacatgttcgtgatggccatgacgctcacgctggaaggctgtgggtttactggaatgagcgcaaggaacacctggcccacccagggcagaaaaccgcttaaggcattcttaaaccacaaacagtagcatgagtgatctgtgcctggacatgttcctgctgcagataactagcaagagccatccctttgttttggcccatccctttatttcccataagtaatacttttagtaaatgttatgactggcttgctgtcaataaatatgtgggtaaatctctgttcgaggctctcagctctgaaggctgtgagatccctgatttcccactccacaatctatatttctgtgtgtgtgtctttaattcctctagcaccgctaggttagggtctccaccaccgagctggtctcggcagtcgggagttcgagatcagcctgaccaacatggagaaacccagtctctactaaaaaaaatacaaaaattagccgggcatggtggcacatgcctgaatcccagctacttgggaggctgaggcaggagaatcgctccaacccaggaggcggaggttgtggtgagccaagatccggccgttgcactccagcctgggcaacaagtgcaaaactccgtctcaaaaaaaaaaaaaaaaaagctcttaagagcacataaacataggaactttgtgaagtctaaggacaaaacaaaaaacaacatcactaacagaccataaaattagaaatcagtcacaaaaagccagtcaaaatatccaagaatttatggttgaagattgaatgaaattgacaaaatatttagacctgaattttatatatgcacatatcaaaacttgcaaaatgtagctgatgtggtcttttgaaggagaagaggtaaaaaataatcagttcaaaaaattatactaaagaggccgggcgcggtggctcacgcctgtaatcccagcacttcgggaggccatggcgggcggatcatgaggtcaggagatcgagaccaacctggctaacacggtgaaaccccgtctctactaaaaatacagaaaaattagccgggcgtggtggcaggcgcctgtagtcccagctactcaggaggctgaggcagtagaatggcgtaaacccaggaggcggaggttgcagtgagccgagatcgcgccactgcactccagcctgggcgatacagcgagactccgtctcaaaaaaaaaaaaaaaaaaaattatgctaaagagtaaactcaaagaaagtagaggaaaagaatgaattaaaaatctgtgtttataaataaaaataaaagtaacggagcaaaaagacgggcattagaaaatagtcatttctgacctctggtcagataaagggaaaaaagcaaaaaattagctatgttaggaatataaatggggacaacactacagataaaatagttttagaagactaaaatttattatatgtatacaagggaatagtatactatttaaaaagaattagataaacatgtaccaaacaagcctcaaaaaatacaactggcagaaatattcctagaaggaatcctttagtcaatatgcacaaagcatttaagcatttcattatttttgtttttttttttttttttgcttttgtttttgtttttttgagacagagtcttgctctgttgcccagactggagtgcagtggtgcaattttggctcacagcaaactctgcctcccaggttcaagtgattctcctgcgtcagcctcccaagtaactgggattacaggtgcacaccaccaagcccggctaatttttgtatttttagtagagacggagtttctctatgctggccaggctggtctctaactcctgacctcaagtgatttgaccgcctcagtttctcaaagtgctgggattacaggtgtgagccactgcacccagccttcattgtacgtctttttgtcactagaggtacattttgttctaacaactaagaccccaaagcatccttttaagctttatcgttttgtaaaatggttaaaaataacattttccaccaatgacacagataaaattttaaaatgtggtggtattattccattcttattttaaggatatacatatatgcaatttgtatgtggatatgattttttgaatggtgaacagaaacttagtggtcaggtagctggatgcggtggctcatgcctgtaatcccagcactttgggaggctaaggcgggtggatcacctgagttcaggagtttgaggccaacctggccaatatggtgaaacccagtctctactaaaaatacaaaaaattagccaggcgcggtggtaggcgcctgtaatcccaagtactcgggaggctgaggcaggagaatcgcttgaacccaggagacggaggttgctgtgagccgagtccgcgccattgcactccagcctgggcaacaagagtgaaactccgcctcaggaaaaaaaagaaagaaagaaaataagaaagacagagagagagagagaggaaggaaggaagagaggaaggaaggaaggaagagagggagggaggaaggaaggaaggaaggaaggaaggaaggaaggaaggaaggaggggaaacttagtggtcagatggcaactaggggaggggaggcagaaggtaatttatttttcatttcatatccttcaactatcagaaattttgtcatatgtgtttatattttccactgtgtttcattgattctaaaatgccttttcttcataaccctgaaattggagtgtttcttacaatcattggtatgtcacatttttttctggcttgtggtaatgggttaaaatgataaattgtaaaatcaatgacgtcttaggaataatgaaaaatagtttaatagtgaatgaagaactatgtaattttaactgttcacatttactcttgggtatgtttccagaggataactgaacggggatagattttaaaaagctttatttaactgggtacttccgcaatttagtgatcaacttctgtgtacaacaaggtactgtcctttgaggatgatgggagaatacagggaagaacgaaatcgcctctgatcgtactttctccacggatgtaagtgtccgggctctagtgggggaatgatactcttcgtgcgaaattcacttttaaaaaaggcttagaaaactgaccaccggctctcagctgcagcttatcaaccacagaactccgaatatgcccgcacatcagtgcgctgggttaagaggagaaggggctgcggctgagctttcctagaaacagctatttggggacccatttcctgttggagtctgaaaggcgcacgcaccagagccagtggcaaagcaacttaagctgcaggctcctcctgcccacccccagccgcgacgcccctgggggcccttagcagactgccaagcgagtgtccccgccctgtgccttgaatttagccaaactcctttaatatcaggcctggcgcggtgattcacgcctgtaatccccgcactttaggaggctgaggcaggaggatcgcttgaggccagcagtgaaattagccggacatggtggcgcgcgcctttctgtggtcccaggtaatccggaggctggggcgaaagggtggcctgagccagggagatcgaggctgcagtgagccgtgttggcgccactgcactccagcctgggcgacagggcaagaccctgcctcaaaaacaaaacaaactgtaatatcgttcaagaacgtgtgaaggacacttggaaagttaccaggccatttctctcctgggcgcccgcggccctagaacgccggcctcaccggcagacgcgcgccctcctcccagatgcgcaggtgaccccggcgggcggcgcgggaaagggaagagctccgcgaggccgcgcgggggggaagcgggagaagccgctcttcctattccactcgcagtctgcgtgtgggggaaacgagtgcccggcgtatgaaacgcctaacttcgcgaaataaagagagacgtataaaagttcaagaattctgtccagactcaagggccctttctcatttaggggcaaccctgtcactacatcataaacttttaaatccgtgatccccacgttacaaaagcagaagtcccttttagacttttagcgaaaactgaactttgccggtgtcccacacggagggagggaggacgggaggccacgccagggctgcggggctgcagggcgtggacgcatcctggccggggcgtccactgtcgacgtctccacatcccaggagggtcgagacggccgcgggaagcagcctgcgagccgtgcggccccattccaaggaccccgccagtgtgagtcactgacagcttcgcgaatcaacggtgcccagaggaaaaaacttctcatttggacttctaggcccggcagtggccggcggccagggccccccagtagggcagggcggggcggggcggggcgcacagagccagaggggcttgcgagcggcggctgagggaccgcggggagggggcgccgagcggctccagcgcagagactctcactgcacgccggagggcgcccttcctcgctcgcgcccgcgcgaccgcgcgccccagtcccgccccgccccgctaaccgccccagacacagcgctcgccgagggtcgcttggaccctgatcttacccgtgggcaccctgcgctctgcctgccgcgaagaccggctccccgacccgcagaagtcaggagagagggtgaagcggagcagcccgaggcggggcagcctcccggagcagcgccgcgcagagcccgggacaatggggccgcggcggctgctgctggtggccgcctgcttcagtctgtgcggcccgctgttgtctgcccgcacccgggcccgcaggccaggtgagagatgcacgggaatggggtgcgcgggcggagggacgccgaggggagactgcgggggtcactgttgcgccttctcctcacccctgcctcagtttcctccgaaagccaaactggcatttgggctgagatctggagttttttccagtcacgtttaggtggggcgtgccacccccttcgcgggcccagccgatgcccctttggactcgatcttggagggtgcagcccgcctgccacggggtgttggatatggaggaggatggagcggaagccccctgggggagcctgcagtcctgcgttgcacttgtcattgtgtttctcccaggaccacccccaaaaagaaaagctctcacgttgctccaccaataaacgtttcgatctttaaaatataaagtggcgaaccgctgccgctgaagttttgctttgttggaagtttttttcttgcacattttacaggcgagaaaagtgatgtagagaaaagcccaggcagtcccttggcatgtttagcagagaatcagtaccagcagcccccggcccggccttgtgtccaggaggtgcgcagggtgcgagatatatggtgacaatagcagaggctccgcgtggtggcgggggaggggacatggagaggattttgttgttacctagaacccattccttctaagtgagttgaagagagagatccctccccaggaccgggctccctcgaacactgtgggatcccagtatttcttaacgagatttctgatccactgcaagaaggttgctcccctagaatattttccccactagtagtctatttttaagtatctggccacttgaccaaataaataaatttgattaatttatttggtcaaatattttctgtatccctttccccaagagcagcacagatgagttgtttttagcctgtaaaggcg

SEQ ID NO: 2351 - DNA, 6000 bp, Homo sapiens
taatgttttgaaatatgcataacttgtgagatggctaaatcaaacttataacatgtattacctcaaatacttatcattttttgtggtgagaccacttaaagtctactctcttagcaattgtcaagtatacaacacattgttattaactatagtcaccgtattatacaagagatttttctaactaattccttttaacagaaattttgtaccctttgaccaatgtctccccagtctaccctacccacccatccaaccccagcctctactaaccaccattctcttctctgcttccatgagttcaactgttttcgattccacatataagtgaaatcatgctatatttgtctttcggtgcctgccatatttcacttaacattatgccctctcggctcatccatgttgttgcaaatgacagaatttccttcttttttaaggctgaatagtattccactgtgtatatacatcatattttttattcattcattcattcatcagtggatacctagtttgattccataactgggctattataaataattctgcaatgaacatgagattgcagctattgacatcctggtctttttttttttttttttttttttgagatggggtctcgctctgtcggccaggctggagtgcaatggcgcaatctcagctcactgcaacctccgcctcctgcgttcaagcaattctcctgcctcagcctcccgaggagctgggattataggtatgcgctaccaagcctggctaatttttgtaattttagtagagacagggttttgccatgttggccaggctggtctcaaactcctgacctcaggtgatccacccaccttggcctcccaaagtgctgggattacaggcgtgagccaccgtgcccagccagcatcctaattttatttcctttggatgtatgcccagcagtggaattgctgtattatataatagttctatttttagttttagaggaaccttcatactgtttttcgtaatggctatgccaatttaaattcccaccatcagtatagatgggcttcctttccccgtatcctcaccaacacttgttatctgtcatctttttgataatatccattctaacaggtatgaagtgataactcattgtggttttaatgttcatttccctgattagtgatgttgagcattttttcatatacttgttggccatttgtatgtcttcttttgaaaaatgtctattcagatcctttgtccatttttaaatcaggtgatttgttatcttgctgttgagttataggagttccttatatattttggatattaaccctttatcagacgtatggtttgcaaatatttgctttcatttcataaattttctcttcactgttgattgtttcctttgctgtgcagaagctttttactttgatacagtcccagttgtctacttctccttttattgcctgtgcttttatggtcattataaaaaattactgcccagacaatgtcatgaagcttttcctctatgttttctgctagtagttttacagtttcaggtcttatgtgtaaaccattaatccatttaagttggttgttgtatatagtgtgagagaagggggacaagacgtccagagtttatcacttttgtgtatattggttggatctggtgataacgatttggctctatgtccccacccaaatctcaacttgtagctcccataattcccatgtgttgtaggagggacccagtaggagatgattgaatcatggagacgggtctttcctgtgttgttgtcatgatagtaaaatgggtctctcaagatcagatggttttaaaaacaggagtttccctgcacaagctctctctttgcccgctgccatccaagtaagatgtgacttgctcctccttaccttctgctatgattatgaggcctccccagccatgtggaactgtaagtccaataaaccattttcttgtataaattacaggaaaaaagactctggattttgttatattccttcaaagagtgttggtgtttttgctttagcagccaattaatttggttttactcaagcagcagactctttctctcttgagcagaagcttaaatatcacttcagttcttttatctttagcagaggtgcttctcatctttcctacaaatgcatagttcaagggtcagccaaaccctaggacagaagttatactgaaatttagggctccccctctctgactttttcctttccaggattctctcctaactttccagtgactgtgattgccctgaactctgtcctctggttctgtaggccaaaaagactacggattttctatctgggttttagtcaccttttatgttatataggcactgctgttatataggaaaaaccaaactattttccccaaactgttttctcttacccagcacttcactcaatccttctgacaccgtatgtctggagcttgtttctccacataccaagcaaccaattctcctgcagattctccagtggacaccagctgggtatccttgaatataattcaattctggacactatctacctctaatataactcaattctgacactatctatctacctggagatagagtcagattccacagattaagggctcagtttcacaacgctgccttccacttcaaatggcagtcataagtctgggcctccagacttctgaccacactatacattgggagttcctaaggccccctgctcagattcgattaatttgctagcatgattcacagaactcagggaaccactttacttacttttatccattcgttataaagaaaattacagaggatacagatgaacagccacatggtagagatgcatagggcagcgattgtgggaaggagcacagagtttccatgccctctcttgggcactaccttccaggaacctccatgtgttcacctatttttggttgatactccaaaaaccttggttggtctggcatgagtggccaagaacatcggctgctctgctgacctgctcaggaaagaagtagaagaatgactgagatgatgggtaccttgtgactatgttaggagataaccccagggattgtggtttggacccagatatagtgagagatttctacattctcctgtgtaagcaaactaaagactgtagaggaaaactactgtcatggacattggccgtagaattgggagtcctgaatcccattattaatttgcctctaactccaaaacctttaagaaatcccctctggtggcacgtgcctgtaatcccagctactcacgaggctgaggcaggagaattccttgaaccccggaggcggaggttgcggtgagccgagatcgcgccactgtgctccagcctgggcaacagagtgagactgtgtctcagaaaaaaaaagaaagaaaaagaaatcccctctactttttttttttttttaatttctatttatttttattttttgagacggagtctcactctgtcgcccaggttggagtgcagtggtgtgatcttggctcactgcaacctctgctgcccaggttcaagcgattcttctgcctcaggctcccaagtagctgggattacaggtgcatgccaccgcacctggctaatttttgtgtttttagtagagatggggtttcaccatcttggccaggctagtcttgaactcctgaccttgtgatccacccacctcggactcccaaagtgctgggattacagacgtgacccactgtgcccagcctaaatcccctcaactttctatgtggatttttccattgaaaagggacaggtttcatgggatgactgcagactaaatggagaaagtgtgcacatgaaggtatgcggaggaaagagaagtcatggaagctgggagtgatttgtttatatagacagtggctagcgtggaaatcaatgattgatccctttatgtcaagtactcagcctttcctaatgtcttcagggtagatctctgaaaacctatcattcacctttgtccctttgaggggcagagtttaggaagtattgcttatatcaagacaaatgtttcacagtattttgagttggcttattctctaataaagtctatttgtgcattatctgctctttaccacccactctcctagtaagaaaacataaacaaaagtaaaatatgctctctgcttgtcgcttttgccttgttgatgcgttcactttttacatttaaaatttttttaattttatttttcagaatcaaaagcaacaaatgccaccttagatccccggtcatttcttctcaggaaccccaatgataaatatgaaccattttgggaggatgaggagaaaaatgaaagtgggttaactgaatacagattagtctccatcaataaaagcagtcctcttcaaaaacaacttcctgcattcatctcagaagatgcctccggatatttgaccagctcctggctgacactctttgtcccatctgtgtacaccggagtgtttgtagtcagcctcccactaaacatcatggccatcgttgtgttcatcctgaaaatgaaggtcaagaagccggcggtggtgtacatgctgcacctggccacggcagatgtgctgtttgtgtctgtgctcccctttaagatcagctattacttttccggcagtgattggcagtttgggtctgaattgtgtcgcttcgtcactgcagcattttactgtaacatgtacgcctctatcttgctcatgacagtcataagcattgaccggtttctggctgtggtgtatcccatgcagtccctctcctggcgtactctgggaagggcttccttcacttgtctggccatctgggctttggccatcgcaggggtagtgcctctgctcctcaaggagcaaaccatccaggtgcccgggctcaacatcactacctgtcatgatgtgctcaatgaaaccctgctcgaaggctactatgcctactacttctcagccttctctgctgtcttcttttttgtgccgctgatcatttccacggtctgttatgtgtctatcattcgatgtcttagctcttccgcagttgccaaccgcagcaagaagtcccgggctttgttcctgtcagctgctgttttctgcatcttcatcatttgcttcggacccacaaacgtcctcctgattgcgcattactcattcctttctcacacttccaccacagaggctgcctactttgcctacctcctctgtgtctgtgtcagcagcataagctgctgcatcgaccccctaatttactattacgcttcctctgagtgccagaggtacgtctacagtatcttatgctgcaaagaaagttccgatcccagcagttataacagcagtgggcagttgatggcaagtaaaatggatacctgctctagtaacctgaataacagcatatacaaaaagctgttaacttaggaaaagggactgctgggaggttaaaaagaaaagtttataaaagtgaataacctgaggattctattagtccccacccaaactttattgattcacctcctaaaacaacagatgtacgacttgcatacctgctttttatgggagctgtcaagcatgtatttttgtcaattaccagaaagataacaggacgagatgacggtgttattccaagggaatattgccaatgctacagtaataaatgaatgtcacttctggatatagctaggtgacatatacatacttacatgtgtgtatatgtagatgtatgcacacacatatattatttgcagtgcagtatagaataggcactttaaaacactctttccccgcaccccagcaattatgaaaataatctctgattccctgatttaatatgcaaagtctaggttggtagagtttagccctgaacatttcatggtgttcatcaacagtgagagactccatagtttgggcttgtaccacttttgcaaataagtgtattttgaaattgtttgacggcaaggtttaagttattaagaggtaagacttagtactatctgtgcgtagaagttctagtgttttcaattt

SEQ ID NO: 2352 - DNA, 6000 bp, Homo sapiens
cattcattcattcatcagtggatacctagtttgattccataactgggctattataaataattctgcaatgaacatgagattgcagctattgacatcctggtctttttttttttttttttttttttgagatggggtctcgctctgtcggccaggctggagtgcaatggcgcaatctcagctcactgcaacctccgcctcctgcgttcaagcaattctcctgcctcagcctcccgaggagctgggattataggtatgcgctaccaagcctggctaatttttgtaattttagtagagacagggttttgccatgttggccaggctggtctcaaactcctgacctcaggtgatccacccaccttggcctcccaaagtgctgggattacaggcgtgagccaccgtgcccagccagcatcctaattttatttcctttggatgtatgcccagcagtggaattgctgtattatataatagttctatttttagttttagaggaaccttcatactgtttttcgtaatggctatgccaatttaaattcccaccatcagtatagatgggcttcctttccccgtatcctcaccaacacttgttatctgtcatctttttgataatatccattctaacaggtatgaagtgataactcattgtggttttaatgttcatttccctgattagtgatgttgagcattttttcatatacttgttggccatttgtatgtcttcttttgaaaaatgtctattcagatcctttgtccatttttaaatcaggtgatttgttatcttgctgttgagttataggagttccttatatattttggatattaaccctttatcagacgtatggtttgcaaatatttgctttcatttcataaattttctcttcactgttgattgtttcctttgctgtgcagaagctttttactttgatacagtcccagttgtctacttctccttttattgcctgtgcttttatggtcattataaaaaattactgcccagacaatgtcatgaagcttttcctctatgttttctgctagtagttttacagtttcaggtcttatgtgtaaaccattaatccatttaagttggttgttgtatatagtgtgagagaagggggacaagacgtccagagtttatcacttttgtgtatattggttggatctggtgataacgatttggctctatgtccccacccaaatctcaacttgtagctcccataattcccatgtgttgtaggagggacccagtaggagatgattgaatcatggagacgggtctttcctgtgttgttgtcatgatagtaaaatgggtctctcaagatcagatggttttaaaaacaggagtttccctgcacaagctctctctttgcccgctgccatccaagtaagatgtgacttgctcctccttaccttctgctatgattatgaggcctccccagccatgtggaactgtaagtccaataaaccattttcttgtataaattacaggaaaaaagactctggattttgttatattccttcaaagagtgttggtgtttttgctttagcagccaattaatttggttttactcaagcagcagactctttctctcttgagcagaagcttaaatatcacttcagttcttttatctttagcagaggtgcttctcatctttcctacaaatgcatagttcaagggtcagccaaaccctaggacagaagttatactgaaatttagggctccccctctctgactttttcctttccaggattctctcctaactttccagtgactgtgattgccctgaactctgtcctctggttctgtaggccaaaaagactacggattttctatctgggttttagtcaccttttatgttatataggcactgctgttatataggaaaaaccaaactattttccccaaactgttttctcttacccagcacttcactcaatccttctgacaccgtatgtctggagcttgtttctccacataccaagcaaccaattctcctgcagattctccagtggacaccagctgggtatccttgaatataattcaattctggacactatctacctctaatataactcaattctgacactatctatctacctggagatagagtcagattccacagattaagggctcagtttcacaacgctgccttccacttcaaatggcagtcataagtctgggcctccagacttctgaccacactatacattgggagttcctaaggccccctgctcagattcgattaatttgctagcatgattcacagaactcagggaaccactttacttacttttatccattcgttataaagaaaattacagaggatacagatgaacagccacatggtagagatgcatagggcagcgattgtgggaaggagcacagagtttccatgccctctcttgggcactaccttccaggaacctccatgtgttcacctatttttggttgatactccaaaaaccttggttggtctggcatgagtggccaagaacatcggctgctctgctgacctgctcaggaaagaagtagaagaatgactgagatgatgggtaccttgtgactatgttaggagataaccccagggattgtggtttggacccagatatagtgagagatttctacattctcctgtgtaagcaaactaaagactgtagaggaaaactactgtcatggacattggccgtagaattgggagtcctgaatcccattattaatttgcctctaactccaaaacctttaagaaatcccctctggtggcacgtgcctgtaatcccagctactcacgaggctgaggcaggagaattccttgaaccccggaggcggaggttgcggtgagccgagatcgcgccactgtgctccagcctgggcaacagagtgagactgtgtctcagaaaaaaaaagaaagaaaaagaaatcccctctactttttttttttttttaatttctatttatttttattttttgagacggagtctcactctgtcgcccaggttggagtgcagtggtgtgatcttggctcactgcaacctctgctgcccaggttcaagcgattcttctgcctcaggctcccaagtagctgggattacaggtgcatgccaccgcacctggctaatttttgtgtttttagtagagatggggtttcaccatcttggccaggctagtcttgaactcctgaccttgtgatccacccacctcggactcccaaagtgctgggattacagacgtgacccactgtgcccagcctaaatcccctcaactttctatgtggatttttccattgaaaagggacaggtttcatgggatgactgcagactaaatggagaaagtgtgcacatgaaggtatgcggaggaaagagaagtcatggaagctgggagtgatttgtttatatagacagtggctagcgtggaaatcaatgattgatccctttatgtcaagtactcagcctttcctaatgtcttcagggtagatctctgaaaacctatcattcacctttgtccctttgaggggcagagtttaggaagtattgcttatatcaagacaaatgtttcacagtattttgagttggcttattctctaataaagtctatttgtgcattatctgctctttaccacccactctcctagtaagaaaacataaacaaaagtaaaatatgctctctgcttgtcgcttttgccttgttgatgcgttcactttttacatttaaaatttttttaattttatttttcagaatcaaaagcaacaaatgccaccttagatccccggtcatttcttctcaggaaccccaatgataaatatgaaccattttgggaggatgaggagaaaaatgaaagtgggttaactgaatacagattagtctccatcaataaaagcagtcctcttcaaaaacaacttcctgcattcatctcagaagatgcctccggatatttgaccagctcctggctgacactctttgtcccatctgtgtacaccggagtgtttgtagtcagcctcccactaaacatcatggccatcgttgtgttcatcctgaaaatgaaggtcaagaagccggcggtggtgtacatgctgcacctggccacggcagatgtgctgtttgtgtctgtgctcccctttaagatcagctattacttttccggcagtgattggcagtttgggtctgaattgtgtcgcttcgtcactgcagcattttactgtaacatgtacgcctctatcttgctcatgacagtcataagcattgaccggtttctggctgtggtgtatcccatgcagtccctctcctggcgtactctgggaagggcttccttcacttgtctggccatctgggctttggccatcgcaggggtagtgcctctgctcctcaaggagcaaaccatccaggtgcccgggctcaacatcactacctgtcatgatgtgctcaatgaaaccctgctcgaaggctactatgcctactacttctcagccttctctgctgtcttcttttttgtgccgctgatcatttccacggtctgttatgtgtctatcattcgatgtcttagctcttccgcagttgccaaccgcagcaagaagtcccgggctttgttcctgtcagctgctgttttctgcatcttcatcatttgcttcggacccacaaacgtcctcctgattgcgcattactcattcctttctcacacttccaccacagaggctgcctactttgcctacctcctctgtgtctgtgtcagcagcataagctgctgcatcgaccccctaatttactattacgcttcctctgagtgccagaggtacgtctacagtatcttatgctgcaaagaaagttccgatcccagcagttataacagcagtgggcagttgatggcaagtaaaatggatacctgctctagtaacctgaataacagcatatacaaaaagctgttaacttaggaaaagggactgctgggaggttaaaaagaaaagtttataaaagtgaataacctgaggattctattagtccccacccaaactttattgattcacctcctaaaacaacagatgtacgacttgcatacctgctttttatgggagctgtcaagcatgtatttttgtcaattaccagaaagataacaggacgagatgacggtgttattccaagggaatattgccaatgctacagtaataaatgaatgtcacttctggatatagctaggtgacatatacatacttacatgtgtgtatatgtagatgtatgcacacacatatattatttgcagtgcagtatagaataggcactttaaaacactctttccccgcaccccagcaattatgaaaataatctctgattccctgatttaatatgcaaagtctaggttggtagagtttagccctgaacatttcatggtgttcatcaacagtgagagactccatagtttgggcttgtaccacttttgcaaataagtgtattttgaaattgtttgacggcaaggtttaagttattaagaggtaagacttagtactatctgtgcgtagaagttctagtgttttcaattttaaacatatccaagtttgaattcctaaaattatggaaacagatgaaaagcctctgttttgatatgggtagtattttttacattttacacactgtacacataagccaaaactgagcataagtcctctagtgaatgtaggctggctttcagagtaggctattcctgagagctgcatgtgtccgcccccgatggaggactccaggcagcagacacatgccagggccatgtcagacacagattggccagaaaccttcctgctgagcctcacagcagtgagactggggccactacatttgctccatcctcctgggattggctgtgaactgatcatgtttatgagaaactggcaaagcagaatgtgatatcctaggaggtaatgaccatgaaagacttctctacccatcttaaaaacaacgaaagaaggcatggacttctggatgcccatccactgggtgtaaacacatctagtagttgttct

SEQ ID NO: 2353 - DNA, 6000 bp, Homo sapiens
atagccaattccacaaactaagtcaatagaataacacaaacatggcacaacttctataaaaatgttaccttaaaaaatgttactgcaaactattaagaaagcaaagttaaatttaattagcttaagacaaatacatggctagcatcctatacactttcattatcatgcccatggcagacatcaccaatcaatcacaccacacttccctccctcccccaatataatctaaagacacaatcttccagcagaagtcaagataggcattattactgaaactatttgttgtccttgatggctatttttcaaatattgaagttgccgggtgcagtggttcacgcctgtaatcctagcactttgggaggccgaggcagttagatcacctgaggtcaggagttcaagaccagcctggccaacactgggaaaccctgtcactacaaaaatacaaaaattagccaggcatggtagcggcgactgtaatcacagctacttgggaggctgagcaaggagaactgcttgaacccgggaggtggaggttgcagtgagctgagattgcaccagtacagtccagcctgggcaatagtgcaaaactctgtttggagggggcggggggaggctgggtgcggtggctcacgcctgtaattctagcactttgggaagctgaggcaggcggatcaccaggtcaggagttcgagaccagcttggccaacatggtaaaaccccatctctactaaaaatacaaaaattagccggacaaggtggcacacgcctataatcccagctactcaggaggctgagggaggagaatcactggaacccgggaggcagaggttgcagtgagccaagatcgcgccactacacttcagcctgggcgacagagcgagactccatctcaaaaaaaaaaagaaagaaaaaaagtataattttctgttaaagaaaataaatcattatggtcaagagaaccttaattaggaacacattttttaaaaaatgtaatcccctttttaaagagttctagaaaattatattttttgagagcttatttttgacccatttgaattaaaaaaccggagatagtcgctttttctctttttctttttcttttcttttttttttttgagacggagtctcgctctgtcgcccaggctcgagtgcactggcatgatctcagctcattgcaagctacgcctcctgggttcacgccattctcctgcctcagcctcccagtagctaggactacaggtgcccgccaccacacccggctaattttttcttttgtatttttagtagagacggggtttcaccgtgttagccaggatggtctcgatctcctgacctcgtgatccgcccgcctcggcctcccaaagtgttgggattacaggcatgagccaccgcgaccggcctgacagtcgctttttctgagtatccaaaaagttacaatcagacaggcccattcattaagggatttttaagaatatgtattttaaaaaatatatctgtaaatctaataagagaaagaagcactaacggttcttgcagtttaagagaaatacaggtcaatattaaccaaacacttctgagaatatatgtggtcacttaagatttgtcacttccttcaaaataatttaaggtagactcccgaagtgaggtgataaaaaagggaaataaaaacagatccctggaactctaggatcatgttatagtgggtgacatttagcatacagtaaaccaacaggaagcagtgaaaatctggattcgggaagttgtaagagagtactatggtataagtgagaaacaaacatttcttaaatactcaaatctaataaagaaaaatatctaatattctacgaaaaaaacatgaggctctagctccctaatctaacaacaaggttcaactattatatatacataagcagataacaacacaatcttaggaatataaacaccattaaaaggggcatttcaggccgggcacagtggctcacgcctgtaatcccagcactttgggaggccgaggcgggcggatcacgaggtcaggagatcgagaccatactggccaagatggtgaaaccccgtctctactaaaaacacaaaaagtagccgggctaacgtgttagccgggcgtggtggcgcgcacctgtagtcccagctactcaggagtctgaggcaggagaatcgcttgaacccgggagggggaggctgcagtgagcccagatggtgccactgtactccagcctgggagacggagcaaaactgcttccaaaaaaaaaaaaaaaaaagaaggcgcggagggcgggggtgcatttctccaccaatctcaattgcattaatagtaaaaacagtaacttgctttgagaaactacgtgtagtagtatccattagggaaaactgggtctattttaaaagacttttttagtaaagttccttcagcagaagctagtgagcaggcatgaattacacatttcctacacattctagagccccatatgtatatccattcagaccctttcttccactttttttttgttattttaaggattagtttgaaaaggcttttgtacttctacagtaagtacaaaaatacaacgaacattcctgcccagaatctttatttctacctaaaacagcagtgaaacctgagccatctgtaaagacctgaggtagtccaaaaaaaaagaaacaaaacacttctaaaaaaccttttaaaaataaatttgcatccgatagtcactaggtgctttttcacttaggtcactcgtttaaaaatgaatttaaaatttgcgtaggttgccacactgcacaaagaagaatcaaaacagatcaactttgctccgtaagacaaactattttaaataaaggtgacaaggacaaagaagagttgacatctgggcagttattgctggaagagctttaggggtagaaaaatgctcaggtagcccatgcttacagaacacttttcttagtggctttaattgcgcattaccagtactgagtagtacacagagcgcacttactacttttgataaatgggggaggaaataaagacgaaggtccttcagagagtcaattaagcagccaccgagagggatgaagggcaaggtagatcaggaacccctcttggtttccgcttgtccagaaaaacaaccgtcctactgcgcacacccgacaccgaggctccagcctttggtttggccagtaaaccaaaagcgaccagtagagcccagactaggagctcactcactcacctcctggatgcgcttcctggcccgctgaagcacttcttcgtagcccttctgccgcagctcgctgaggctttcgtaatactcctcgggatcatcggtctcggtgaagagcacctgggagaggatcttccagccgcaggtgtccaggccgtggcccaggtagacctggagctggtaacacagagtgtcgatttcctgctcggtcatctcgggggcgcccccaaacagcacagtccacatgcccgaaggttcctcggggaacaccggcaggcacggctccaactgcgagttcaccgagcacagctgctggtgcacggcgcgcaggtcctggaaagaaaacagtccggcccagctgcactcttcggccggagactccagctcggtggcgggcggcggctgctccgcgtccgagagcgccagaggtgcctcgtcctccttcaccatttccagcacctctatctcctcggagaccgtcccagaggcgctcactatccgtacagaggacacctgggcctctctgggcgccggccgggctgctgcagcggctgcccccgccgcatcgtcggcttcagatgttttctgacccgggatgggtttggcccgcactgggctcctaagacgactctccgcccctttgctgccaggactccgcagccgcgggtcccccagaaggctgcgagtgctccgaggagagccgccctccgcccaggccgagctccgccggggcccggggctcctaaccagagttgcagaggcagtggcctcgggccgacccctgcccgccgggctgccgggcccgcggctcccgtcggacgcagctccgccggcctcggcgccccctcgcgcccccgcttgctcccgggagccgctcctctgcctctgggccgtccggttgtggcaggttatggcaaacttgccctcaatctcgttccaggccacaataaagacgaatttgtgtttctcgcgctcgtcgaacacatggggccgcacagccacccagtccgactcgagcgtctcctccagcgcgaacgacatggtggctccggcttctcgccgcggggaagggccgccggcccggcccgcccgaggactccccgctggctgcgccgcgccccccgctcaccctcgccgggcgccttcagccatcttagtgcgccggccggctctcccggctcgttcgcctgtccctccgcgccccgaccgccgagctcctttgtggcgcggatcgagagaaggacaataagcgtcccgggagcaggtagttcacatggtcacctgcggccggatctgtttacaagctccgcgctgccgcagcgcctcgcggccgcccgccgccccccgcgcgaggccgtggagctgcgtctgcggcgctccggtggtgaggcgcgggtcccgcggggtcaggccggcgctgtatgcgtcccggtcgctcgcccaggtcaagatccccgcccccgcccctggtgctgctgcagaaagcccggagccggcctgactgatgaacccgtctcctaaactctgcgcctcagcatcgccacaatgttgccattcgactgctgacgtcggcggctccacgagggacgtaaacatgggcacgtgccgcacgctggtgacgcggcggcggcggcgcgcgcaccccgcccgcgcgcgccggcgcctcctctcggcgtcccctgagccagcccgcgagcggccgcgctcccgactctccttccttccgcgcagcctccagttccccggggctggagccggctgtcggctggttgccggctccgagggcgatgagagtggcaggtgtgccctgctgcacaggtggcctccgaacccgggaaaagaggaactaaggcggaggaactgagacgtttcgaattccaggtattgagaccctcgaatgtacatttgcctccattctcctggagggagcccggacggagagtcgctcctgcgttcagaagtagcgtgttgccgcggggaacggtgtgctgaactatgtggggctcgcccccagcctgttaggttctcccctaatgcccttgagaccaaaacaaaaaacaaaaacaattccagaagcttttctggaaagacagagtttaatatatgaaaggaaggtgtctgaggaaagcccagtaacagtccaaaacaaaatgaaaaatgaaaatgccatgtcctaacagcatgaatgtttacatttcagttcattggtgttttattgcttcaggtttcatcattatgtactgttctgtgaacctcgttttgaggtcactgggctttagcccttttgaagttgtattcaattatgggagttcccagaatgcatatacaaaaacagtcatatcaatctctgctattcttactaaactatgatgaaacacattcttaaaattagtagactttataataattattggcattctttttccgattagtattcaagtcacagatgttgtgcaccatagtaaagcacaatggaaattagttcttttacatttattcacatttctaaagtatatacaaaaccgtttggattagccttgtattgttaggttcagtaaaaacagctgtttattcagatgacagaacagtactgaactagctaagcttcaaacttagttcagtattgtccatcttaaactctaagcttcaacacttggttcagtattgtcctgatatttgaataaacagccaaaaaaaattttttttttgagacagagtctcactctgtggcccaggctggagcacagtggcacgatgtcagcttact

SEQ ID NO: 2354 - DNA, 6000 bp, Homo sapiens
gccaatgactgagcaaggcctggctatatctacccaatgagaggaacttctttttttttttttttttttttgagacagagtttcgctcttgctgcccaggctggagtgcaatggtgtgatcttggctcactgcaacctcctcctcctgggttcaagtgattctcctgcctcagcctctcaagtagctgggattacaggcatgcgccaccacgcctggctaattttgtatttttagtagagatgggttttctccatgttggtcaggctagtcttgaactcctgacctcaggtgatccactcgccttggcctcccaaagtgctgggattagaggtatgagccaccgtgcctggccatgaggaacttctttaagggaaatttttgcctcagaactccctgttggattagcctgcctgattctgcctctgccccttccccttctcttccacaggggtcgcctccatacttttttttttttcgttttgagacagagtctcactctgatgcctaggctggcgtgcagtgacatgatctcgactcactgcaacctccacctttcgggttcaagcgattctcgtgcctcagcctcccaagtagcagggactacaggcttgtgccaccacgcccggctaatttttatatttttagtagagacggggtttcaccatattggccaggctggtctcatactcctgacctcaagtgaccgcccaccttagcctcccaaagtgctgggattgcaggcatgagccaccgcacccggcaccccataaattttttgcgttcctacttctcagtgtctgcttccgggagaatctaactgagacaccagtggatttgcaaatggaccccggaactgaagttgctccctgctcccaaccctgggatgtgtaacctaactaatctgaactgctgttttctcctatataaattaaagatgcttattcctttcatacctacatttcatggttattatgaggtgagaaaatgctatataatttgaaaatcactatgtaaactattatagtttttatgaaaagttctaaagagttaaagcatttcctgaattacctaaagatgcacaatagttctaaaaacttcaaacagataatagttttaagccctttgaaggctggtatggtgtatgtggggtttttctgtagctttgcttattcccagggagtaacttatacactgagagatcttgcttggcaatcagatacagacctaaacaaagaattgtagagtactatagtaacctatcatgggaattttggtttgtttctcttcatttctaggataacagttactaacatagcacgaacaagaaacactgaaacatctcatttgacaaaacacagtggccagtgtattgagaggaaatacttaacacctgtgtaactgtgaaccaattttgtgtatcactattctgataagataaaattttctatccatgaataaatataatttcatgttattttactcttaacaccacttgacgaaatattataattttaatatacgtgcacataaaatatttcttataacattctttatttccatttatttatttatttttgagacgaagtcttgctctgttgcccaggctggagtgaagtggcgcaatctcggttcactgccacttctgcctcccaggttcaagtgattctcctgcctcagcctcccgattacagcctgggattacaggtgcccaccaccacgcttggctaatttttgtatttttagcagagatggggtttcaccatgttggccaggctggtctcgaattgctgacctttagtgattcacccacctcggcctcccaaagtgctgggattacagacatgagccaccacacctggtctatttatttattttgagacagagtcccactctgttgcccaggctggactgcagtggtgcgatcatggctcactgcagccttgacctcctgagctcaagcagttctcccacctcagcctcccaagtagctgggaccacaggtgcataccaccatggccagctatttattttattttattttttatttttatttttttgagacggagttttgctcattgcccaggctggagtgcaatcgagcaatctctgctcaccgcaacctccgcctcccgggttcaagagattctcctgcctcagtctcccaagtagctgggattacaggcatgtaccaccacacctggtgaattttgtattgttagtagagatggggtttctccatgttggtcaggctggtctcgaactcccgacctcaggtgattcacccgcctcagcctcccaaagtgctgggattacaggctggagccaccgcgcccggtctattttatttttttgtagaggcagggtctccccatgttgcccaggctgctcttaaactcttgggctcaagcaattcttccaaagcatttggattacaggcatgagtcactgtgtccagccatccagccaaaatattattattttttatttttttcagacggagtttcgctcttgttgcccaggcactggagtgcaatggcacgatctcagctcactgcaacctctgcctcccgggttcaaacgattctcctgcctcagcctcccgagtagctgggattacaggcacctgccacaacgcccagctaatttttggatttttggtagagacggggtttcaccatgttagccaggctagtctcgaacttctgactttgcgatctgcccaccttagcctcccaaagtgctgggattacaggcgtgagccaccgcacccggactatttttttaaataataatttttttctttttcttgtcctctactctgaagagaacttgtaaacaaattcttttaatactcattctctgtattcacaattatacataatgggatcatgtcagtaatgctttatcagaaaaactagctttttgcagttgctttttagcaaaaaagaagagaaagttttctacaatgtgctattgtttgcttagctggtaattcaaaccttttttcttttttcttttttgaggtggagtctctgtcccccaggctggagtgcggtggcatgatctcagatcactgcaaccttcgcctcccgggttcaagcaattctcctgcctcagcctcccaagtagctgggattacaggcacgtgccaccacacccgactaattttgtattttttatagagacggggtttcaccatgttgtccaggctggtcttgaactcctgacctcaagtgatctgcccacctcagcctcccaaagtgctgggattacaggcgtcagccaccatgcccagccccgtaattcagatttgaaatgggttttctctcttttttgcctttcagaacgtgtctctgacttgcatttgagatttgacacaaactcagttacaaactttgaaaatttgtggtttcaaataatgaactgtacaaaatgttaaaaaccagctgggctcagtggctcacgactgtaatcccagcactttgagaggccaaggcggtcggatcacctgaggccagaagttcgagaccagcttggccaacatgaagaaaccccgtctctaataaaaatacaaaaattagtcgggcttggtggtgtgtgcctgtaatcccagctacttgggaggctgaggcaggagaatcgcttgaacccgggaggcagaggctgcagtaagctgacatcgtgccactgtgctccagcctgggccacagagtgagactctgtctcaaaaaaaaaattttttttggctgtttattcaaatatcaggacaatactgaaccaagtgttgaagcttagagtttaagatggacaatactgaactaagtttgaagcttagctagttcagtactgttctgtcatctgaataaacagctgtttttactgaacctaacaatacaaggctaatccaaacggttttgtatatactttagaaatgtgaataaatgtaaaagaactaatttccattgtgctttactatggtgcacaacatctgtgacttgaatactaatcggaaaaagaatgccaataattattataaagtctactaattttaagaatgtgtttcatcatagtttagtaagaatagcagagattgatatgactgtttttgtatatgcattctgggaactcccataattgaatacaacttcaaaagggctaaagcccagtgacctcaaaacgaggttcacagaacagtacataatgatgaaacctgaagcaataaaacaccaatgaactgaaatgtaaacattcatgctgttaggacatggcattttcatttttcattttgttttggactgttactgggctttcctcagacaccttcctttcatatattaaactctgtctttccagaaaagcttctggaattgtttttgttttttgttttggtctcaagggcattaggggagaacctaacaggctgggggcgagccccacatagttcagcacaccgttccccgcggcaacacgctacttctgaacgcaggagcgactctccgtccgggctccctccaggagaatggaggcaaatgtacattcgagggtctcaatacctggaattcgaaacgtctcagttcctccgccttagttcctcttttcccgggttcggaggccacctgtgcagcagggcacacctgccactctcatcgccctcggagccggcaaccagccgacagccggctccagccccggggaactggaggctgcgcggaaggaaggagagtcgggagcgcggccgctcgcgggctggctcaggggacgccgagaggaggcgccggcgcgcgcgggcggggtgcgcgcgccgccgccgccgcgtcaccagcgtgcggcacgtgcccatgtttacgtccctcgtggagccgccgacgtcagcagtcgaatggcaacattgtggcgatgctgaggcgcagagtttaggagacgggttcatcagtcaggccggctccgggctttctgcagcagcaccaggggcgggggcggggatcttgacctgggcgagcgaccgggacgcatacagcgccggcctgaccccgcgggacccgcgcctcaccaccggagcgccgcagacgcagctccacggcctcgcgcggggggcggcgggcggccgcgaggcgctgcggcagcgcggagcttgtaaacagatccggccgcaggtgaccatgtgaactacctgctcccgggacgcttattgtccttctctcgatccgcgccacaaaggagctcggcggtcggggcgcggagggacaggcgaacgagccgggagagccggccggcgcactaagatggctgaaggcgcccggcgagggtgagcggggggcgcggcgcagccagcggggagtcctcgggcgggccgggccggcggcccttccccgcggcgagaagccggagccaccatgtcgttcgcgctggaggagacgctcgagtcggactgggtggctgtgcggccccatgtgttcgacgagcgcgagaaacacaaattcgtctttattgtggcctggaacgagattgagggcaagtttgccataacctgccacaaccggacggcccagaggcagaggagcggctcccgggagcaagcgggggcgcgagggggcgccgaggccggcggagctgcgtccgacgggagccgcgggcccggcagcccggcgggcaggggtcggcccgaggccactgcctctgcaactctggttaggagccccgggccccggcggagctcggcctgggcggagggcggctctcctcggagcactcgcagccttctgggggacccgcggctgcggagtcctggcagcaaaggggcggagagtcgtcttaggagcccagtgcgggccaaacccatcccgggtcagaaaacatctgaagccgacgatgcggcgggggcagccgctgcagcagcccggccggcgcccagagaggcccaggtgtcctctgtacggatagtgagcgcctctgggacggtctccgaggagatagaggtgctggaaatggtgaaggaggac

SEQ ID NO: 2355 - DNA, 6000 bp, Homo sapiens
acccagcccatcttatacttaagaacccatatgtgtctgtatagattcatctctaaccctgttctttatgctttaggtttcatatttattatagtcagatacattataaacttcagtacagtcgtatgatttttgctttgaacactcctgtgtattttatagaaattaagaggaaaaatagtctattttcctactaatatcatttccagcaatctttattcctttatgaaaatctaagtttccatgtgtatcattttccttcaatctgaacacattttaaagaacatttcttatggtgtccatctgctggtgatgagttctcttttaatttaactgtttattttttctttgttcaggagggatatttgcttggaaatggaattctgggttgacagatgttttgttgtgttttgtttattcctcatctgttctctattgtttctagtttgtagtcagcattcataggtgtacttgttcctcctatgttatttttctctagctgttttcaggaatttctcttttatttttgagttccagtagtttgactataatatgataaacctacttgtgggtaactgcatttatctgcttggagctattagagcttcttgcatgtgtagatttatgtctttcgccaaatttgggatttttcttgtaatattttgttctgaatcattttctcttctcctctggaacttcagttcaatatatgttaagaccttttggccaggtacaatggcgtacgcctataatcctaacactttgggaggctgaggcactaggattgcttgaatccaagagttcgagaccagcctaagcaatatagtgagacctcatctcgggttgtgggggaagaccttttaatattgccccatgagtccctgaggctttcttttttgtttttttttcttttttctttttgagatggagtctcgctctgttgcccatcctggagtgcaatggcgctatctcggctcactgcaagctccgcctcccgggttcatgccattcttctgcctcagcctcccgagtagctgggactacaggtgcccgccaccatgcctggctaatttttgtatttttagtagagatggggtttcaccatgttaaccaggatggtctccatctcctgacctcgtgatctgcccgccttgacctccctaagtgctgggattacaggagtgaaccaccacacccagcactttcttttttttctataagattggataatttatctttatcttcaagttcattgactgttattagaaccatactctatacccatacagcgaattttctatcctagaattagtttctattttttgagatttcctgtttattcttgttgagtgtatttcttttatgtccaattagcgttataatagctgctttgaaatatttgtctgttaaatccatatctgtttcatcttatgattggtcttcattgattgctttttttaaaaatagtgtttttttttgtttgtttgtttgtttttaattgagacagagttgctctgtcacccaggctgtagtgcagtggcatgatctcagctcattgcaacctctgcctcctgggttcaagtgattctcctgcctcagcctccccagtagctgggactgtaggtgtgctcctccacacctggctaatttttgtattttcagtagaaactgtttcaccatgttgccaaggctggtctcgaactcctgacctcaagtgatctgcctgcctttgcctcccaaagtgctgggattataggcttgatccaccgcacctgccccattgattgctttttgatgactgagttttgttttcctatttctttgttggtctgttaatcttggattatataatagacattgtgaatgataaattgtagagcctctggattctgttatgttccctcagagtgttgatttttacagtcttgtcttcagcagtcaagttgattggattcagatgtcaaactctacctccttcacggaaggcagcagatgaaatatttattgttttgttttatctggattgtttagtacctgtcctgtgcatgtatagttccagtgatcagccagaaatttgagtagagtttatatatgaatttggactttcttcttcttaggctgtctccctttcatcactgttctctggctttctagctgctgtggttgtcctgaactctatcctcagattcttcaagccagcaagccaacaagactgtgggtttctgagggttttttttttttttttttggagatggagtcttgctctgttgcccaccaggctggagtgcagtggcgcgatctcagctcactgcaagctccgcctcccaggttcacaccatcctcctgcctcagcctcccgagcagctgggactacaggtgcccgccaccacgcctggctaatttttttgtatttttagtagagacggggtttcaccatgttagccaggatgttgtcgatctcctgacctcgtgatccacccatcttggcctcccacagtgctgggattacaggcgtgagccaccgtgcctggcaagggtttctgagtttttagtcatacctctccccttcttttggcatccactggggcacaccctcaggctgaaaggcatgaataaaccgtctagagccctccctgcttccaaggtattgttgatgtcccttccattttatagctattttggtcactctgtagtgcctacaggcagttgttttgtgatattttgccccacggtttgttgttgttatcagtggcaaaagttgctctgatagaactgcttagctaatactagagaagtcaaaattctccatattagttttaacagtagccttaaaaaaacagaatgatagctaatatttgtttggcactttttttgttataaaagcactttaatgtagattgtctgatttatcatgattgttaataatacagtgctgctacatgttgtgccaaaaatatgaacaggaaatgagtctgaagtctcaattcagcatgattacacatatgaactgatacaacaactaaaatgaaaataagtggggagaaagatagtagtggaaactataggtatgaaaaggaatagaagaattttgtgcctttggggaggtgatactgccagcaggtaaatggagtccatgtatgcatatataaattactgtcttctgtattagttcttttcatttgttatttttatgtatttacttgccttttgagatggagtctcactctgtcacccaggctggagtgcaatggtacagtcttggctcactgcaacctctgcctacccggttcaagtgattctcctgcctcagcctcccaaggagctgggattatgggtgtgtgccaccacgcctggctgatttttgtaattttagtagaggtggggtttcaccatgttggccaagactgctctcaaactcctgacctcaagtgatctgcctgcctcggcctcccaaagtgctgggagtacaggcatgagccactgtgcctggctgctttttgttttgtttgttcttttttttgagacaaggtctcacttcgtcacctaggctgcagttctgtggcacaatcacagctcactgcagacccgtcctcctgggctcaattctcatgcctcagcctcccatagctgggactatcagctaatttttacattttttctcccaagaaatcttgcctaagattaaattattgtttttttgagacgagtctcactctgtcgccaggctggagttcagtggcgtgatctcggctcactgcaacctctgcctcccgggttcaattgattctcctgcctcagcctcccgagtggctgggactacaggtgcacgccactacacccagctaatttttgtatttttagtagagacggggtttcaccatgttggccaggatcatttcaattactggaccttgtgatccaccccccacggcctcccaaagtgctaggattacaggcttcagccaccatgcctggccgattattgtttttatacatacaaggtctcactacattgcccaggcctgcctcaaactcttggcctcaagcaatcctcttactttggccttccaaagtgttgggattacaggcatgagccactgcacctggcctcattcttttataaaacttttatttataattttaataatatttatcacagtttgaaattctttgtctctaaaagaaccatggggaaaagaataattttttataaaatttaaattatttaaaaattgttttctgtttattcactacactgtaagctgtgaggaccaggaccatgtttttgtatgtccagctcgtaggccagtgcctgacatgattttgaaggaggtgacaggtagaaattgaagaaatttattggaaatgttccagatttggatggttttcattctactagatagcagaaaattttttgggctgggtccagtggctcacgcctgtaatcttagcactttgggaggccgaggcgggtggctgtcttgagccaaggagttcaagaccagcctgggcaacatggtgagaccccgtctctacaaaaaaaaaaaaatatatacaataactagccaggtgtggtggtgtgtgcctgtagtcccagctacttgggaggctaatgcaggagaatcacttcagcccaggaggtggaggttgcagcaagctgagatcgcaccattgcactccagcctgggtgacaggagtgaaaccctgtctcaaaaacaaaaaaaaaaggaaaataaaaaatgggaagtgttaaggctaagctcaatactttgagcctcaaaagaaatattcaggccatggtcttgagtagtgagacaccagaagtatggagatagtgatgaaaagcagtcaatgcttttcattccctcttgcttctgtgttttagggttccgaggtcctggcatgatagggagagttcaaagcaagtatttataggttattagaattgattttcttagttgtgaaactgtcttgttccacagctcttggataagcacaagaatacagagagcatggtggagcttctggacttgtatcagatggaggatgaagcctacagcagccttgcagaagctacaaccgaactctatcagtatttactacagccattccgagacatgagagaacttgccatgctacgaagacagcagatcaaggtatttttttattaatcctaactagtagcctgcctgtttcatagttctcagcctgaaaggccatgcgttatccacaagaggaactttaaaaaaaaaaaaaaaaagaaggtacctggtcctatttctgcaaagtttcttgtttggtagaatagggttgtagcctgagtatccattctaaagcacctcaaaaggcaattctgctgagtagccagggttgaggatagcccagaaagtaatgtgttcaagttagcacaaagttgtaaatacattgggaggattcctattttctccctttcctgcactttccttcctcctctagtcatgtctcctctttaatgttttggagactgtgtactcttagacttcattaccagaaattttgggcaggctgagcgtggtgcctcacacccgtagtctcaacattttgggatgctgaggcaagaggatcacttgagctccgagcttgagaccagcctgggcaacacggagaacccgtctctacaaaaaaaaaaaaaaaaaaaaaaaaaaaatcaaactagctggatgtggtggcacatgcctatagtctcagctacttaggaggctgaggtaggcggaagattgcttgaacccaggaggtcatggctgcaatgagccatgattgtgccactgcactccagcctaggcaacaccttgtctccaagaagaagaaaaagttttgggaacatttcttttttttttttttttttcgagatgggatctcgccatgttgcccaggctggtctggaactcctgggctcaagcgatttgcccacctcggcctcccgaagttctgggactacaggtgtgtgaaccaccatgccca

SEQ ID NO: 2356 - DNA, 6000 bp, Homo sapiens
ctcacaacacaacaagcctgagatagatattataagcaccatgtctgaagatgagaagaaaaatccagagagacaacttgtataaagctgcacagattaaaaaaaaaaaacataactaagcccagaaattctaacttcaagtgttttttatcacctaccccttcatggtacttttattaaattttcaaaatacttccccatttcacaaaccttcagtggctctcagtcactacatgatgaaattaaatgtccttagtttaccattttccattctctacaatccagtttggttttccttcaactttattttccatttgtaagactatgtcttaattctcttactgtgtttaggagattgccctcctcatgaagcagaaattccctctcactatcgaaattagaagttcatatgctcattttcctggccttcctatcaattaccgctgtgctgtcaaacatggtagccactggccacacgtggctactgagcacttgacgtatgtctagtggcacatgttgaaatattttggatatattgggttaaataaaatatattattaaaattggtttcacctggtttttgttttgctttagagtcagggtctcccccccgtcacccaggctggagtgcagtgtcacaatcatagctcaccgcagcctggaactcctgggctcaagtgatcctccggcttcaggttcctgagtaactaggactacaggcatgcaccaccatgcccagctaatatttttttgtagagacaatgtcttactatattacccaggctggtctcaaattcctggtctaaagcaatcttcccatctcagcctcccaaactgcttggattagaggctggttttttgtttttgtttttgtttttaaactgtcttatgtggctactagaaaatttaaaattatgtatgtggcttgcattatatttctatcagacagcatgtaggtagagtgttaatgtgttactaggttatatccatgatttgcccccattctaggcttgaggttgaaagctaatgttgtgaatatgaagtgaccctccattctgttgagagtagtggcagtgatagtaactgcatctatcttccagaagcagcagaggcatcatccactctgggtcaagtggtactggcagtctcagttttggtatttgcatccagcagtggctacagtgatggcttcttgggaccagttccgggcataatgttgcgtgttgttcctgaagatcctgtagatgtcaaatatccttctaataaattccttttctgctaaggcccttcatgaagtctccctctccaccccagtccacaggatccttccctttttcagcatcaatagtgaataagatccaaaccacgcacttggcactttgcccatactatttatcttatcataggaaagtgtctagttttctcagccagactgtaaaattccctgtggcaggaaccctgtctttacataattgtttcttagtatctgtcagaccttggtcacagcatcactggaggaatacttgttagttaccactgcagatctttgaagtaggcagggtggctgtcattatctctgtttgtacagatgaggaaactgttgttcagcgactggcttgaggttgtgcagctggcttgctcatactggagcggtagctcaagccttctcactgcctgccaacatctctttcctctatttcaggccctgccagataaaatggtgtattaatttcatagagctgttataacaaagtaccacagattgggtggcttaaaacaacagacatttattgactcagagttctgaaagttataaatccaaagtcaaggtgtccacagggccatgttccctctgaaacctgtaggaaagtccatgcatgcctcttcctagcttctgatggtttgttggcagtctttggcattccttggcttgtagctgcataactccaatctgcctttgtcctcatctggcatcctcacgttctgtctatgtcttcacacggtcatcttcttaaagggacagtagtcatggtgggttatcctaccctattgcagtatgacctcattttatcttaattatatctgcaataattttatttcaaaataagggtacattgtttggtactgaaagtcagaacttcaacataccttttttcggagtagtacaattcagtctctaacagatggtaaccataagagaagtaaataccatagaaactgaagactttgtcttgtttctaggatttattccaaggattacattgtagtgaggtagaaggcggggaagtgttttcaagtatatattcctacctactacttgatttgcatatggactgatagggcttggttgaagagcatatgttatgggttcagtgaatctcttctctcatataaggactaaatggcccccacagataagatgccagccccatcctttctggcaggtctccccagccatcctgaggcagctatcccatttagaggggaaatgatggtgtgtaattctgataagtcaatggaagaagaggttgttgcagtgagcctataactcttttccagaagggtctttgggggtctaaggtatcagctgggtcctagatgggccagcaagtcccatctaggcacattgagaagcctaaccaatagatgcagctagcctttagactatgtatccattttgctggtatttcttcttttcctttaatgaaaatatatatgttattaataaaaataaatacagaatttaaaaaacattaaaaggaaaatgctaaaatgagttctgctctagttcaaaagaaaagaacgacagtagtttccaggcaggccctttgaggtcctacacagggatagtaatacgactgggacccttaagtgggggtaactgaatgaaatctctaatgaaagcctgctaatgacacagaatcaaatctctgagtaagcctgtctccaaatccaatttctctagatgggaagggcatgggctttatggtcagcactatcccttaatgtgagaccttgggcaagggacttaatctctctgaatttgcccatgtataaaagtgaggataattatctagcagggctgtggtgaggatttcatatctaacatagttcacagcacatataatagggattgcattaacttgaagccttccttctctccatactacaacatatgtaatataaaccctgcccactgtcccacaatcacccacccttctccatcccatctgctctctctccaaccttcctacttatattctagctgaggagacatataaataagaagtgacttgcatttcattttaaaaaccaagtgaaaccaatatagtacaccaccaactacttagatgctgacaaacttccacacttattaaatcaacaaacactgagtgacagagcactcatgccaggtatggtgctatgcactgtgtattcattggtaaacaaaacgtattccctgtcttatggagtcgactgtttagtgtggaggcagtgaagaaacaaaacatagatcatttaaaaacatattgagtaccatggaagaaatgataaggtgcaatgattgagaataataaggaagacaggggaaaatttattattcttaggaaggacggtctttctgaggtgatatttaaactgaaacttgaaagataagaagttagacatttaaagaacaagaagaagtgtcttctaggtagtcaagggggcatatacaaaccagaaaggcagtcgggagctagaagtgtttgaagaggagtagtgggggctaggggagacagcgtcaacaacatacaagggccattttgaataaaatccaacttcttaccatgacctggaggccctacctgatttggcctctgcctaccccgaccacatctccttcccactgtccatgtcacctattctttctgtccctctttcatgtcagacttgctaccacctcaggatctgttctgttgttccctctgtctgaaagcttttgccccagatcttccagtggctcctgggcccccatggtcagtcaggcttcagattaaatgtcaactctggagaaagatcactaatcaccacctctcactgtccatcatctttctgtgtggtttgctctcttcctatcccttatcaccatcaaacattcttttgttgactgtcttttattgtctattctttcacactagaatgtaagttccgtgagtttattgtatttcctattgctgtaaatctagagcctgaaacagtatctagtatatatcggaaacccaaatgatattgttcaattaatgttgaatgaaatgaaactgaagaggtaatccaaggtaaagaacttatcaaactgtgtgagacaaacaaggatttcccggaagaggtgtttttaaattaaaactacagggtggtagtgagaggtggtagggaagcagaggtcgcagctacaaaataataacttgctcatctccgtttctccgctatcttatgagcccttgtggggctgggacagaattttattcatctttctatcatcagcgtctagtacggggagtagcaaatagtgagcactcgatagatgtttgcggaataatggactagtgtgtgcagaaggatctattaactgggctgcagcacaattcagagaaggccagtaagtgctgcaactgagactcggctgcctaggcagcaatggctcacgggacagaacagcgaagcagtgcccggcaagcggagcgcagcacccattgcgcctgcgcataacaggctctagtctccgggctgtgggaagccagcaacacctctcacgcatgcgcattgtagtcttcccacctcccacaagatggcggagggcaagtagcaagggggcggggtgtggccgccggaagcctagccgctgctcgggggggacctgcgggctcaggcccgggagctgcggaccgaggttggctcgatgctgttcccaggtactgttgttggctgttggtgaggaaggtgaagcactcagttgccttctcgggcctcggcgccccctatgtacgcctccctgggctcgggtccggtcgcccctttgcccgcttctgtaccaccctcagttctcgggtcctggagcaccggcggcagcaggagctgcgtccggcaggagacgaagagcccgggcggcgctcgtacttctggccactgggcgagcgtctggcaggtgagtgaggctgcaggcattgacgtctcctcccggcaaagcttcctcggctttgccccgccgctgctcgggaccctacggtgctcggcccgactctgtggctctcttctctccatgtctcaccctctcccctccccgcactccccattcaggcctccagttggcccctggctttgcaggtcctccattctcacgcagtggatgggggtcgcgacgcccgccgtcctccacctttcctggctgctgctggagcttcgcccctgcaagtggtgccccattcgcgttaggtgggtgggtcgtccgcccttcccattttagtcgcttccccatcttcctcgtttggaccctcttgcttcctctaaaagttttaaactctctgcctgggaaaatacctgatagcccggcatgtggagttacaaagaaagggctgttatccaaaggccggtgaattttgttcactttgatgggagaatcaagtccccaggagccttggatggttaggtcagagtctgactccttgacccaccaagtagaggaatggtgcctctgttggcaaatgattgttcatctaaatcattcatttttttcggctgtaggaaatctttggtctctgaactgttgaggtgggggcgtgagctttctagatctagtgaaagaattggaaactgttatattcgttttaaaaaagaagaccttatgcagtacatgtaagacatcacttaatggtacaagcaaggataagtgatttattcttttattcagtgttagcttaaattgcctactgacgtcttagaattccatgttgtacaagccct

SEQ ID NO: 2357 - DNA, 6000 bp, Homo sapiens
attgtttcagtttataaagcttgttcataatacataatgatccttattacagctctgcaagataagtcagttattcccattttatagatgaaggagtagtcaagccttagaaaagttaaatgacttttccagcgttatcaagctacaaagtgaaagattcagaacttgaacctaagtcttcaatctccatatgctggagccttctaaagtatctcagtagagtagcgaagagctatatgagtaagaaactataagttttagaaagggctgatagttaattttattattaggatggaagttctgaaatagttggagataaagctatagtatggtcagcagaataatggctccctacaaatgtctgcttcctagtccccagaatctatgaatatgttaggttatgtgacaaaagggaattaaaatggctaatgaggtaactttaaaataggaagatcatcctggattattgacgtgggccaaatgtaagggtctttaaagaggttacttaagagtggaagagggaggcagaaaaatgagagtcagagaaggagatttgagaaggggcaaggtcagtcctgcagaatgagaaagactcagtccaccattgcttgctctgaagatggaagtgaagtgctatgaaccataaaatacagtggatctgtagaagccagaaaggataaggaaacagattcccccttagagcctctagaaagaagtgcagccctgcagacaccttggttttagcctagtgagacccattttagacttctgacctacaaaactgtaagttatcaaatgtgtgttttaagacactaaatttgtggtaatttgttttggcagccataggacatttaatacgcctaggaactattttattgtaggaagactaattaacatgacctcagggcactccatgactaaactccaaactgtctctgttccactgtcagcagtagaaagacatggaatgttcttgagcaaaagtgtgaagaactattttggtgtttgctgattagagaggatattggtgagaggaaaattaattaagattctattagatgctaggaacacttcttttgagactcactccttgaggtaacatagaacatactggtaagtcttgcccgtagaagactatgaatatatctcccagtcctgtgtggctgctcacgtctgtaatcacagcaccttgcgaggccaaggcaggaggatcacctgaggttaggagttcgaggttacagggagctgtgcttatgccactgcactccagcctgggtgacagagcaagacctcgtccctgaaaaaatgggagatggttaggtggatggatagacagacagacatatagataaagatagacacgtgggtcaagatctcccacttagtttatacatcactgaaaatctcattgccattgtaacatttcacctcgttctcgtatcccatgaaaaatacagaaccagttaggcacacatctaacttatctcttcttaggcttttccatcgtaccataactaactataagatccgaacactgaaaggtttctaaatctgagctttatttgatgccttagtacctgtagaagttaaatttatactagtaactgttttttcaatgcataattattattttgaaagaaaaaaaaagcttgttgatatctgtaggcataactctattctatgtctaaggtcttcggtaaagagagacgattaagtttatcagtaaagcaccagagtcaattaaggcgactgaaaggagcactaattttaattcattttacactagttaatattgtcaatattcttcttgtcagttttttaaaccaaaagtcttaaattaggccaaaagtgcctaggtaaaaatggaatggaaagggttttcttgtgtgtgtgtgtgtgtttttttttttttttgagatagagtcttgctttgtcactgaggctggagtacagtggtgtgatctcggctcactgcagcccccacctcccaggtccaagagattctcatgcctcagcctcccaagtagctggggaatgtaatatttaagacattaagaatcctattaatcctatttagtcatttttttttgtagctgcagaaggttcagaagggttttttaagttgaattatatgttcatatttacaacatttacatatgaaaccatttactaaaagcaatgaagctggttataacaaacactgatactgaaaataagagatatgtttgtcagtgcggtctttaaacagtgttacacaatttatttctgtttcattttgatcagaaaaaatatatatatcttttgagacatggtctctgttgcacaggctggagtacaatggcgagatctcggctcactgcaacctctgcctcctgggttcaagtgatcctcccacctcagcctctagagtagctaggaccacaggcgcgtgtcaccacagctggctaatttttttgtattcttggtagaaatgaggtttcgccatgttgcccatgctggtctccaactcctgagctcaagtgaactggccacctcggcctcccaaattcctgggattataggcatgagccactgcaccctgcccagaaaatatttttaatgcatacatatatatatatatatatgtatatgtagtgtaaataacatcttcaatcaaatagagatggcaggagctttattctgagctatgtgcaaacttgataagacaaggtaatgcttcagtaattttccatgctgaaatttggcccagtatactttgattatatatctatatttaattatagttttaaaatagctaagcagttttaaaaattcaaattaaacttttgtggaatctctaaaaataagaaaaatattactgagtaattggcaacataaaatacaaaatgtttaacttggctttcttttagatttgaagcatagtgactaatgaacatataatggtcgtagctttctttacaactatgtcatttaagtcactgatgaatatctatgatacatgcagtaaaaatttagacaaacattttggctacaaactggtttactaaataatagcttgtatcatagtctgagtcaagagtaataggcttacaattgtgtcttagggtactaagaagttcttttgaggaccttttaaaaggtattctttgttttgaaagactgttttccttctggaagttctaggccttatgagaaattacctattctgaatttgtcacaaaaaatgacttgtaaataagtcctgtgcagtgaatcatgtgctttcagtaagaggattttgaaagccttttgtaaaatgaagtcattctcaaaagagagttatttagaatataatcaaattgatttacatgcttttatttatttcaaatatgaagggaaattgtttctaaatatatttaaacttttaatagaacagtagtatgccatcagtgtggaaataactcacttgttaaataaatatttggggtgtatttgctgtatatcaggcattgtaacacagggactaatgaaagagaaaaaaaacaaagcacgaaaggacagcagaaatagctccataatctcactttccaggaataacctctatggacattttgttgtgtgtctattgcttttctaatatatacattttttaatcaaatggaattgcctcaaatatgctatttaatagcttgcttcttttcatactatttgaaaattaagaaacgattataatatgcttcatttaaaaactttaagtttaggccgggcacagtggctcacgcatgtaatcccagtacttggagggaccgaggtgggcggatcacaaggtcaggagattgagaccatcctggccagcatggtgaaaccccgtctctactaaaaatacaaaacttagctgggcatgatggcacgtgcctgtagtcccagctacttgggaggctgaggcaggagaatcgcttgaacccgggaggtggaggttgcagtgagcggagattgcaccactgcactcgcctggtgacagagcaagactctatctcaaaaaacaaacaaagaaaacttgaagtatagtatccttttaaattttaaatagataatagaaactggtttccccccatttaaaccagaatttaagtttaactttatatattcttgacagtttggattttgtccttcaacctcataaaattgggaatttaagcatcacctggttcgatttaaatgcaatgtagaatttgcattaaaatactacattaaagcctcagatttgtagtagctaacagcacttctatgtatgtgtcagggactgctctaaatacttcatatatattaactcctctattctgtacttctgttcccgttttatacagcaggaaattgaaacactgagaggttaagtaactaaagttacagagctagagtgacaggagtaaagcttcaactcaggcaacccagacttccagagttctgatctccactactaagctgctagcatagcttttctggtaactatttttaattcaaatataattcgagtgatctatctaacaagtcatcactctgacaactcagtgacttgtaatgtaaaattattcattgtaattcatttaatattattgtttctctgtgctgcaaaaatcatagcaatcgagatgtaatttattactctccctcccacctccggcatcttgtgctaatccttctgccctgcggacctcccccgactctttactatgcgtgtcaactgccatcaacttccttgcttgctggggactggggccgcgagggcatacccccgaggggtacggggctagggctaggcaggctgtgcggttgggcggggccctgtgccccactgcggagtgcgggtcgggaagcggagagagaagcagctgtgtaatccgctggatgcggaccagggcgctccccattcccgtcgggagcccgccgattggctgggtgtgggcgcacgtgaccgacatgtggctgtattggtgcagcccgccagggtgtcactggagacagaatggaggtgctgccggactcggaaatggggtaggtgctggagccaccatggccaggcttgctgcggggggaggggggaaggtggttttccctcgcactgtcttaaaccgatggcctttccttggcacagggtccactgcagcatgccaaacgaggaggcaggggcgtcgtccccccgccccccactgcagcactggagatggatttcctgtacttcggatccagggtttttgacagaagaggaagaagggggaggggtagaagtgttaaggggagtctgctgagaaaagctgtttttgaagccagaaggggtttttgtttttataatgccatttgacagagtggaataacagtatctaaggaaacgggtagaggacaacaaagaatggagcatattcatggcgaggagcaaaagctctaccccattgaaaggcttcttttcctccctggcgacaaggacacatgcattggtggccaaaagagagaggagacaaaaccgctgcagatggctgatgtgaatctagtggaaagagctactggggatgagagaaagaggaggaggcaggtactgcagagcgtgagtggtggtgttggttggtgaaatactggtcaccagtagtgtgcctgcttttgtaaaacatctaagtaaactccctgtgaacagggtggcaaacagataccagtgtctttgttagttacaaaatgcagtggtagtggctttttgcggacgactgcagcagtgctttttctccctctgttaggccgaaaagacaactgcagaggaataagaaaccttgcagcaaatgctggggtagaagcccatttacaagaagccatagtttataaatgcagcctgaacagcagaaaaaaaattactgttttttaaagtaggaataatgtcaggctatgaatgttttgtcattggaatgtattggacactttgattctacatcacgaaagtgatgctcaaattctttgatttaacataaatcctatacg

SEQ ID NO: 2358 - DNA, 6000 bp, Homo sapiens
atgtatggtttacagaattttaaaaatctactttcttttttttttgagacagggtctcactgtcaaccaggcttgagtgcagtggcgcgatcatggcttactgcagccttgacctcccaggcgcaagtgatcctcccaagcagctgtgactgcaggcgcgtgccaccatacccagctcattttttttttattttttgtacagacgggatttcaccatgttgtccaggctggtctcaaattcctaaactcccagtcacgccagtcagccttccaaagtgctgggattacaggcatgagccaccacgttgcgccttttttttttttttttttttttaaaaagagtttcgctctgtcagccaggctagaatgcagtgttgcagtctcggctcactgcgacctctgcctcccaggttcaagcgattctcccacctcagcctcccaagtagctgggattacaggcacctgccatgaagcccggctaatttttttttgtatttttgtagagacggggttttaccacattggcgaggctggtcttgaactcctgacctcagatgatccacccgtcagcctcccaaagtgctgggattacaggcatgagccactgtgcccggccacatgccgggccttaatccacttcctgttcacttttttttttcttttttcaagcaaccccagcctgagaataacccacattctattctgaaaatgttttcttttcataatgcacatcagttgtgcctcatattctaagatgtgtgtactatctaaacacttagaataaagtttataaaagtcattagttaaatattgtgttctgcttgttttatagagatatcactgatataaatactatttggtattttatgaacatttttctaaatggaaagttcttaatttaccagtgagggacgggcaataggatagattaaaaaatagcttttattcaatatcagtaacatagaagttaatgagagacaaattccaactctaattagatgacccatattctgtttcttactaggaatcaaccctcaaaagcgtattgagtgccttatggaatttgtcagcacattgcactgagaataaagctgatatatgtgctgtagatggtgcacttgcatttttggttggcactcttacttaccggagccagacaaacactttagccattattgaaagtggaggtgggatattacggaatgtgtccagcttgatagctacaaatgaggaccacaggtatatatagagttttatattacttttaaagtacagaattcatactctcaaaaagacctaattgtaagcaatgttttatataatcatgaaagttttaagccaaaatatatttattactgtgaaaagataactactaactcttagtttaactcattagtgtacttaatgtaataacagtttatagtattatagaggagactaaattaagcaaattatagttgagaggtgtagcccataggtggaggaaaaaatagtcacaaatattgtaacaaaataatccatttctattagtatagtataaaagagtatgaaaacaaaatttagaacaagacaaaaactatgagcgtgatccagagaatataaaggttcacatttttctaatgatgtcttagtatccataataataattttttttttttttttttgagacagggtctcactctgtctcccagactggagggcagtgttgtgatcttggctcactgcaacctccacctcctgggttcaagcgattctcccacctcagcttcccaacaagctgggactacagatgcacgccacaacacccggctaatttttctattttttggtagagatggggtttcacaatgttgtccagctgctcttgaactcctggcctccagtgacccacctgtctcagcctccctaagtgctgggattacaggtgtgagccaccgcgcccggccaataatcataatattatttagctaacagccattcatccaatctgctagagttgtaaaacccaagagagtgcttcagatacagggcacacattttcagaactcggatgctgtattatatcaacaaaaatacaactgtcttttttttttttttttttttttttttcttgagatggagtcttgcactcttgcccgggctggagtacagtggcacaatctttgctcactgcaacctctgcctttggggttcaagcgattctcctgcctcagcctcccgagtagctgggattacaggtccccccccccccccgccaccgtgcccggctaatttttatatttttagtagagacggggcttcaccatgttggccaggctggccttgaactcctgaccttaggtgatccgcccacctcggcctcccaaagtgctgggattataggcatgggctactgcgcctagccaaaaatatggttgttttttatagcttattcattttttaagtctgtgatgcagaaactacaagcctagtctccctttctgctatacagagaagatttcttaagtccagtaactactggactgctaagagaagacgaccatgttaaagctcattatgtacccttgccattcagttttaaagcccactaaagctgaatatgctgtcattaatcttcagtttgcctgcgttaaacaagctgttgctctttcatgtccagagttcattatgctgattctcactccttgtttttatatgccttaaatgtttcaaaaactttaatttacttgattttttaaaaataataagcacacagtctgccaaagagcagtttttcttttcttttttttcttttttttgagatggagtctcactctgttgtccaggttggagtgcagtggtgtgatctcggctcactgcaacctctgcctcccaagtgattctcctggctcagcctcctgagtagctgggactacaggcatgcactaccatgcccggctaatttttgtatttttagtagagacagggtttcaccatgttggccaggctggtcttgatctcctaatctcaggtgatccgcctgcctcagcctcctaaagtgctgggattacaggcatgagccactgtgtctggccaagagcactcgtaagaaggatggcagtatcacaaaatcaagccagagatacagagattactctaaaaagtaagtgttctaatctaagagcttataatgtgcactgactgcagaaaaatcttcaatcaattctatctacctcttccaagataactcaatatcaatatcagagtggcacccaaccatagattaaattaccacaaagttcctattcaacataggatttcatgatatagtttttaaattgggaaactgttatatgaatagagtaaatgtatgtgccccaccccctgcaaatgttttaagctattgggtcagaataggaaatgtagaattgacaaaaaataacacctttactttttttagtgtgacagattagtactttaaaacattaaacattacatgaaattagaacaaaaggagatgtggaatacttggaatttataggataattggtacaatcatattatgccttttgtcttctatccttttatttgttgttactgcatacacattgtgaccttaattttgtgatctcttgattttatttcaggcaaatcctaagagagaacaactgtctacaaactttattacaacacttaaaatctcatagtttgacaatagtcagtaatgcatgtggaactttgtggaatctctcagcaagaaatcctaaagaccaggaagcattatgggacatgggggcagttagcatgctcaagaacctcattcattcaaagcacaaaatgattgctatgggaagtgctgcagctttaaggaatctcatggcaaataggcctgcgaagtacaaggatgccaatattatgtctcctggctcaagcttgccatctcttcatgttaggaaacaaaaagccctagaagcagaattagatgctcagcacttatcagaaacttttgacaatatagacaatttaagtcccaaggcatctcatcgtagtaagcagagacacaagcaaagtctctatggtgattatgtttttgacaccaatcgacatgatgataataggtcagacaattttaatactggcaacatgactgtcctttcaccatatttgaatactacagtgttacccagctcctcttcatcaagaggaagcttagatagttctcgttctgaaaaagatagaagtttggagagagaacgcggaattggtctaggcaactaccatccagcaacagaaaatccaggaacttcttcaaagcgaggtttgcagatctccaccactgcagcccagattgccaaagtcatggaagaagtgtcagccattcatacctctcaggaagacagaagttctgggtctaccactgaattacattgtgtgacagatgagagaaatgcacttagaagaagctctgctgcccatacacattcaaacacttacaatttcactaagtcggaaaattcaaataggacatgttctatgccttatgccaaattagaatacaagagatcttcaaatgatagtttaaatagtgtcagtagtagtgatggttatggtaaaagaggtcaaatgaaaccctcgattgaatcctattctgaagatgatgaaagtaagttttgcagttatggtcaatacccagccgacctagcccataaaatacatagtgcaaatcatatggatgataatgatggagaactagatacaccaataaattatagtcttaaatattcagatgagcagttgaactctggaaggcaaagtccttcacagaatgaaagatgggcaagacccaaacacataatagaagatgaaataaaacaaagtgagcaaagacaatcaaggaatcaaagtacaacttatcctgtttatactgagagcactgatgataaacacctcaagttccaaccacattttggacagcaggaatgtgtttctccatacaggtcacggggagccaatggttcagaaacaaatcgagtgggttctaatcatggaattaatcaaaatgtaagccagtctttgtgtcaagaagatgactatgaagatgataagcctaccaattatagtgaacgttactctgaagaagaacagcatgaagaagaagagagaccaacaaattatagcataaaatataatgaagagaaacgtcatgtggatcagcctattgattatagtttaaaatatgccacagatattccttcatcacagaaacagtcattttcattctcaaagagttcatctggacaaagcagtaaaaccgaacatatgtcttcaagcagtgagaatacgtccacaccttcatctaatgccaagaggcagaatcagctccatccaagttctgcacagagtagaagtggtcagcctcaaaaggctgccacttgcaaagtttcttctattaaccaagaaacaatacagacttattgtgtagaagatactccaatatgtttttcaagatgtagttcattatcatctttgtcatcagctgaagatgaaataggatgtaatcagacgacacaggaagcagattctgctaataccctgcaaatagcagaaataaaagaaaagattggaactaggtcagctgaagatcctgtgagcgaagttccagcagtgtcacagcaccctagaaccaaatccagcagactgcagggttctagtttatcttcagaatcagccaggcacaaagctgttgaattttcttcaggagcgaaatctccctccaaaagtggtgctcagacacccaaaagtccacctgaacactatgttcaggagaccccactcatgtttagcagatgtacttctgtcagttcacttgatagttttgagagtcgttcgattgccagctccgttcagagtgaaccatgcagtggaatggtaagtggcattataagccccagtgatcttccagatagccctggacaaaccatgccaccaagcagaagtaaaacacctccaccacctcctcaa

SEQ ID NO: 2359 - DNA, 6000 bp, Homo sapiens
ccaccgcgcccggccaataatcataatattatttagctaacagccattcatccaatctgctagagttgtaaaacccaagagagtgcttcagatacagggcacacattttcagaactcggatgctgtattatatcaacaaaaatacaactgtcttttttttttttttttttttttttttcttgagatggagtcttgcactcttgcccgggctggagtacagtggcacaatctttgctcactgcaacctctgcctttggggttcaagcgattctcctgcctcagcctcccgagtagctgggattacaggtccccccccccccccgccaccgtgcccggctaatttttatatttttagtagagacggggcttcaccatgttggccaggctggccttgaactcctgaccttaggtgatccgcccacctcggcctcccaaagtgctgggattataggcatgggctactgcgcctagccaaaaatatggttgttttttatagcttattcattttttaagtctgtgatgcagaaactacaagcctagtctccctttctgctatacagagaagatttcttaagtccagtaactactggactgctaagagaagacgaccatgttaaagctcattatgtacccttgccattcagttttaaagcccactaaagctgaatatgctgtcattaatcttcagtttgcctgcgttaaacaagctgttgctctttcatgtccagagttcattatgctgattctcactccttgtttttatatgccttaaatgtttcaaaaactttaatttacttgattttttaaaaataataagcacacagtctgccaaagagcagtttttcttttcttttttttcttttttttgagatggagtctcactctgttgtccaggttggagtgcagtggtgtgatctcggctcactgcaacctctgcctcccaagtgattctcctggctcagcctcctgagtagctgggactacaggcatgcactaccatgcccggctaatttttgtatttttagtagagacagggtttcaccatgttggccaggctggtcttgatctcctaatctcaggtgatccgcctgcctcagcctcctaaagtgctgggattacaggcatgagccactgtgtctggccaagagcactcgtaagaaggatggcagtatcacaaaatcaagccagagatacagagattactctaaaaagtaagtgttctaatctaagagcttataatgtgcactgactgcagaaaaatcttcaatcaattctatctacctcttccaagataactcaatatcaatatcagagtggcacccaaccatagattaaattaccacaaagttcctattcaacataggatttcatgatatagtttttaaattgggaaactgttatatgaatagagtaaatgtatgtgccccaccccctgcaaatgttttaagctattgggtcagaataggaaatgtagaattgacaaaaaataacacctttactttttttagtgtgacagattagtactttaaaacattaaacattacatgaaattagaacaaaaggagatgtggaatacttggaatttataggataattggtacaatcatattatgccttttgtcttctatccttttatttgttgttactgcatacacattgtgaccttaattttgtgatctcttgattttatttcaggcaaatcctaagagagaacaactgtctacaaactttattacaacacttaaaatctcatagtttgacaatagtcagtaatgcatgtggaactttgtggaatctctcagcaagaaatcctaaagaccaggaagcattatgggacatgggggcagttagcatgctcaagaacctcattcattcaaagcacaaaatgattgctatgggaagtgctgcagctttaaggaatctcatggcaaataggcctgcgaagtacaaggatgccaatattatgtctcctggctcaagcttgccatctcttcatgttaggaaacaaaaagccctagaagcagaattagatgctcagcacttatcagaaacttttgacaatatagacaatttaagtcccaaggcatctcatcgtagtaagcagagacacaagcaaagtctctatggtgattatgtttttgacaccaatcgacatgatgataataggtcagacaattttaatactggcaacatgactgtcctttcaccatatttgaatactacagtgttacccagctcctcttcatcaagaggaagcttagatagttctcgttctgaaaaagatagaagtttggagagagaacgcggaattggtctaggcaactaccatccagcaacagaaaatccaggaacttcttcaaagcgaggtttgcagatctccaccactgcagcccagattgccaaagtcatggaagaagtgtcagccattcatacctctcaggaagacagaagttctgggtctaccactgaattacattgtgtgacagatgagagaaatgcacttagaagaagctctgctgcccatacacattcaaacacttacaatttcactaagtcggaaaattcaaataggacatgttctatgccttatgccaaattagaatacaagagatcttcaaatgatagtttaaatagtgtcagtagtagtgatggttatggtaaaagaggtcaaatgaaaccctcgattgaatcctattctgaagatgatgaaagtaagttttgcagttatggtcaatacccagccgacctagcccataaaatacatagtgcaaatcatatggatgataatgatggagaactagatacaccaataaattatagtcttaaatattcagatgagcagttgaactctggaaggcaaagtccttcacagaatgaaagatgggcaagacccaaacacataatagaagatgaaataaaacaaagtgagcaaagacaatcaaggaatcaaagtacaacttatcctgtttatactgagagcactgatgataaacacctcaagttccaaccacattttggacagcaggaatgtgtttctccatacaggtcacggggagccaatggttcagaaacaaatcgagtgggttctaatcatggaattaatcaaaatgtaagccagtctttgtgtcaagaagatgactatgaagatgataagcctaccaattatagtgaacgttactctgaagaagaacagcatgaagaagaagagagaccaacaaattatagcataaaatataatgaagagaaacgtcatgtggatcagcctattgattatagtttaaaatatgccacagatattccttcatcacagaaacagtcattttcattctcaaagagttcatctggacaaagcagtaaaaccgaacatatgtcttcaagcagtgagaatacgtccacaccttcatctaatgccaagaggcagaatcagctccatccaagttctgcacagagtagaagtggtcagcctcaaaaggctgccacttgcaaagtttcttctattaaccaagaaacaatacagacttattgtgtagaagatactccaatatgtttttcaagatgtagttcattatcatctttgtcatcagctgaagatgaaataggatgtaatcagacgacacaggaagcagattctgctaataccctgcaaatagcagaaataaaagaaaagattggaactaggtcagctgaagatcctgtgagcgaagttccagcagtgtcacagcaccctagaaccaaatccagcagactgcagggttctagtttatcttcagaatcagccaggcacaaagctgttgaattttcttcaggagcgaaatctccctccaaaagtggtgctcagacacccaaaagtccacctgaacactatgttcaggagaccccactcatgtttagcagatgtacttctgtcagttcacttgatagttttgagagtcgttcgattgccagctccgttcagagtgaaccatgcagtggaatggtaagtggcattataagccccagtgatcttccagatagccctggacaaaccatgccaccaagcagaagtaaaacacctccaccacctcctcaaacagctcaaaccaagcgagaagtacctaaaaataaagcacctactgctgaaaagagagagagtggacctaagcaagctgcagtaaatgctgcagttcagagggtccaggttcttccagatgctgatactttattacattttgccacggaaagtactccagatggattttcttgttcatccagcctgagtgctctgagcctcgatgagccatttatacagaaagatgtggaattaagaataatgcctccagttcaggaaaatgacaatgggaatgaaacagaatcagagcagcctaaagaatcaaatgaaaaccaagagaaagaggcagaaaaaactattgattctgaaaaggacctattagatgattcagatgatgatgatattgaaatactagaagaatgtattatttctgccatgccaacaaagtcatcacgtaaagcaaaaaagccagcccagactgcttcaaaattacctccacctgtggcaaggaaaccaagtcagctgcctgtgtacaaacttctaccatcacaaaacaggttgcaaccccaaaagcatgttagttttacaccgggggatgatatgccacgggtgtattgtgttgaagggacacctataaacttttccacagctacatctctaagtgatctaacaatcgaatcccctccaaatgagttagctgctggagaaggagttagaggaggggcacagtcaggtgaatttgaaaaacgagataccattcctacagaaggcagaagtacagatgaggctcaaggaggaaaaacctcatctgtaaccatacctgaattggatgacaataaagcagaggaaggtgatattcttgcagaatgcattaattctgctatgcccaaagggaaaagtcacaagcctttccgtgtgaaaaagataatggaccaggtccagcaagcatctgcgtcttcttctgcacccaacaaaaatcagttagatggtaagaaaaagaaaccaacttcaccagtaaaacctataccacaaaatactgaatataggacacgtgtaagaaaaaatgcagactcaaaaaataatttaaatgctgagagagttttctcagacaacaaagattcaaagaaacagaatttgaaaaataattccaaggtcttcaatgataagctcccaaataatgaagatagagtcagaggaagttttgcttttgattcacctcatcattacacgcctattgaaggaactccttactgtttttcacgaaatgattctttgagttctctagattttgatgatgatgatgttgacctttccagggaaaaggctgaattaagaaaggcaaaagaaaataaggaatcagaggctaaagttaccagccacacagaactaacctccaaccaacaatcagctaataagacacaagctattgcaaagcagccaataaatcgaggtcagcctaaacccatacttcagaaacaatccacttttccccagtcatccaaagacataccagacagaggggcagcaactgatgaaaagttacagaattttgctattgaaaatactccggtttgcttttctcataattcctctctgagttctctcagtgacattgaccaagaaaacaacaataaagaaaatgaacctatcaaagagactgagccccctgactcacagggagaaccaagtaaacctcaagcatcaggctatgctcctaaatcatttcatgttgaagataccccagtttgtttctcaagaaacagttctctcagttctcttagtattgactctgaagatgacctgttgcaggaatgtataagctccgcaatgccaaaaaagaaaaagccttcaagactcaagggtgataatgaaaaacatagtcccagaaatatgggtggcatattaggtgaagatctgacacttgatttgaaagatatacagagaccagattc

SEQ ID NO: 2360 - DNA, 6000 bp, Homo sapiens
cagatctgatttatgctccactgtaattgctaccacacattgttacaagcattgaagctatcacaggaagtggtactgtctgatggcgtgactgaagtaaatcccctgtgtggcactcttgatgagcttctggaggtcccctatcctgcttcatacacatgttgggtatacaatgtttacctgtttgtatgtgctggagaagccagcgtttttctgtgcagaggcgaagccctctctttccctgaatgtcagtcatacacataatatcctgagaggagcccataattaggagtgcaattaggggtgtaacatagtgggcagacttgggagatgaaggaaggagacaggaacagagcataatgctttttaacctatccaggcttgatattgctcactgttttttttttctcatcccgtctaatatggatgagaagattcctgatctttattattgtgaccatttgcctagtgttaattgcattcatttgcttaatacaattaatcaggaaaatacccttatttagtacagctgattctccttggcaccaccccatacctactttaacccctctttcctaacagttgtattgcatttagtctctacacacacacatctaaattctttaaaatgtggcctgatcctgtttctcatgttttgcttcccctacaagtttgtatgtatgttcagtggctgggagtgtctgctactttatgtcctattagatttctgtgtcatacttaacccaataccaaaaaagtcaaagacccaagtgagaaagaccctgcaatgttgtaggcataactcagaatgaagtatacaatccctgatttccagctttatatcaactttcctaagatctcattgctgatccacagtacattccctgggggcagttcttagaaaaccctgagcaagtgggaaacctctgaccccctttagaatattttgttagaaaagggaaaggacacatactcatggcattccttctgtaactggtaatgaatgaattttctgctttggaggaaactttgcttttgtctttctattccaaaagtttgttcattgtcaccttcagcccctcagtactgttctgataaatacagattaagatattcttttatttttctttctagtattattgaactaatagttctctctccttagttcattaatgttttcacaatagtgaaatagtaataagtaacagtaacttctttaaactctttcttgtcccatttctacaatctctggttgctggcagccccaagaaacagcagctatttagtcaacattattacgtttttgtgattctgtgctgcctacccacgtgataatcagtggttatatttgcttgccattgaaaatttaaatgactgaaggacagcaaagtaaagggaaccttgccagatacgatagcagagtaatgtcccataattcgtttccttgcaatccaagcattatcatattcatttttaaaagaataattactgtattttgttgaaagaatgggctcataaattccaagaacctaattatgttttgttactggtgttgctagaattctgatgagcttattcctgtttctaggttagctgttggaagcggaaacatatcctaacatggacaagtgtatcctgataattagaaattactgagaaagaaataatgatattttatcattaaaagaattttctatcacttggttatgctaaaatgagcacagtagagcccaattttaaattgaagaaggaaattaaattgcttatttttttatttagatctgtcagggaaagagagaagaattaaaggagagcctatcaacctgattatacttgcaggctcctctgagattaaaagaaaaaattcatagtatttattcagatgagtggtatttgaaaatcaccagcagaacaaatacggccattccactagacttacaatattagagataataattgtggctcatagttgagtgcttcctgtgtgcctgacatgatgaggaacttgagacagagaagttaaataacttgcctggactcccacagtaagtggcaaaacctcagataattaaaccttacccatttcccttttggtgcaagcaaaatccagaaaaagataatatataaacaagctaaagctaaacaatctccaatttttaatgcagagaattgagtttaaagtaactatatttaagttaatcagttatctttgattatgcaaatattcttacttgtttgagtctctgttaaggatggtcaactgtctcagttcattttgtgctcctagagcagaatgccacagactgagtaatttattaataggaatttatttggctcattgttgtagaagttgagatgttcaagattgagggactgtcatctgtcaggggccttcttgctgcttcataacatcatggacagcatcacatggcaagaggggaatgggggacagactcatccttttctgaggaacctactcccctgataaatgtcattaatccatttgtaagggcagagcccttatggcctaattacctcttaaaactttccacctcttaacactattgtgctggggattaagttttccccaggacacattcccaatgtggggaacacattcaaaccatagcaccaactatttctgtttgcccaggaatttcagtgcaaaaactatgctagtcctggcaatcctggatggttactccctttatttcagatcttgatatcaggttttctttgaaatttcacactaggaaattctttactaaagtaaggatgactgatcataaggaaccttcttctttttcttcattataagtaggcctcttgtctatgggtttcatctgttttctggttccagacttgagccaagggatcctcactgtgtacacaatgcttaatccttacccaaccatttgtgaatctagtgttctaggtaggtggtagaagagatgactgtgccattgttaatgatgggaaactgagtcaaggaaaagcaagacatttcttaagcgcataggaatccacaggcagctgagtcagctgcattatatccttgcaattctgtgcttagaaatgtaaacaaaggcctcttagataagtatatttcctgctattgtcttaacatgaacatacttgctcactaagggtcccattttgagtgatacagctgtaatcaatggcgtggttaaatgcttaatctaggtaaattgatagaaaaatgaagcaaatatttttatccttgtcttagcaaaatgttaaatttccccaaggagagattgaattatgtcagctttttgtttgtatatatatatattttttgcagggcaatttaagaggtaaagtgaagcagttatctttctgtcaaaggcttttcttagcaccagtgttggtagtgtgtgggccctttgatttaaaaagcacggatctatgaattacctggaaggtaacatgcatggaagttagggatatagctcaggtcacatggaatttggcattggaatttttgtttctcaactttctaagtggaaaagttatcttattctttgcttcatctagtatgctaaaaaagttaaatgggcctcacatcagaaaacatgaagcatttctgtgtcccattgtgtgggatacagggagttaggtagggaatgcagtgggtgcaaaggggacgacacattgttatcttgggtacctaggttttttattctaaaggacgttagcccttggggactaggctgagtgctttatttttctttattttgtatggttctcttttttcctaaaaacttgaatgaatttgatgtgtgccccagtaaactttggaattctatcagtgaaaggcttagtccagccaccgaagtcagcacaggtacatgggcattcccccacattctgttgcacgctttagtgaatatagcccatgtttggacaccctggcgtggatgacctaaagatgaacagccgtattattcattactgacttagaactattacattcctaaccacctaagaaaggttaagttgaaaatgctaaagaaggaatctttgtctcgaataagtcataaacatttttcctagtccaaaagtggtaaaagagttagatctagatctacctcctgtaggtacccttttctttagcatcctacaccctgttgtaaatgaaagaaagtaatgttaaacagttcagctcttcccacctctttccctgaaacattttcttattctctcttccttctttgggaaagtttacagttaagcttcttgtattatgtccgtttcaaaattgcagaaatgtaattatactttagaaaaaatatgcagttatgttgggtgctgaactcagtgtactctgttgccttatctctgaatgaaatcttgcagtggtgagagaaaaataaaagcagtctgtcagtggggttttcgctgtcacccttctagtaatcatctttattgccatttgtttcccctgattgctgctctgacatttccatgaacattaccaagggcagctgaactaggtaaattaggccctttctgaccaaataaaaaactattgacattttggcagtgctaaactcattaacagtattaaccaggagtcctgcttttagcaaagctccatcctgagcatgtgactgtaggttggggaagataaagaccttacagctcctaattagcaagtgtaataatggcaaacagtttgtgggagagtctgaataacattaatcagatttagaaggctaccacaatttaatcatttgttttggtgtcaccttgggggagataaaacccacattattctagagatatgaaggaagtgtttttttgatgtgtcctcattgcagtagcttaattcaagagacaggaatttagccacataagcattctttatcagttaaggtatcattgaaaaaggtatcattgaaaaagagttcattggcctctggttccctgcagtagagtctgttgaagtcaaaaggcccagtccccacctggagagagattgcggggccctgacgccagggagggaacttgcctgctggtgttccatgggtttggtaagcagagaattattctgccttgtctccctccaggttgcaaggctggtctgacttttatttccttcatccctgtcttctccatcaaatattcacccacccatctgtttgtgctgctgccttcttagtttctaacttttgctgccattcttcttttgttcctttgataccttttgcttctctactgcattctcacctttaagaaaaaaaagcctagcttttatagataacatcagtcaccgttaatattcctgtcgtgtgtcctgcactaaccagtcaggataccattgagtaaaactgttggctcctccaaggtggtgtgttttagctaatgtgtttttccccttaaactcagtgcttggacattctagatgcttgttaaaactagttcccaggtaaccaaagatttactaagggatgattttaaagaaatccacctcccaaactaaaaaaatttttgttttgccagcagcttctgcggtgttaaattagatagtaaatttctgggagctcatgttctttaatggtcactaaattgagagacgctttgtatatagcagtatcctaggcctagtggatggaggggcagggcacagaagatgtcgtatcatctagctaccttagctaccttttgacccttactgggagacaggatacaaaatttttcttgttgtctaagtatcaagtgagtcagactactaatggtaggtagacaaacattatggtctggaatgttcaagggaaattgatgacagtggtacatcctaagggcctttctgtaagcagaagaaaggatttctaggagtggtggtgctgtgcacgtgtgttagtcacagaggactaggtgagaccgctagaatgaactgggaaaaggtagagttcatttggacccttgagggacctcagttccatgctgagttaggtactaatgttttagcaggga
